United States Patent Application Publication US 2006/0134663 A1 - sequence listing, part 5

SEQ ID NO: 16594 - DNA, 914 bp, Homo Sapiens
  misc_feature (60)..(89): n is a, c, g, or t
gcacgaggatagtactcagcttatgccctaaaataacatgtataaaaacccctgaagtannnnnnnnnnnnnnnnnnnnnnnnnnnnnnttgtatacgtctggcaattaaagctttgtcttctggaacttagtgaattcttttctctttttcctccagaagtatttgttacaagatttgtaaataagagctctacttagtttgtttaccatgaacatgttgcagcaaaccttatgcatctaattcctacaaggttaaagaaaggcttttagacttgccaggttaagcaacagccaagttctcagtaattgtttgccttgatttatcttttagacttcattttgccagctctaaaactcccagtcttccttgattttagtccttaatcttttatgttctgagcaggaagggtaaaagacaggaacctgcttcactgtattaactagtccatgggctgagaccggggcatctcttttcttcatactgcaatgttgctagatacatgatcagacaccagagggttgggcattcttgcaataccttaacagtgctgaaatctgcagcatggtactaaggaagttaaagtttgaatgtaaccactttatttaaaaggtttttttctttaatttaaatgaaatggggttgaagtgaacatgattttgttgaccatgttcgtgaattacagatgcaacatgcattggtagaatcgtgtgatggtcttttgtgatacttaatttttacatatcccagtctctgtatgtatctgcatagacaaagaaaaaacaaactcctgctttgcttttattgaagggtttccaggactgcgtgtctgctcctgagctctgttttaagtatgtgtatcctttgcttgtattttgtattaaaaaaataagaaaaagaagcctttcctcgtgc

SEQ ID NO: 16595 - DNA, 675 bp, Homo Sapiens
  misc_feature (181)..(203): n is a, c, g, or t
  misc_feature (216)..(415): n is a, c, g, or t
gcacgagggctatatttcttgattatgatctgtccgaatgactaaaggaatttagatttgggaagataaacagggacttgctctataatttgaaaattagtcctaaagaagcatttgggtagcatagttttaactaaaatcctaaacttcgttgccttctaaaaaccttaaattgctacannnnnnnnnnnnnnnnnnnnnnngagagtgagtctnnnnnnnnnnnnnnnnnnnnnnnnnnnnnnnnnnnnnnnnnnnnnnnnnnnnnnnnnnnnnnnnnnnnnnnnnnnnnnnnnnnnnnnnnnnnnnnnnnnnnnnnnnnnnnnnnnnnnnnnnnnnnnnnnnnnnnnnnnnnnnnnnnnnnnnnnnnnnnnnnnnnnnnnnnnnnnnnnnnnnnnnnnnnnnnnnnnnnnnnttcaggtgacccacccagcttggactcccaaaagtattggaattacaggtgtgagccactgcgccctgcctattttcatattgaacttttaaataagttttctttatggtggtgggatgattattgtaatcatacttgggaacagaagtgatgaaaaaggtatgttacttgagatatgggaaacgctattttccatgtttagttatggggtattcaagtctaactagtggaaagtatggatacattttatttattttttg

SEQ ID NO: 16596 - DNA, 974 bp, Homo Sapiens
  misc_feature (254)..(440): n is a, c, g, or t
  misc_feature (743)..(763): n is a, c, g, or t
gcacgagggtgaatgtcactgtccagagccataaatcagacaaaaccatacatagcatgctgaaaaacttttgtaatggaacacccaacaaatgacacctaacctgtctgtgatccaacaagtccgataacatgctgctgtatttgtattctctgggaatctcagtattaataatttcatttcccacaaattctagcattcatgtaaggaaaaacatggctaatcaatatcttaaaggggcaatctttcagagnnnnnnnnnnnnnnnnnnnnnnnnnnnnnnnnnnnnnnnnnnnnnnnnnnnnnnnnnnnnnnnnnnnnnnnnnnnnnnnnnnnnnnnnnnnnnnnnnnnnnnnnnnnnnnnnnnnnnnnnnnnnnnnnnnnnnnnnnnnnnnnnnnnnnnnnnnnnnnnnnnnnnnnnnnnnnnnnnnnnnnnnnnntttagagcacttgaggaacctaaaagatgactggttcagcattttgtgtggtagataagaaagaaattatcacaaaaaatcagaaatgaacagtgagagaaaaataggaccccagacagtttataccttccatttgctgttttaaaagtgtgagcctgccaagtcaacaagtatgcctttagcgcacatgtaaatagcctgcacttcctaaatctcgtgtggcctcccatggttacattcttcaaaggtaaactgagttgagaggaagattcagcatttaaaagagaagggttgaaaaagatnnnnnnnnnnnnnnnnnnnnnttaattggcccagggttacttaaataaatcataaccattttgccacattctgtaactgtttagctaaggtcaaattaagtttaccctatggattttgtttcatcttttgtttcgtgtatatactgtttgcctttttcataaaaatcttggatttgttatatattgttcctggtatttttgacatctttgctatgtaaataaatactatttt

SEQ ID NO: 16597 - DNA, 1294 bp, Homo Sapiens
  misc_feature (417)..(432): n is a, c, g, or t
gcacgaggctcggccacgggtggcgaggctgcggtgaggcctggtctccggctgccagaccatgctgagtggagcacgctgcaggctcgcctcagcgctgcggggaacgcgcgcgccgccgtccgcggtcgcccgtaggtgcctgcacgcgtcggggtcgcggcctttggccgaccggggcaagaagactgaggagccgccccgcgacttcgatccggcgctgctggagttcctggtgtgcccgctctccaagaagccgctcagatatgaagcatcaacaaacgaattgattaatgaagagttgggaatagcttatccaatcattgatgggatccctaatatgataccacaggcagctaggatgacacgtcaaagtaagaagcaagaagaagtggagcagcgctagttcataatttnnnnnnnnnnnnnnnncgcaacagccaacttttcttaataccatataccttttaaaacacagtggcaggtaataagtggaagagaagaatgtttctgtctcttcctacgttgactgttcttattccactggtttctttagcaggactgttctactcagcctctgtggaagaaaacttcccacagggctgcactagcacagccagcctttgcttttacagcctgctcttgcctattaccataccagtgtatgtattcttccacctttggacttggatgggtattaaactcttcaggcataattgatgcaactagagtcaatatgctgtatatattaatgatagctcttgggcatcgatctctgaaagctcaaatggatggaatttagtttgcgggaaagaggctttgctttgcgcatatcaggcttaggactgtgggaggcttaagttgcagatgcttcttttattgtactcttgttctgcccttgttttttgaaggctctgacttataactgctgtatcagaagaaacattttgacagtgtcttggttggagatgaacatccctaattgacatgtgatgactatttcttattccattcatctaagagtcattgaaattttgttttgcttgtttgtttagcttcaaggtctttggtaaagtcacatgttaaggatgactgaaataattccaaaggagtgatgttggaatagtccctctaagggagagaaatgcatttgaacgaatgtgatataaaaccacataatcaaatagaaacttcatgtacttacaaaaactgagtttgtaaaattaccttcatttctttgacattaaatgcttatattagcaataaacatgttgacactttcctataaaaaata

SEQ ID NO: 16598 - DNA, 1189 bp, Homo Sapiens
gcacgagggcaaacaagcactgaagaggaatcggagtagaatgcgtcagttggacacaaatgtagagcgaagagcccttggagagattcagaatgtgggcgaaggtgccaccgccacacaaggcgcttggcagtcctcggagtcctcacaggcaaacctgggggagcaggcccagagtgggccccagggaggaaggtctcaacgtagggagaggcataaccgaatggaaagagatagaaggcgcagaatccgcatttgctgtgatgagttgaatctcttagtgccgttctgcaatgccgagactgacaaggccacaactctgcagtggaccacagcattcctgaaatacatccaggaaagacatggagattctcttaaaaaggaatttgagagcgtattttgcggtaaaactggccgaaggctaaagctgaccagaccggactccttggtgacctgtcctgcacaggggagtttacagagcagcccctcgatggagatcaagtgatcggactgaacaggaatcctcggggggtgaacagccattccttcgtgacctgtgcacgccttctgcaaccctggagctctgctcggctagtctgactcgaaaagggcgtgactcaagctgacgggactccagtagggactttgagagcacattttgtaaaaatatttatctagacgcaaatgcttatccatgaatgtcctcttagaccatttggggatgaagccatcttaataattagtaataattaattagtaataattagtaagcattttctcaatgctctgattccatcatgttttcttaacatgataacttaaaaaattgacatcctttgtactttctttaatcttaaaaagtacacggctttttacttatttaccttttaaatatgcccctttagcaattggaacaagttaaattgttaactaaaaacagtttgaaattttatttcattcgttatatcacacccccttgtcatgactctgagtcacgtgctgctgtattgcaacgtgcaggaccattttaaacctgtgtgctaaaaattttccagatacttgctttaaagctacttttgtccacaaatgaaatactgtcacagtagacgcttaaatgccacgttttcataccaagagtcattcattacttcatgtgtcacaaactgtgttgtttggaattgggtttttc

SEQ ID NO: 16599 - DNA, 1474 bp, Homo Sapiens
  misc_feature (69)..(79): n is a, c, g, or t
gcacgaggctccagaaggacctaggagagtaggtgagctttccaaagtgagagacgaatctttctttcnnnnnnnnnnnaaagggcaggatgggtatgctttgggctttctccttctgtggccccggaggaaggagagactgaggcaaggcaaagtgatagtacactgaagcagaaccggaaacacccaggaactgttcagaaatctcagaagaaatctgcttctcttcgatggaaagatataattaacgatcaaagagctctaagaaaattgcaaagaagccttaatgttcaagctttagaaagatcagagcaatttttctctttcagtccaaactaagactctctgtatttaaatctctctggggcaagagggctagatttcctcattttgttatgagactagattggtaccagtagatcagctgcctagcgagggcaggtttcttctttgcatctgtgtggcttgcttccagtctggcctgtcctttccagctgccttttgtctagcctgctatggggggccagattatcttgataagagcaggtgatttggggactagctgggttggcaggaaaagagcaggatggatctcttgggacaggttcccccaggagtataaacacaaggagccaggattgtgctggcagccaaggaaacagtagtgcctgtttgagttggcagagagggccttggcacctcttgcatccaggcagtcttgtgagatgggggcacatagcactggggaaagcagaactccattctcacctctattttgagcttcagtgctttatttcagtatgaggaaaaacaacaacaaactgaagtgcgctttccgtcctttcaaaggacaactgtcgggaagggagagccgagttgcgaggtaggaggggagcactggcagggagagacattcttgactcctctcttccctggtgtgttgtgatccagggaatgaaaagaaatttgaccctggattggttctctccttggacttaaggaatcttaccttttccttccacaaagttctcccaggcaaggaccagctgcccattctgagcccagggcagcctcttcaaccattattggtctaacctggcttgtcaggaaaccaagcccacccttccacattgggcctggctgctctattctgtaccaagtactggagaaaaagcatcaagttcttagcccttgtagcttctaccctagtttcccatcctctctctgtggaggccaaaccaactctttgccagcagccacaacatgcattgacagcggcacagtgagaataactgatgggctttgaacctggttggtcgggtaagctgtaggggtggatagagctggctttccttctgggctgtctccatctgactctactccttccatgtcccaccccactcccaccaaaaagcacaaatcaggatgtttttcactgtccattgctttgtgttttaataaccaatttgcagtg

SEQ ID NO: 16600 - DNA, 811 bp, Homo Sapiens
gcaagaggaatagtagtaacagtatctttagcgacctttggaatagttaagcacaggtcattgtggacatgaattcaggcctctgtactaaaatctatttcagggaatgttctgtctagtgatttgctcaccatttgatatataatgaattataggacaagtataagctgatctgctatagctgtccatcagagagaatacacgtggctataacatctataacaaaacgacgattcctctacaagaggctgtttctcactgctaacgttggtgtttctggcgtgggaagaaatgcacaggcgtgcatggcatgcacgttcagacagctgcattgtaagagttctgtcatgcagtctgaaaagggaagaaacaggatggctttctgtagccacacctgtgaggcgtgatgattgttgtattattagattactgatttttcttttctgaaaatacatttgagttttaatcacatctgtggaagctgtaacttttaaggtagtcaatttcatgtcttgttcaacgatgtaagcagaaactgaattgccctaattttgccaactggccattattgggattattgtttaaatttttggtaaaggaagtaatctcctttcattcattgtgacttttgttcttagggaagcagagaagactccccaagttcttataacctcattgtgctcccctaatttaaagccatgttgaggggctccattcccaattcctgggtcaaggtgaattaaccctatgttggagcactggaaaccgttatttgcaaacattgctgttaccatttagaaatatgtgcact

SEQ ID NO: 16601 - DNA, 751 bp, Homo Sapiens
ccccgggctgcaggaattcggcacgaggttctctcaggagtcatactccatgagcctggacccagtggttctttatgtggaaacaaatttcacctataggtaacctggtaactgctattttcttctgtgtgctctgtcaacaaaggtatcagtggcttgcaggagatgcctttaatactcagagcattctatctccccctatctggtttagaaggaaggccttcattagttaccttttgagaagttactagaactctctattagagacttaccctcctgacctgataaaaagggatacccatgtctctattaacagctttatctctttctacagttttgggtatttgataaggttaaggcaaaattttagttatgcttaaggaggagttcttttttcacaattacagagaaaattttggtttgttgaagattgcagaaacagcaatggtaatgtaagacagttttggcctttaatttttttcttgaaactctacagtatactacaatagtgaaggaaactattatcatgagagatccttctgaataggatgtctttctgagttccactattcagttacaaaactccttaatgcttaaaattcattatgaaaattagatttattttaaatactttcaagtgtatacatttttatttcataatttttattgtcttttaactaaagcatttagttcatttatatttactgtgtaccttttatatttaataaatatatttacttattaaaagatt

SEQ ID NO: 16602 - DNA, 396 bp, Homo Sapiens
gaagggttattgtgtgttatattactttccagggacattcaaatgttttacattactttaagaatctttacttgatataagaacaaagtataagggtttaaaagttgtttttattaaacatactatataaatgggttaatggtctatttttcagtttttaccaaaatcatgtgtctcactttttgtcttcgctttttaaagaactggttcatgaaattagtgttagttcataaattgtttaagaagttccttttccattgaattagattgctgtaaaagggagaaaaagggaagcttcccataagaatagtttgaaaacaaattgacttgttcatttccatattatctgcttgatgatatggagccagtgtcaatttttctgttagtgaatgtttt

SEQ ID NO: 16603 - DNA, 734 bp, Homo Sapiens
  misc_feature (151)..(159): n is a, c, g, or t
gcacgaggcagaaggagaagctgttgagggccgtgaaatcagtttctgttggtttgcggttgtgtttggttttgtttgtttctttataaaaaattcaatcgggcagctcccttttccacaagcctctttgtgactgtagaactattgtagnnnnnnnnngttcttttctatattataaaagaaattatccaacacagtaatattggtacctgtcattttttcacttctgtttaaaaaaaatgtatttttagcaagataacttgggtaatcttctaaaaaagaaatttaaaaactcactgttagtgactttgatgccttttaaaataagagctttttcatttcattccatctttaaaattttttatctttgttgtagaatattaaaaactattttaagaaagataaattctctttaaagagatctctagcgtgtgtgaatagagctccagatgcctctaaaagccgcatgtacaaaggaagccacgtctatcctgtctgtttatatttgcttttcctgttttgtaacctctttgtactttgttcatggtgacttgtaagctaaggggaaggggtgcctagatgcctttgtatctctccatgtcacgcgctcctgggccagccggcctcccttcctctccttgtatgtaatacctttttttcccctttctagcaagtactttcaaaagaactctgtacattttaacataaaaaataaattatgttgagccattttg

SEQ ID NO: 16604 - DNA, 161 bp, Homo Sapiens
gcacgaggctatgatctatcctttacttgaaagcttttgaaaagtggaaaggtcattttgttgcatttccccatttcttgtttttaaaagaccaacaaatctcaagccctataaatggcttgtattgaacttttacatttgaattaaagatgttaaacatg

SEQ ID NO: 16605 - DNA, 635 bp, Homo Sapiens
gcacgaggcggagtcccgattttctcctgctgctgtggcccggacatggcgactcccggccctgtgattccggaggtcccctttgaaccatcgaagcctccagtcattgaggggctgagccccactgtttacaggaatccagagagtttcaaggaaaagttcgttcgcaagacccgcgagaacccggtggtacccataggttgcctggccacggcggccgccctcacctacggcctctactccttccaccggggcaacagccagcgctctcagctcatgatgcgcacccggatcgccgcccagggtttcacggtcgcagccatcttgctgggtctggctgtcactgctatgaagtctcgaccctaagcccagggtctggccttgaaagctccgcagaaatgattccaaaacccagggagcaaccactggccctaccgtgggacttactccctcctctcctttgagaggcccatgtgtcgctggggaggaagtgaccctttgtgtaactgtaaccgaaagttttttcaaaaatcctagatgctgttgtttgaatgttacatacttctatttgtgccacatctcccctccactcccctgcttaataaactctaaaaatccacttgtatttaattcag

SEQ ID NO: 16606 - DNA, 1955 bp, Homo Sapiens
  misc_feature (452)..(512): n is a, c, g, or t
  misc_feature (565)..(641): n is a, c, g, or t
  misc_feature (1419)..(1494): n is a, c, g, or t
gaatccagaaaatgaacagcaagaatttgcattgtaaaattgtgttataaaaattggactttgaaatttcaaaaataagaaaaattttcatgtgtatttatactaaataccgttttaggaaactaggatcagggtgtttctgttggcgttggcattaaactagctggatgtaaatttgaaaagccactcaagcagcttcctagtctagaaagtcagaggtttagattagatttccgacatcccttccatttctgacctgtagttcttgtctggaattctgctttgttataaactattgttctaaggagtttgttgtgatagcacatagttcattttgtaaagattccctgcgtataaagtgatgccctacatatgtgattttgtattaaaagtatataggatcattattttattttgaaaaatttaaatacagaaaagtataaaatataagnnnnnnnnnnnnnnnnnnnnnnnnnnnnnnnnnnnnnnnnnnnnnnnnnnnnnnnnnnnnnaataaagtgaagtcaactagtatttatagtaaataagttacatacacataagnnnnnnnnnnnnnnnnnnnnnnnnnnnnnnnnnnnnnnnnnnnnnnnnnnnnnnnnnnnnnnnnnnnnnnnnnnnnnctaatgatatgatagattaactggctgttgtcacactagcaagtggcaaaacaagggattaggatcttagtctcttcaactgttagattctatacttccatcctgtgttgactttgttaatggattggataatgtgagatcactctgatgtaaataaagtatcctatattaatttcgagtgcattttaagtacttgtaacataaatgcttcctgtgaaacatctgtaaagacctgaatgggtacatgtgtgtaaagaagaatcagggcagaaaagtgcttttatcatggctccggggaccttagcttcagttggtgttgtgagaattcctcacacaaggacattctccttgcttcagcatcaggatggaagtgtttctcatctggactttttcaaagactcagctggaggaatcagaattcataatttcctggcagctcatgattctgctacactacaccatgccatctcttgtgtgaaaggacagatttgatggaggactatgtcatccctcatgcgtttcttattgtctacatttattctaatgggaagaagtgagcaaaaacacctcaataatttgggtagtttttagaaaaccttgttagtaaattagaatagtgccactttggcattatgagaaagaagcatggatacataactagggttttgtgtatgactacaacgaaatgcagaatggtgtctccaaaaggtttccagttgctgccacaagaactgcttggtattgcctacatgtgttgtcctatttttgctttgccctnnnnnnnnnnnnnnnnnnnnnnnnnnnnnnnnnnnnnnnnnnnnnnnnnnnnnnnnnnnnnnnnnnnnnnnnnnnnatatatttgtaataatctcatagttaagaaggtagttaatgtgtgactcagtccttgtctaaaagtaaatatgcctagctacccccatcttccaaagccagaaggtgaaactttaacaagttttctaaaagcaaattgtgttttttaaaagtgcatgtgtcatccaatcccatatgattgatctgtgctgggtgcagccttagaatgtaaattttttttgaattctaggcagagaatgcaggattggcattctaaatatttgtacatgataaacaaatgcttctttaggttacagcaaatagttttacttatcaagatcacgatttgttagatactgttgtcaattacagaggttttagatgaggctttctggaatgatttagtttcctggtaaagggagcctgtcctattggtattagacaggttcacttctcccagtctttcaagttgcatgccttttt

SEQ ID NO: 16607 - DNA, 1260 bp, Homo Sapiens
gcaggaattcggcacgaggtgaacactcccctatgtaaatatgctgacaataaattgtatggagaatggtatttaaaaagtgtttggagacttttcacctgtcctataaaattttgaattgtgtatgtgatctacatagaaagaatattaaagagtaggttgaactctttatagccgaatacagccttaaatatgcttgtatagcatccactggcagaagtaatagttgtgcctcagacttgggggttgcatgtggccctgggggagttactacccttggtatgcatgagcggttcctattagcatcagtgggaactcagtactctgtatgtatccacaaaagggaacttgagacccacagttattcttaatttctgatattaacaaccgtacatactgctgaatttaactcaaaatatttcaggtaagtgaaagtggtgcttaatgtagactatagaatgactttcaggtgttttcaactgaaagtatatatccagaactgcatccttatagaaatacaagtaagacttaggataatttgccttcaaaacagttttcctaatctcagcagtatccagtgagtgaagaacacttgactgactcttgggccacctctgttacttactgtactatggaagctcctggtgaatgtttacaattatgggatgtagtatttctatttgtactttaagtcaaatgcttatatgaaatatgtgacaacaaatagagaagactggctctgttagtaattatgcagtatgtactctatttaaggatctgtggtagtataacatgagtgaatgtcattaattttgaagtaataactgccacatgtgggaagtaggggagtaaggagaatgaattccaatctgtgattaaaagtgtaaactatagactctactgtagtacatttcaggatctagaagttttacttttataaagatggtgtccggaagatgttgctaatgtattttacttcaacatagggaaccaaactttttaagtatattaataaacctgtatggttagtttttaacagttttttaaaataaactttatggatatgacaaatattctgtgttttactaagtgcttggataggctttctaattttgtatacgtgctagagttaattattgaacatttttatccaaatttagttgtaactctgtttatactactgattgctcattcgttaaatgatatttttaatgtataagtcataacccaacatatgaatctgacagatttatgtcttta

SEQ ID NO: 16608 - DNA, 853 bp, Homo Sapiens
ccacgcgtccgagggctgttcgcagagctgcggaagatgaatgccagaggacttggatctgagctaaaggacagtattccagttactgaactttcagcaagtggaccttttgaaagtcatgatcttcttcggaaaggtttttcttgtgtgaaaaatgaacttttgcctagtcatccccttgaattatcagaaaaaaatttccagctcaaccaagataaaatgaatttttccacactgagaaacattcagggtctatttgctccgctaaaattacagatggaattcaaggcagtgcagcaggttcagcgtcttccatttctttcaagctcaaatctttcactggatgttttgaggggtaatgatgagactattggatttgaggatattcttaatgatccatcacaaagcgaagtcatgggagagccacacttgatggtggaatataaacttggtttactgtaatagtgtgctgttcatggaaaccgagggctgcatcttgtttatagtcatctttgtactgtaatttgatgtacacaacattaaaagtactgacacctgagaatttctgctcaagtagtatcagtgatcatttaaaatttggaggggtctttggtttacagccatgtgacaattaaaagcactaaagggagatcatgttaaagctcttaatttatattaaaacagtagcctttgtctttaaaaaagttgttgctcatgaatattataaaatgatctacaggtttcaattcacctgtttctaggttttttgtaaatttagttttgattaagcattataagcatttgagtctataaactttatagtagcatctttcagaataaacatttttaattg

SEQ ID NO: 16609 - DNA, 950 bp, Homo Sapiens
gcacgaggaaatggctcaatatgcccaacgtgcatcagtggcttttcatacccagttattcttcaaaagcaaaggaatagtaagtgaagaagcctatattttatttgtaagaaagaatgccattgtggtattaattccaaagtatggtttagaagggacagtcttttttgaagaaaaggacaaaccaaacccacagcttatttatgatgatgagataccctcacttaaaatagaagatacagtgttccatgtatttgataaagttaaagtgaaaatcatgttagactcatctaatcttcaacatcagaagatccgaatgtccctggtagaaccacagataccaggaataagcattcctactgatacttcaaacatggaccttaatggaccaaagaaaaagaagatgaagcttggaaaatagctatattcaacaaaaatcttcaaagactggtttcttttttaaaagaaaaaacttgaaagaacacttctaagcctgtgtgtgtgatacagtttgttacttttaagtacattttaataatttcagacatctgcatttttattgaacagttgactgtatctgacccatcatactactatacttctgggttgaacagaattatttatgcagaataattcaattgaatatccatcacttaaatacagtgacaggacagcaacttcagggatctgtaaagatcatttaaatggagtgctcatctcattgaggagcagattaattttgcgtaagtactttgattatttaatatttgtaagaaaaaactttcattttcctacagaggaaaatagaacaattttagaagcaaggaacatctcttttctaagtctggaagctgtcagtgttgaggatgtaatctccttgccatctttaattcacctaacttacactaggtgttctcctactgtctttaaaaagcttcctgtatttatta

SEQ ID NO: 16610 - DNA, 634 bp, Homo Sapiens
  misc_feature (551)..(578): n is a, c, g, or t
ttttttttcaggcggccgggaagatggcggacattcagactgagcgtgcctaccaaaagcagccgaccatctttcaaaacaagaagagggtcctgctgggagaaactggcaaggagaagctcccgcggtactacaagaacatcggtctgggcttcaagacacccaaggaggctattgagggcacctacattgacaagaaatgccccttcactggtaatgtgtccattcgagggcggatcctctctggcgtggtgaccaagatgaagatgcagaggaccattgtcatccgccgagactatctgcactacatccgcaagtacaaccgcttcgagaagcgccacaagaacatgtctgtacacctgtccccctgcttcagggacgtccagatcggtgacatcgtcacagtgggcgagtgccggcctctgagcaagacagtgcgcttcaacgtgctcaaggtcaccaaggctgccggcaccaagaagcagttccagaagttctgaggctggacatcggcccgctccccacaatgaaataaagttattttctcattnnnnnnnnnnnnnnnnnnnnnnnnnnnncctcgtgccgaattcctgcagcccgggggatccttttagggtctagagcggccgcc

SEQ ID NO: 16611 - DNA, 1476 bp, Homo Sapiens
  misc_feature (1104)..(1138): n is a, c, g, or t
gcacgaggccctcctcgggctgcatttcaaaaatagtcatatttttaaaggagttggaggagagggagggggaggacatggcaccattccagaaaccagcattgttacaacaccatagccagtatatttagtttggcttttcctaacatagaaatcttcaaagctggggaagtggaaataaagttttaaaaatgagagagcagttttccaactatgtcaacaaagcctatcgtgttgatgtttttattgaccattttagcaacaggctaataaaatttcaaattgaaatttttattttcatggctttaatccatgatagtttaaatactgggggccattaagagtggatgtagctaagagcttagctaacattgccttttcactctatttttctcagatattgtaagcattctgtttttcaatattgtagttaattttttggctttcaacagcagccctagtaatggtggagttgttaattaatgtgtatattgtactgaatttctgtcagttaaggggttcactgctttggtggaaattggtggaaattgctagcaggttccacgatgtttatttttttctccatgttgtatatcattaccatttcacatacgcgtttctatttttcttcctctcctcctgatctccttaaaaatgaatctagagttggtggctttttccccctcctctttggccagttccacagttcagttcttcctgaaaacagggatgatgaacttgtaggatcaggacaaatgtgtgtttttcaaaacttaaggctgggtgtgaaacaccttctgtggacaaggatttgtaaacttctctcctccctccagctgcggccccagcctaactgatagttacttgattcagtgtgctagacacttaaatagcatctatgtctctttcaagggaatttgtcaaataatgctgtttagctaattgttgcaagcaattgcatattaacagctgtgattttgttggacagcaagtattatggccaaagccagtttcttggcatttcaaaaataatgcaataaaaactagttgaggttagctgaggctggaaatgcctttttcatggtaaatgattcacttctatannnnnnnnnnnnnnnnnnnnnnnnnnnnnnnnnnncatcctggattcatcccctgatcttaaatcaaaacgtcagatcaatgaactatgaactaaagtatttttcttaagcctattgagtgatttattttttaaaaaatgtttaaatgcatatgcttttctttcagcacaaacaacagcaaacttttgtaataactaacttacctttgcatgtatgaagaactgagtcatttatttccctaacttactcctctttcaagtaacaggtggcagatcataaaatgaattctttattgtatctacacactccacattctttactgtgtcctactactgtatcttggctccctgctgtattaaacaccatcttaagc

SEQ ID NO: 16612 - DNA, 883 bp, Homo Sapiens
  misc_feature (440)..(449): n is a, c, g, or t
gcacgaggcgagcgcttccgaggcttccgctacccggaggctgcaggcccccgcgaggcgctgagtcggctccgagagctctgccgacagtggctgcagcctgagatgcacagcaaggagcagatcctggagctgctggtgctggagcagttcctgaccatcctgccggggaatctgcagagctgggtgcgggagcagcatccagagagcggggaggaggtggtggtgctattggagtatttggagaggcagctggatgagccggcgccgcaggtagaaagaacaggtttagtatctgagcgctgtggcctgtttcctcctgaaatcccagatcagagtgaggggcattcctttaacatccaggagttcttcatctcttttttgtaccgtgaacctccttggcagtaaggtgaagtccctggactccttctcagaataannnnnnnnnnaaaatacataaaccataaaggattacaaaagaacgcagtcatatcaacatacagtttgcaaagtattaactttgtattaaagtcatacttttttttattagtacactaaataataaaacctacggacagggcttataactggcaattacaaagcagtgataagtatctctttgcttggttgtaatgtgatgtaaaaacatctgcaggttctattggtgacaaagtcgtgggtactgcttatgctacattgatttgttgcttccattcataattggaaggaaatgctaactttctcttaaagactagttaaaataagattagcttttgtcctgttcaagttcatggactacgtgggaaggagttcatggaacactggttatgaacctctggtagaaaatgggccgacttttacctccatgttcttccctgtttta

SEQ ID NO: 16613 - DNA, 1004 bp, Homo Sapiens
gcacgagggaggaaggtttccagtcaggactcgctgtaccaatatccatggaggaatatgggagcgtttcgctctccttgtaggctgaagtcagtctgacttgaaggggcctggtttggatctaagcaaacacccagatggggttctctggtctcagcaaggcttttcctgttgggagtcacagtaaacagaaacccaaaaatctcatcttgggtgttttcagggcttgttttgagttttgctgaatagggagcgcaagacgccctgagcctccctctcactggtggtgataagaggagccgtctggtgtgtcagggtcacgaacccgttacatttcaggacgatcctttttccttcagcagcatttcttactggctgtggctggaatctgccttttatcacagctgtcaccattctcacgtgattcttgtgagactctttttggttataattactatttaatatttagactattttactgagcagactttataaatgagatatctacaaggcacttaaagtgttacagatgttttaccttaagaattatttaagttgtgttgggttaagacagttttcagtgtaccgtaaatgttgtgttttcagaaaaagacaaaacgatggtgctgactggttttctgtatattgcacaacagtcctcaaatacactgatgtatgaaactattcatacatcaagcagcatttttttcactctccttagaattggaactatgcagttaaggcagataaaatgtacagatgtttcatatattacaggttacatatataaatcaaatttcctatataaaactgatttgggatttggggtggaaatattttgaatattaatttatttttaaagatgccagataggactttgtgcaatgtatttttgtaaatgcttttcaaaatatctgtctttggtagtgcttctgctgctgccaccaaattgataagatgctattaaagaggtttaaataagagttttattttttaaaagggaa

SEQ ID NO: 16614 - DNA, 1417 bp, Homo Sapiens
  misc_feature (275)..(688): n is a, c, g, or t
  misc_feature (699)..(821): n is a, c, g, or t
gcacgaggcatacaaggaaaaggcaaaaggaaaaggtcaagactgtgacctttataacactgtgaccccagctgtgggccaggtggagttgtctgtggtgacaccaagtacaggcctgacaccctggtttgacagaaggctcttcaagatccctggtcttcacactgtagcagccaaaaggtaggtttacaatatacactgtccccaacttgccatggatcaattataatttttcaacttgactatggaggaaaaccatcgcaatttcagcttcnnnnnnnnnnnnnnnnnnnnnnnnnnnnnnnnnnnnnnnnnnnnnnnnnnnnnnnnnnnnnnnnnnnnnnnnnnnnnnnnnnnnnnnnnnnnnnnnnnnnnnnnnnnnnnnnnnnnnnnnnnnnnnnnnnnnnnnnnnnnnnnnnnnnnnnnnnnnnnnnnnnnnnnnnnnnnnnnnnnnnnnnnnnnnnnnnnnnnnnnnnnnnnnnnnnnnnnnnnnnnnnnnnnnnnnnnnnnnnnnnnnnnnnnnnnnnnnnnnnnnnnnnnnnnnnnnnnnnnnnnnnnnnnnnnnnnnnnnnnnnnnnnnnnnnnnnnnnnnnnnnnnnnnnnnnnnnnnnnnnnnnnnnnnnnnnnnnnnnnnnnnnnnnnnnnnnnnnnnnnnnnnnnnnnnnnnnnnnnnnnnnnnnnnnnnnnnttttttaaaannnnnnnnnnnnnnnnnnnnnnnnnnnnnnnnnnnnnnnnnnnnnnnnnnnnnnnnnnnnnnnnnnnnnnnnnnnnnnnnnnnnnnnnnnnnnnnnnnnnnnnnnnnnnnnnnnnnnnnnnnnactataccttgaatttcgatcttttcctaggctagtgatatgcagtacatgagataatcaatgcttccttacaaaatgggcttatgttagaagacttttgcccagctgcaggctattgtaagtgttctgagcacatatgagataacctgggccaagctatgatgttcgatacgttaggtgtattaaatgcacttttgactgccatctcagtggatgacagccttctcactgacagcagagatcttcctcactgtgccagtgggcaggagaaagagcatgctgcgactggccagtgacatgcagaggatccagattgcacaaccggatccagaggccttgggaagcattagggagctctccagctgtctcactcaaatctgtagcagcatatggacccacaaatggaggccaaagtgggccctcaattggacactttggcaaccctgaagagacttcttcccttcagacttactgttttagtatgttccagagaagggagtggcattcttcttggggattcaggaagagggagacacgctgttactctatccattaaataagctttgatgttcacagccccccgccaccactcagaa

SEQ ID NO: 16615 - DNA, 1457 bp, Homo Sapiens
aaaaggttgattccaggcctgtagaatagataaacagcatgggatatgagggaaatcctcagcagtattaattttgcattccaatttcatgttgatgatatacacaatggctttttgttttaaaggcttttatcttgagaacatggtgtctggagttaaagataatctacttttttaccttaggtattggcatactccacacatctgtaccattcttgagtgatcgcttaggaatgaatgtgatttgaactcattcatgttgagagggtgtcaaattgagaaccaggtagatccccaccacctacagtaaaaaggaccctaaagtaaattggttgaagaaattagatcccaaagattcttggtgaattttgaagtcttcatcagtatatccatattaaaacgagatgacagaagccaaagtaattatgggcaaacttgaagataaatcttttgactccagctctttagaggatctaaagtgaccttgatggacagtggaagaaatcacaacatggaattcctcgaataacaatttattgactttaaataattttgtctaatgctacatatacacaattaaaaaacctttacactatttctagaaagtcagcatgtatttttggctcgaagtttctctagtgttttctgtggaaggaataaaaatttgagtttcagttgtgtacttcatgcttgaaaaattaagtccttccccctcagttatactcaccttatggaattcttttgcccttgctctgttttgggcataagcttcttgttttgttttttcttccttttgttgtttcacttcagctagttgattgtataaccttagacccctttggtgccttagagcctgtgtagtctttctgtcttcaggaaaagatgctctgactttattcacgccctttagacgactcacagatgaacttatagatggtttctctttaactgttttgatttgagaattttcagagacatgaattttattccttatttctttctgcctctggtgggatctctccataaatgattttttcctctttataaatgcttcttgtaagctccctggtacaggtgtaagcctgcgaggggtttctgtagatgctgtccttggtttttctatggaaagttctgatacagctggataatctgaggcttctgttgctgatacaagaggcagaaacacactcacctgaaagaagcattttgcttcattctcgctcttctcttctagggttaaatttgcaaaatccatttcagcaatactggtatcagtggtgcttattaaagtaagttctggttcttccattataccatggccagtttctgtttcccagactggtatagagctctgtaatgaaaatgatccagaacttgcaaaagctctgattctcctagttgagatagtttttggtgattttggaatgtctgtttcagctgaattctcaaaatatttt

SEQ ID NO: 16616 - DNA, 216 bp, Homo Sapiens
gcacgagggcccactctaatatatcataatggtacctgcaccgtttgtaggcctaaagacgctacttcccctatcatacctgagcttatcaactttcatgatcacggcatcaaagacattttccttatctgcttccatatcctggatgcccttttcctaactctcgataatgaattaactaatactaacttttcaaagacacccgaaataaaaacc

SEQ ID NO: 16617 - DNA, 930 bp, Homo Sapiens
  misc_feature (345)..(353): n is a, c, g, or t
gcacgagggaacaatttttattgaaaccctcaaagattaaagaggaccaaatggtgagtttgggtaccataacagaaaatctcacctaactgtaccatcattcacaggaatgaacaaacccaaacacgacaaaattcaaattctcatgtaattgctacaagtgaatgtaaatgaactaatcattttatcataaccttcctttaatcatacgaaaaagggaatttacatggcataacaaaagatatgcaaaacttaatgaaaacacaattctcttaaatttcttaaacttatttttaaaggatgcagaatgcacttgaaatgattaaatgacttaagctgattcannnnnnnnnattgcaaactgttttaacatcagcttaacccccatgcacggtattcaaaaagaacacagctttcgaattagaaagatcacttaaattaaaaagagaaattaagtactaaaattaggaaaacgctggatttcttttgaaaggaatcttcaagtaccaatacgtatagagaaatactaattttggttacagtttcctccttactgttaaatatacaaactataatacctttcaaaataaaatacccacataagatagctttaataagaaatattcaagccagaacttggaaaaacattaagcaagaaatttactgggctgataatgtcttaatttgtgatcattcaaacatttgatgatgtgtctcctcttgtagaccccaagctctctcccctttggtcccccacagttaagagacattcagtgggttgtgcttgaaacaacctgtgatatttcattcaaaggaaaaatattttgcaatattatgacagacccagaaaggagagaaggtgggtgctctggagaaacctatatgagaaaacccaaaattattccttgaaataaaagaattttttttccc

SEQ ID NO: 16618 - DNA, 1681 bp, Homo Sapiens
  misc_feature (1594)..(1617): n is a, c, g, or t
gcacgaggctgagtcccaggggtgtacacattcccaactgtgacaagaagggattttataagaaaaagcagtgtcgcccttccaaaggcaggaagcggggcttctgctggtgtgtggataagtatgggcagcctctcccaggctacaccaccaaggggaaggaggacgtgcactgctacagcatgcagagcaagtagacgcctgccgcaaggttaatgtggagctcaaatatgccttattttgcacaaaagactgccaaggacatgaccagcagctggctacagcctcgatttatatttctgtttgtggtgaactgattttttttaaaccaaagtttagaaagaggtttttgaaatgcctatggtttctttgaatggtaaacttgagcatcttttcactttccagtagtcagcaaagagcagtttgaattttcttgtcgcttcctatcaaaatattcagagactcgagcacagcacccagacttcatgcgcccgtggaatgctcaccacatgttggtcgaagcggccgaccactgactttgtgacttaggcggctgtgttgcctatgtagagaacacgcttcacccccactccccgtacagtgcgcacaggctttatcgagaataggaaaacctttaaaccccggtcatccggacatcccaacgcatgctcctggagctcacagccttctgtggtgtcatttctgaaacaagggcgtggatccctcaaccaagaagaatgtttatgtcttcaagtgacctgtactgcttggggactattggagaaaataaggtggagtcctacttgtttaaaaaatatgtatctaagaatgttctagggcactctgggaacctataaaggcaggtatttcgggccctcctcttcaggaatcttcctgaagacatggcccagtcgaaggcccaggatggcttttgctgcggccccgtggggtaggagggacagagagacagggagagtcagcctccacattcagaggcatcacaagtaatggcacaattcttcggatgactgcagaaaatagtgttttgtagttcaacaactcaagacgaagcttatttctgaggataagctctttaaaggcaaagctttattttcatctctcatcttttgtcctccttagcacaatgtaaaaaagaatagtaatatcagaacaggaaggaggaatggcttgctggggagcccatccaggacactgggagcacatagagattcacccatgtttgttgaacttagagtcattctcatgcttttctttataattcacacatatatgcagagaagatatgttcttgttaacattgtatacaacatagccccaaatatagtaagatctatactagataatcctagatgaaatgttagagatgctatatgatacaactgtggccatgactgaggaaaggagctcacgcccagagactgggctgctctcccggaggccaaacccaagaaggtctggcaaagtcaggctcagggagactctgccctgctgcagacctcggtgtggacacacgctgcatagagctctccttgaaaacagaggggtctcaagacattctgcctacctattagcnnnnnnnnnnnnnnnnnnnnnnnnggggggaaaagtatttttgagaagtttgtcttgcaatgtatttataaatagtaaatcctcgtgc

SEQ ID NO: 16619 - DNA, 884 bp, Homo Sapiens
  misc_feature (258)..(294): n is a, c, g, or t
gcacgaggcacatatttcatttatcctaatgtattgtcatccaaaatgaaagaggtctttcttgaaggtgctttaaagacatcactacatgtattcaattactgatttaaatattcccagaattattttttacctttctctttttcctctcaaacacaaaattttagtagtacctccctctatttcttcactgatttttcatctgttttcattgttatttccactatagaacttctactttatactagcggggaaaannnnnnnnnnnnnnnnnnnnnnnnnnnnnnnnnnnnnatgtatcacatactgtgctacagttagcctcaatgaagattctattttgaactagacatcctgtcaatagtttgtcaagtaacttcattgcttcctttgatagcaattcagtgaaattttttcccaagtgatattttcccccaacttttgtgagtttgataaataggatgagtcttttatattggaaatactgtgaatggaaaattgccaaatcccttcttagtatattttaagcaccctacaacactttacctccctgcctttagtggtatttaaacatatggccaagttagtatgtgggtttgattcctttggtgaagattaaggcatcaaaacatttcttaaaatgtttgagtacaaggctaagttataatgtcaactttcaaagactatgttgtgattcggtttgaatatgctgaagtgagcaattatgatttgcccaagtgcaatacaacaaatctataatgtatatttcacattttctacttgaacacattcatgtatatattttgttaaacttcatatgtatttaaaaagaatcatgaactgtatcaaaattctttcaataaaatttctatttaaaaatctct

SEQ ID NO: 16620 - DNA, 957 bp, Homo Sapiens
gcacgaggctttggagcacctgcttcacgccggacagcctggcggccctcgtgggtaactgggcgggtctgggagccgccacacccctccttgcagtgcagatcgtctatggggcgacagacatctgggattccccagaaggctctgacaccctctgcccgccctgtagctgtagtcctcccattggctagggctctggggtcgggcaggtttcgggtgcccccagtgggcctcgggttccaggcagctcgtgacaagcccctgtgctctctagaaagcccgttttggcctgagtgcggctgaggacatcaccccccggttcaggtgagacccaagcagggaggaaggacgggtggggaggaggagggtctgccacagctctccgcacctctcctctcccagggcagcctgtgagcagcaagctgtggctctgactctgcaggaggacagagcatccctgacgctttcaggggggccctcggcactggcctttgacctctccaaggtaccaggcccagaggcagcccccaggctgcgggcgctgacactgggcctggcaaaacgcgtgtggagcctggagcggcgactggcagctgcagaagagacagctgtcagcccgaggaagagcccccggcctgcagggcctcagctcttcttaccagacccagatccccagagaggtggccctggacctggagtcaggaggcggtgtccaggagagtcgctcatcaaccccgggttcaagagtaagaaaccagctggtggcgtggacttcgatgagacctgaaggtgcagcacaagcgtggccccgcggggagtccgcctatgaggggagaggcagtctttgaggcccccatcagagaccccccgccaccacctccacctgcctgtcctgggccaggactaacacggctcctcaaattccttccctgtcaaataaacagctcccttggttgg

SEQ ID NO: 16621 - DNA, 884 bp, Homo Sapiens
gcacgagggggtgatcttcactggccagtttgtcaatggcacttcccaagtccactctgaatgtggcctgatcctaaacacaaatgctgaattgtgccagtacctggacaacagagaccaagaaggcttctactgtgtgaggcctcaacacatgccctgtgctgcactcactcacatgtattctaagaacaagaaagtttcttatcttagcaaacaagaaaagagcctctttgaaaggtcaaatgtgggtgtagagattatggaaaaattcaatacaattagtgtctccaaatgcaacaaagaaacagttgcaatgaaagagaaatgcaagtttggaatgacatccacaatccccagtgggcatgtctggagaaacacatggaatcctgtctcctgtagtttggctacagtcaaaatgaaggaatgcctgagaggaaaactcatatacctaatgggagattccacgatccgccagtggatggaatacttcaaagccacactgaagtcagtggatctgcatgaatctggaaaattgcaacaccagcttgctgtggatttggataggaacatcaacatccagtggcaaaaatattgttatcccttgataggatcaatgacctattcagtcaaagagatggagtacctcacccgggccattgacagaactggaggagaaaaaaatactgtcattgttatttccctgggccagcatttcagaccctttcccattgatgtttttatccgaagggccctcaatgtccacaaagccattcagcatcttcttctgagaagcccagacactatggttatcatcaaacagaaaacatcagggagatgtacaatgatgcagaaagatttagtgactttcatggttacattcatat

SEQ ID NO: 16622 - DNA, 186 bp, Homo Sapiens
gcacgaggtttttattgtggagtgtatacaacaggttgcgaactggctgcctgtgtcttattttgacttgcactgccattttgaggggagaagaatcaattagtggcaaacatttaaaaatgcaattttttgcagaccaaagtataattttaaaaaatgcaaattttctaaaagacacatctcttg

SEQ ID NO: 16623 - DNA, 528 bp, Homo Sapiens
gcacgaggctttggcattggggattacaattcaactgagatttgggcaggtacaaacatccaaactatatcaatattataaaaagatgtcttcaaaatgagaataaaatgtttatgtcaacctggagtcacacggttacataagcatacaaatgtgaggcaaatagtgacattttcagagatacaaaaacttaatttcctagttacttcagtgaaagaactaataaatattactcctggagaaaaaaaattaaacctgaaggagggattgggatgttaggaacaactgaggctaaaaaactggtgttatgcaggtaattccaaattaagtacagatgtacaaaagggattaattatttttaagacaaatggttaaaaactaggtagaactaaaatattatactgtgatggcacagaagatggaacttttaagactagaagtaaaagttctaaaattcttgtcttagcagggaggactatagaggattcactaatatgtagattttcttaagccaatatgcttgttgaa

SEQ ID NO: 16624 - DNA, 397 bp, Homo Sapiens
gcacgagggaagcatgataggaaggagatattgtggggtccgtttaactcgatataaagcgcagggggatggcccccggcgcgggctcttgacccgctcatcgctgaccccaccgccctggccgaggcacttggccttgctgagctggacttcctcctcctcctcctcatgaccggggtgaattagaacgtttttaaagacacccccttccaaattctgtaacacattgtaattggagaagaaggaaactctgcaaggctaaactgtcattcacaacttggctacacataaactctagtcagttttgtctccagaaccttaggcttttgtattttttaattttaatttcactgttaatccttactgtcttttttatcaagatgttggaaaagcagga

SEQ ID NO: 16625 - DNA, 900 bp, Homo Sapiens
gaattcggcacgaggcttattcttttcttcaacaaccttgacttccatggaggaagtgctggccccaaggggtctgacacaaagacgggaaacccagtcggcctctagttttctgctgctctcaggcagcacatcttgcaaacagtttggagaaggaggctgtttttgttgaatcgagttctcaaatcggtttagaccaaagccattcttctgaccctctagataagcgtagcctacaacccagtgccgtaagtttccaagattcaagaagtgtatcaacccaggcaatatctcaggatatggaagtttctgggtttatttacccctcagtgcccagagttaaagtttcagaagagacttgtgcacataagggcttcatctcaagtgtattgcagtaatggctgaatcggggttaacatcccttccaggcacagcgagttggttctgctttttgcctgtaagccaaagaaaagccacatctaaaaagctactactaaaagccagaaagaaaagtggatttgaactcagtgtcacagactcttctgagtgttttagggtcacagctagtgtaagaggcatgaagaatagacatgcaaaagggaacgggtgcaccagagaccccctgttttggctgacagaccatatgtcccaccagctggggaatctgacaagaggacatagggtggcactctttttttaaagctatttattgtatctatttttaaataaaattgcccatcctcatgtcagctcttagaacaaaagcaaaaaaccctgtaaatcaggagatataagcacatctgcacccagaaataggcccatatgatagggcaaccctgagctaaacaatgacatcttcaagggtagaactaatctgaaacctcatccgcctattcccaa

SEQ ID NO: 16626 - DNA, 1685 bp, Homo Sapiens
  misc_feature (139)..(147): n is a, c, g, or t
  misc_feature (224)..(237): n is a, c, g, or t
gcacgaggagaagtttgtgcctcatatctgaaacaaagggaaataacacacccattcaaaagtaaataaatctcctagaagtttttgtttttaacatttccatataaagagctctgttgaatgtcatgaatagactggnnnnnnnnnttttaagaacctgcatatgttgtttactagcagatgacaactacaaaaggaatctgaagaacacgtaaaacttgtannnnnnnnnnnnnnggtagattaactagcaggcctattttaaaaaggtaattcagctaaagggcaatttacttttttgtacttcagactatcttgattgtcaaagtgtacgaactgtaattttaaaatttatactgccacatgattgtaaattttagttgtcttaagttaggaattggtgaaaagctatttatgctggatttgggtcaaaatgacttatttgcaaaaaaataaataatgggaagaaagggctgtataatgaaatactgcaagactcacatattggttggaaatttccctcaaatcacctaccgattacccttgatttccctttgttttcagtttctcaaaacgaatgaaatgaaatatagcagaatgttaacccatataaaaataaagtgtacccaaatattgtaatgtatattgctgctcttcttcaaattaaataagggtttaaaaccacttaattggtaatcaacatctcaattgatacaaataaggtgtgcttggtatacattaatattttcttccaaagatatatctttggttagaaacacaaaaaaataaaactagtaatattgtatgtttatctatctctacatatttccagcatatgtagcgttaatagatctgtcctggtaactgtgtctttgggatttcattttggttccatcaaattaggaaaagaaatggcttagttgtatatgattagctagagatttttggagccagacacctgctgtttagtagataacttagtacagaccctaaacttgtcatttgtttttctcacagaatagccatttcctgctgtcttcccaatgatcactgccctttcaataacactcttgcctctagaatcatatgttcaaagtatgaatacacacctagcacatagtaggtgctcaaatattaatttcctccttgccttccttatctaccctgtgtcctccatttccccgtatgattccaacccaatatagcaaatgacatttacatgttatgaaaacatctattgggtaaaatcagatcttggataaagaaattctgacttttatataagcttttggtagacagaaaaaacagaaaggtattcgttggtagaacatttttaagttcaggaaagaaagctggaataatactacgtaactttgtccaggttactttgactgaaacacgtttttggtggatttcttttcctcaaagaactctctaaatgcaactccttgctggattcctcacccatcatcctgttggaaacccttactagacctatgtatttagggagttttgtcagaaaacatttttacttgcagtatttaaaaaaatatttactgttcctaaaatgtcattcaaatgcatgtactgtctattgtttggggatgggagctagttttgcataaacccctaatgttgtatataattgcctcatgatcttgctggttaaaaatacgtatttttgg

SEQ ID NO: 16627 - DNA, 873 bp, Homo Sapiens
ccttttaaagaaatcccccgggctgcaggcagctttattttttccattcaggctttatcaaatagcttgttcaaaaagcatatacaagagcaaaaaataccacatgcagtcaaacttcttttgccttatagtcattggctttcttttagaaaagagtgtgcacttgaataacttctaattcaaacattttccaactgtttctacttcatttttcaagttagcaacgacagatacattttagttaactgtttcatattccttatctttattcatactgaaataatataaagcctataaaatcaaagcatatactgttcagaaatctggaaaggttcttttacataatagattctgacacgttaagaaactacacacaacaaatatttgcaaaatgaatgaaaaataggataaagctatttaaaagtcaacatagtaatatttatctaaataattttaatcaaatgtacaacatatttatctgatatcatctatcttttagaatacaaaaaagtgctcagattacatttaaaaaaataacaaaaatctcttagaatggaaataatttaaataaggacggtagcaaggggaattgaaattacatctttgctcccaaaacaggaaggcaggtgtgatgtatttgaaaatcagaaagggacacaacactaagattgcaaatgcaaagcttcctgccttggaaagatataaactgtctttgaaaagtccttgtgtctttctttacagaaagttacgaacataaaatcagatctctcagctagactgctgggtcaagtaacaaggtgggtcactttttcttgactatgcttttctagtccactatcagtattcactcagctgggggctcaaaaggacaaa

SEQ ID NO: 16628 - DNA, 572 bp, Homo Sapiens
  misc_feature (518)..(531): n is a, c, g, or t
cccccgggctgcaggaattcggcacgaggccgcacgagggggcggaggcggaggcttgggtgcgttcaagattcaacttcacccgtaacccaccgccatggccgaggaaggcattgctgctggaggtgtaatggacgttaatactgctttacaagaggttctgaagactgccctcatccacgatggcctagcacgtggaattcgcgaagctgccaaagccttagacaagcgccaagcccatctttgtgtgcttgcatccaactgtgatgagcctatgtatgtcaagttggtggaggccctttgtgctgaacaccaaatcaacctaattaaggttgatgacaacaagaaactaggagaatgggtaggcctttgtaaaattgacagagaggggaaaccccgtaaagtggttggttgcagttgtgtagtagttaaggactatggcaaggagtctcaggccaaggatgtcattgaagagtatttcaaatgcaagaaatgaagaaataaatctttggctcacnnnnnnnnnnnnnncctcgtgccgaattcctgcagcccgggggattttttatagg

SEQ ID NO: 16629 - DNA, 1091 bp, Homo Sapiens
cccgggctgcaggaattcggcacgaggtgaatccatttgccttttaaaatttgataatgtctctggatataacaggacaggagttcttaaaaaatatcttaagaaattcactttatgggtaaacccaaggtttttgccaacttgttgcctagaaaataagggctagtttcagtttatacaaatagaattattaaacattttacagtccttgattagaaaccagacccaatctccttataacaccacagcgtatcctgccattgacagtgtaatcacaattctccctttttcatttagctgcttttttattattactaaatgttttggattgagcatttttccctctgtaattttcttccttcacgtttattttattttaactcttgtagtattttattgttgttaatttacaagtttaaaaatattaggtactattaataatggttaaaaatagaaaaatgcatatttttgtatgataatcaaatgtaaaatacttttatttttgctggacagttgttatatcatgattattgtgctacagtttattgtgcataatatgaaaaacaactatgacagccttcagtcgggccagggtgaagctgcttataccacctctgccgtcagagggacatgtggtgacagcagtggtgtggctgcacagggcgcactagagagagctcagcacccctgctgcccgccagcagagcccgtgctgagggaatgccgcacagatgctgatgcactgggtgaaatttctagtattgaacgtaaaggtgtacagtgtcttgctgttattttatgatggaaactgatttgaaaccaaaaatagctaactaactttatttaaggaaaggatatttatttgtactaacagagggtgaaagctgttcacatttgtcaacaaaatctgcttgctgcagtagtaacctcagtggttaaaacttgatttcccgagaaaactaaacctttgtgcctaaaattgatgacttgagttcaagtgggatgagcaagaagatgtgttatcttgttgttcaaccgtattgagtgtgaaggaaattttgatggcttaataaaattccacagcgactgtt

SEQ ID NO: 16630 - DNA, 956 bp, Homo Sapiens
gcacgaggctgtgcttcttgtggctccactcgcgaggcagctcggaggtgtggactccgattgggctgcaggcagctctgggacggcacagggcgggcgctctgatcagctcgtgtaaaacacaccgtcttcttggcctcctggccagtctttctgcgaatagtcctctccctggccagttgaatgggggaagctgctggcacaggaaggagaggcgatcccggctgaggcttaggaaattgctggagccggctccaagcagataattcactggggaggttttcagagtcaaacatcattctgcctgtgttgggggccaggtgtgtcacacaagcatctcaaagtcaaaagccatctggggctgctgcttctctttctcaggctctggggaaaggaatctccctctcctctcacttgattccaagtgtggttgaattgtctggagcactgggactttttttctcttttccttgatggaccaacagtgcaaatgcaatctcgccatttaactttcaggtcgatttcctttcctgatcagacatctttgtgccccctttaggaaggaaaagaatacacctacgatgtgccaggcactgtgttaggcgcttttatatagatcctcgttaggatgagactaagggatgaggacatctctttataaaaggcccctaagtaatggataaacagaaacacttagaggtgagaaggtctgtcttcaagatccaaggtaagattgccttcagtctgatgtttgttctcaggacttatcccctacaatattctcccactccatacttctccttctaccccaccatgtgctcccgtgcactcctcagatggtcagaggggtaacccaagtccttagagaatttggggaccaataaatatgtgatgtgtgaattttctttaaaaaacttaagagtctttgctaccttctgcttgttgagttgttttgg

SEQ ID NO: 16631 - DNA, 717 bp, Homo Sapiens
ggcggccgctctagaacaattaaagaaatcccccgggctgcaggaattcggcacgaggattccaggctccagaaaaaatgaatgaactcaccttgacgtcaatgcaattgaatcaccgttgtcattcagcgagcaaccaatgtaggattgcccacagtttttctttttaaaggtggttttcgcccttcctctcccacattaatctgaacatgaaggctccattagcaacactaaaacttgatcattaacagccccctgtgcatatgagtggatcaaaccggttctgttctttcttgtgttgccatgttactatgcctcaagcccagtttgcttttgccacagcgatggggccagtctcattcctccccaggagtgaaacttgcttcagctgaaaaggttgggtgcatcgtcagtaaaaagggcttatttgtttcattttactttcctgcaaaattttcttcaaagcaacaagtcctaggagcacacaaagcaacccaaaggcttttccctggaaaagctctttcttacctaaagataaaaccaattcacaaactgaaggtagctttttattactccgtggggagcatgtacagagctctgtgtatacacagcttcacacccaccagattgttactacagtgggttgggttttcatacagacgtaaattttgagagaaaagtcaaaggtgcttcagccttgtactgtgtatatatatt

SEQ ID NO: 16632 - DNA, 402 bp, Homo Sapiens
tttctggacgacgaaaatctttactcactaactttaccaatgaaaaaaaacaattccttccctctcacaaaaaggacatcttttaagctttcctcccaatctaacctccatgggatctcaaaaattccaattcttataactcaaatccccacacatggtgtagatgcattaactccccggggacaacaatttgaggcaagctggttcattaaacaaaaatgttatgagccctccggatcatagggcagcaggacatgcactgctttgagccaagctgtgtcatgggcattgtgtactgcacagccccagggggcttataacggtgtaattcataaatgctctcattccacctgtctgtggctttgggattcttttctgcatcttcaatgctatttaatttca

SEQ ID NO: 16633 - DNA, 1011 bp, Homo Sapiens
gcacgaggctgagcagctcatcatccctgtttctgcacagtttcctgaaactggccatcagggcctctgaggcactcaaatcagtttacttttagcatgcccccatcagggtgggtctcactgttagtgaggatacgggtctggtttgatgtttttctaggcaaaatgcttaagtgttctggttatgccattcattcatacgatgtgtgaaatttgcttaaaagggaattttcatgatttgatttagattagtatttaaatatctgctttagatagcaattaattttattgtaaaaataaggaaaaatatgtgaatatgtgaattttttaagcctgagagatgatagaatgttcccatatttttcttgtaaagaaaataatattttaacttacacatcctgtagaaaataccaccttttccccttgtattacagtacaatgtttacattactatactgtcaagctgaaagtataaaaaatgtacatatacattttgagttatgtatcctttttttaaaaaaaagttcgagtctgttgcactaggctgtacatgactaaagttgacagatgctatgctagatttataatcactagttctggtacttgtgtctttgtatgatcaaagcatgcaataagcaatacaaaataccaagccttatacttaaaagaagtttaacatattggttaatatactggttaatatactggttaaacatattgaatgtatataagtggcaaaactagatttttaaggaagtgtacattataatattggagctcagtactgcatgaagagacttcattaaaactaagaaaacatttatttggggagaaattttaggcatttaagaacttgtatttttctattttaaaagttaaattattccgtaatttggaaaagtttcgttgaatgtaggacataaccgtttgaagggttttcatttgaaaaattgatgtattttgtgcctaataatttgtcctttaataaaaatgctctgaatttgaaaaaaa

SEQ ID NO: 16634 - DNA, 318 bp, Homo Sapiens
atattcacacatcacattctggtttaatgcttattcaataatgaactgttttgtttctctacttcctttgtggagaaaatttttgggttgagagattttgaatttaatcacatttaacccacacatacttgggagggcttgccatagcttgcactcccatttggctctgtgacatcactctgcactgtgttttgtcctgggtctctggcataccttagtctcttgccctaacttactttctttcgcccacaccttaagcaataggtcctccaaggttcctgctcgatttctagtttgttcgttcattcattcttttgt

SEQ ID NO: 16635 - DNA, 1556 bp, Homo Sapiens
  misc_feature (1233)..(1365): n is a, c, g, or t
atcccccgggctgcagggcatggtgtgtctgaggctccctggaggctcctgcatggcagttctgacagtgacactgatggtgctgagctccccactggctttggctggggacaccagaccacgtttcttggagtactctacgtctgagtgtcatttcttcaatgggacggagcgggtgcggtacctggacagatacttccataaccaggaggagaacgtgcgcttcgacagcgacgtgggggagttccgggcggtgacggagctggggcggcctgatgccgagtactggaacagccagaaggacctcctggagcagaagcggggccgggtggacaactactgcagacacaactacggggttgtggagagcttcacagtgcagcggcgagtccatcctaaggtgactgtgtatccttcaaagacccagcccctgcagcaccataacctcctggtctgttctgtgagtggtttctatccaggcagcattgaagtcaggtggttccggaatggccaggaagagaagactggggtggtgtccacaggcctgatccacaatggagactggaccttccagaccctggtgatgctggaaacagttcctcggagtggagaggtttacacctgccaagtggagcacccaagcgtgacaagccctctcacagtggaatggagagcacggtctgaatctgcacagagcaagatgctgagtggagtcgggggctttgtgctgggcctgctcttccttggggccgggctgttcatctacttcaggaatcagaaaggacactctggacttcagccaagaggattcctgagctgaagtgcagatgacacattcaaagaagaactttctgccccagctttgcaggatgaaaagctttccctcctggctgttattcttccacaagagagggctttctcaggacctggttgctactggttcagcaactgcagaaaatgtcctcccttgtggcttcctcagctcctgttcttggcctgaagccccacagctttgatggcagtgcctcatcttcaacttttgtgctcccctttgcctaaaccctatggcctcctgtgcatctgtactcaccctgtaccacaaacgcattacattattaaatgtttctcaaagatggatttaaatatcatctggtccatttggctccaaagacaatcaaggaatagaaaagaaaaagggaaggaacattatttcccgctagaataatgattttnnnnnnnnnnnnnnnnnnnnnnnnnnnnnnnnnnnnnnnnnnnnnnnnnnnnnnnnnnnnnnnnnnnnnnnnnnnnnnnnnnnnnnnnnnnnnnnnnnnnnnnnnnnnnnnnnnnnnnnnnnnnnnnnnnnnnaaaaattaatctttatgtttaaaaaggcaatgtctaacaactgagaacagactataacaactgaaacaaacttgggcttactgatatgagaaaccagctagcaagtcaatcaaaactttttttcacccggtctaccatattctgtatttatcaactgtaaaatactgtatagtgtttcactccggacactt

SEQ ID NO: 16636 - DNA, 818 bp, Homo Sapiens
cccccgggctgcaggaattcggcacgagggccgagcggcgggactccatgccctagagtgccccgcgggcggccgggcggcgggactccatgtcctagagtgccccgcgggcggccgggcggcgggactccatgtcctagagtgccccgcgggcggccgggcggcgggactccatgtcctagagtgccccgcgggcggccgggcggcggccgccgcaaccgacaggtccgggactgggcgctgcggcctcgtccgcgcgccggggcgggggcctagctcgacagcttcccggcggctgcgcgatggacagccccgaggtgaccttcactctcgcctatctggtgttcgccgtgtgcttcgtgttcacgcccaacgagttccacgcggcggggctcacggtgcagaacctgctgtcgggctggctgggcagcgaggacgccgccttcgtgcccttccacttgcgccgcacggccgccacgctgttgtgccactcgctgctgccgctcggctactatgtgggcatgtgccttgcggcttcagaaaagcggctccacgccctcagccaggcccctgaggcctggcggctcttcctgctgctggccgtgaccctcccctccatcgcctgcatcctgatctactactggtcccgtgaccggtgggcctgccacccactggcgcgcaccctggcccctctacgccctcccacagtctggctggcaggctgttgcctcctctgtcaacactgagttcccggcggattgacaagtttgcaacggtgcaccaggtgccccgtgtgattgtgacagacacgtgggtga

SEQ ID NO: 16637 - DNA, 715 bp, Homo Sapiens
gcacgagggaaatgtaatgaaaaggacacatcagaatttatcatcagggaagatatcttttatgttgagcagctgctatctgatcttgacagactgtcctcttagaggactgttgaagtccattctagtcattttgtaacttcataactgcagaaagaaatgatgcaaggactgtttagtggactgagatggctgagcaggttcttggcctgaattatccagaggagataggtggatctagcttcagaggaagtctacaccccattcccttctgcttacaatgtacccatgatatgtgtttagcacagtaatactgtaacaggacatcacatggaaaaatcaaagcagctggctcactgtatttaactgaaaagaatgcctacagattggatatttaatagggaaaattaaggcactttaataacaaacttcattatgtgaaacttgttgaatattaacatacaatataccttgtatattaatgccatagtttttagaaacactaatttaaacaacaaatttaaggggtgctggcatatcccagtgacaccttcagttttattgctgcttagtattttctagtaaattagttttaattattggtagtctgttgggcaccatttgggaaagaaataaattggtctcagtgtagcagacttgtagccaaaaactttgaataaaaaatgagtataataaagaatattatttcattttt

SEQ ID NO: 16638 - DNA, 656 bp, Homo Sapiens
gcacgagggttcaaaagttcatcagccacagttcttcagtttcgccacttcaaagaatttactctggggtcaaaacccacatatttaataaacataggaatgattttgttgattttccattgctgtcacaagaacagaaagcacacattaggagaaaaccttacgaatgtaatgagcagggcaaagtcttcagagtgtcttcaagccttcctaatcatcaagtaatccacactgcagataaacctaacagatgtcatgaatgtggtaaaaccgtcagggacaagtcaggcctcgcagaacattggagaattcgtacaggagagaaaccttacaaatgtaaagagtgtggcaagctcttcaatcgaattgcataccttgcacgacacgagaaagtgcatactggagagagtccttacaaatgtaatgagtgtggcaaggtcttcagtcgaattacataccttgtacgacatcagaaaattcatactagtgaaaattttaggggacacaaaaatgagactgttgtttggagacaatattttttgacaagagtatgcacaagacaatggcaggtataaaggttttattgtaaatatgaaaaaggaaaaaatgctttcactatattagaggacttgaagtaacgtgaagtgattcccacc

SEQ ID NO: 16639 - DNA, 1541 bp, Homo Sapiens
  misc_feature (623)..(655): n is a, c, g, or t
gcacgagggtctgacctagttaatttacaaatacagattgaataggacctactagagcagcatttatagagtttgatggcaaatagattaggcagaacttcatctaaaatattcttagtaaataatgttgacacgttttccataccttgtcagtttcattcaacaatttttaaatttttaacaaagctcttaggatttacacatttatatttaaacattgatatatagagtattgattgattgctcataagttaaattggtaaagttagagacaactattctaacacctcaccattgaaatttatatgccaccttgtctttcataaaagctgaaaattgttacctaaaatgaaaatcaacttcatgttttgaagatagttataaatattgttctttgttacaatttcgggcaccgcatattaaaacgtaactttattgttccaatatgtaacatggagggccaggtcataaataatgacattataatgggcttttgcactgttattatttttcctttggaatgtgaaggtctgaatgagggttttgattttgaatgtttcaatgtttttgagaagccttgcttacattttatggtgtagtcattggaaatggaaaaatggcannnnnnnnnnnnnnnnnnnnnnnnnnnnnnnnncatactctccttactttatttcagttaccatccccatagaatttgacaagaattgctatgactgaaaggttttcgagtcctaataaaactttattatggcagtattcataattagcctgaaatgcattctgtaggtaatctctgagtttctggaatattttcttagactttttggatgtgcagcagcttacatgtctgaagttacttgaaggcatcacttttaagaaagcttacagttgggccctgtaccatcccaagtcctttgtagctcctcttgaacatgtttgccatacttttaaaagggtagttgaataaatagcatcaccattctttgctgtggcacaggttataaacttaagtggagtttaccggcagcatcaaatgtttcagctttaaaaaataaaagtagggtacaagtttaatgtttagttctagaaattttgtgcaatatgttcataacgatggctgtggttgccacaaagtgcctcgtttacctttaaatactgttaatgtgtcatgcatgcagatggaaggggtggaactgtgcactaaagtgggggctttaactgtagtatttggcagagttgccttttacctgccagttcaaaagttcaacctgttttcatatagaatatatatactaaaaaatttcagtctgttaaacagccttactttgattcagcctcttcagatactcttgtgctgtgcagcagtggctctgtgtgtaaatgctatgcactgaggatacacaaaaataccaatatgatgtgtacaggataatgcctcatcccaatcagatgtccatttgttattgtgtttgttaacaaccctttatctcttagtgttataaactccacttaaaactgattaaagtctcattcttgtc

SEQ ID NO: 16640 - DNA, 941 bp, Homo Sapiens
gcacgaggggtgatcaggcaccaaagtatggtaagggctctggatttaaagattatagaaagcctttggagggtttgcaagacatggttttgttttaaaaggatcactctactatatagggaaagacaatgagtgtgaaaatgcaaacaggagactttttaggagactattgcattcagttaggttgagagacagtgtgactagcaacaggctggtagcagtggaggaggtgagaaagtgattggacacaggaggtatttgaaagttaataagccaatagaatttgctaaaatacatattgattgtgatgtttcactataagcattatagtaatgaggaaggtgctatctttcttaaaaattaaagaagcagatatatagatatttagatatagatttttttcccctttttccaggtttgattactcaggagttggaagttcagatggtaactcagaggaaagcacactggggaaatggagaaaagatgttctttctataattgatgacttagctgatgggccacagattcttgttggatctagccttggagggtggcttatgcttcatgctgcaattgcacgaccagagaaggtcgtggctcttattggtgtagctacagctgcagataccttagtgacaaagtttaatcagcttcctgttgagctaaaaaaggaagtagagatgaaaggtgtgtggagcatgccatcaaaatactctgaagaaggagtttataacgttcagtacagtttcattaaagaagctgacatcactgcttgttacatagcccaattcctgtgaactgccccataagattgctccatgggcatgaaggatgacattgtaccttggcatacatcaatgcaggttgccgatcgagtactcagcacagatgtggatgtcatcctccgaaaacacagggatcaccgaatgagggaaaaa

SEQ ID NO: 16641 - DNA, 757 bp, Homo Sapiens
  misc_feature (169)..(183): n is a, c, g, or t
gcacgagggtttctctttagccctcttcctgcacttgggagcaaaggcactaccagtagagaagggccatccagccgtgccccagcctggacccctggggctcagatagaggtgctgagcccctgtgtcaaagttgttaaatgtttttgttttgttccattgtagctcnnnnnnnnnnnnnnnccctttcctggtgattgattttacaaaagaaagtaagctgcttagaaggccctggaagggaagtgaggaggagggacaaggaagatgactagttacggagggtgagggttgttttttgccaaaaagcctgggtagagtgatctgaattatctggcaccctcctgaatggaaccccagagtacctcctgtgtggaagggtccctggattttccctaacacccaccctctcccccttcagccatgctgatggcagagaagataagaacttggagcccatttctcactggagaggaaaacttgtcatctggctttgcggagaaggttccaccttacgctcgtagtacattatctttactatgtgctaggatatcatatttaaaaggacaaaaaaatgtaaaatacttgaatgagcttgtattataacattaatattattgagagtatctgctttccaggctgaagtgattcattcattattctagtcctgctttagtcctttgtaatttgtggtaattatgcttttctttttaatacaaaaaaatgtataaaaataaacacttgaaaagcctcgtgc

SEQ ID NO: 16642 - DNA, 1542 bp, Homo Sapiens
  misc_feature (123)..(136): n is a, c, g, or t
gcacgagggcatcttataacttgtatagattgagctgattgaaataagattttgttccaagtattatctgatagaatacaagatgattcaaaattatatagatatttaaagcttttctgctgnnnnnnnnnnnnnnaattgcaactgcttttctgccgtgcctctcttccctacccaaaagtgatgagttctgaacaagacaagactgtcatattgtagagactttggtatgtgataccatagaatactgattggatagccatcctagtcacttaccaatactgactagaagttaactcttaattctaagctatcttaaaatgcatatatatacttcttgcatggaagagcaaaacaaattcaagttgtcatgcctgataatttcagatgccaccgtatagcaaagggtgaacatgttttcaaccctttaactttttacggtgtttgaagaccagctactccttaatatttatcaatggattaagaagtttaagattttgcagatttatcaatttgggtttttgtactgaagttgtcttgcggctttgcaagtgtccctttatatttaaatttgaaagttgtaagcactgatgttaatgtgattgatcagcatgggcatatgtaaaatgtccttttctggttgcctctctatgctattgtgttcagatacttacaccataattaaacagtaagttatagacttgctgagtttggcatagatagtgcactcatttaatctgtgcctctcaaaacttcagaatattagcatattaccacaaataatttttggtgaaactattgagatattaaaatttttgaaatcactactgttacctgttatagaaaatagtgttggcttagtctagtctctgtgtaactggttacattttgatggttgtctatactcaactggatatgtgtatgtaaattagaaaatacatacctatccagacataaatgctaagtaacatttttttcttcctccaactacataatttgtagctcatcatttttccttaatcctttcctaacttgttgcagcagtttgaatttcccagatatttatgtttgaacataatggctcagaatacatatttgaacatcatagttgtatatatttttaaagtagaataaataatggaaagcaacttgatatacaagtttatactaaaatttcaactgtgtgaagatacattttaaggcattactttgctaataatctacacattcttttttctattaaataaacaaatggtttgtggttcacagctttcatccaagcttggtgataatcaattttgaaaatacagtggactgaaaagcaaatttattctttcgaagatttcatttaaatctctgtactatgcatttttgtttcagtttgtaaatgtgtaacatttatagttaaataggacaaagcaggccctatgactattgttttcaaaaaattaatatataaataattcagaggggtttttcatttacttttgaaaagaaatttctttgacaggattgcacctatcaatttcttgtagaataaaa

SEQ ID NO: 16643 - DNA, 578 bp, Homo Sapiens
aaatggtaaaacccctttttactggccacttccaagaatgctttacaggttgtgcaaaaacatttacaggctccatgtggtgtttttctcacaagctttcctgtctacaactacaacagacgtctgataaaacactaaacaagtcttctaaggaaaacaaggctagggattcctctggttaccataatccacattttcccccttaacatagtttttcataataaaaagacagaaacaaaacccggacatctactgttgttgcaaatgatctcttggactaaaccaacaaggatgtggcagtttcactttccacccacctagaaaaacagttttgtaaaaaagattactttctagtgtcaaatatcaacagcgagtacctcccctaacccctgctggaaaaaaactcaacttgatttagtttagtccccttgcccctaagggccctagcatccccatccatgtcacagactacaagaaagatgctatttgcaggactaaacatctgaaaaggggtggcagccactgcctcaggaaattcaattttctattataacataatcttgccctaagcctcgtgc

SEQ ID NO: 16644 - DNA, 1067 bp, Homo Sapiens
gcacgaggtgaccttaatagtactcaagtaggatatgcaaaatttatattttacataatctgtgaacgtttttagtacctaaaaatgtttcaggtatttcaaagatgggaacaaccagtatctagtcatcatacattaatgtgaacatgcttattaaaagttaacctctttataaaaagtattaataaaccaagatgtgcctaaatattagggtacttcaagctaaaggtcatagtttatatataaaaagtacgagattcaaggaagtaatgtatctgatgctttgcttaataagattcactagtgcttgcccttaattcatagaacagtattgtttaggttacattaacctgaaatttaaagcataattattaggattccggcctataaatataataattaaaatctatactatattattgctaccatgaaagtcttatctttggctgtttttcaagtagaaaagtaagtgtactgtgagccttttatttgagatgctgagagctattaggatgagtatttcagttttcttgtcaatagtgatactctgatgatgttgcagttatttgaagtagaactgattgtctaaaccagacacacataggagtgtgctccattggtcttgtggagagtgctgcacattaacccctccctcaactgtgcaatccacttgagactggcttctctaagccacagttgttatctgctgtgtaaagtcctggatgccagcactgtggcttcttagagagggcagatgctttgtatatcgagctgcagcattcatcgtaaaaaatgctacaaagctgtctctcttccccttctctcatgtttccctcttttcatcaagatgaaagctgttgggtaagaaaaactaagtgatttaacaaatcattatgatttaaacttaaaataaacctagaattttttggtgtccttttatcataggtgtttaatgtatattttaatgattgtagaacttgaattgctcctaaatgtgatgactacccttgtgtttactccttttggcttttgttttgtaagaatctcccatgaggagtcctgttttt

SEQ ID NO: 16645 - DNA, 1122 bp, Homo Sapiens
gcacgaggatttgccacacagccccacccttgggctgagaggacctgggaagcccctccaggagggaacacggtcatcctcgggcttctggagcggggttcctgcagccgcagaggcatctggaggaaacgcaaccaagaaaggaaggcaggtgggccccagcaaaggagtagctgccagggctcaacagctacgctctgtgacagcgcagagctcagcggcggcctttccctccctccgccaaggactcacggccaagccagctctcggggccttttttccactgcccatttggctactctgctgcaccaagcttgggagccagcctgccaacagccacctgggcctggcctccccactggctggccttgaggttggcagagtgggttgtggcgcttcctctctctgtgtgggaccaggacagtggcttaagtctccactccaggaaagaatcaaagtttctagagttgtgagaaaaccagagagtggctgtcctgattcttcactctggggggcgttcttcatgttctcccagctgttccaagactgggccgtagaattccatgtttcaggagcctaagaccctcccagagcccaggtgcttcaccgcagaccccaagccattgagcacatcacccaaagcagtggccaacatcgcggacccctgtgccttgtcacagatgggtgccggtcctcaggcgttggggacactgctgggtcgatggggtcggattctgccagtttctgctctgcagccaaagatggtcagaagcattgtcacttcagtaacatcaagtgctcaaagacatggcaaccgttcagtggtacttaagtattcaaaatatacaactacagattctctgacagaaaccagcacggggtcttcaccttcattcaccccacaggcgacatgcgagggagaacagcatctcagtggtgatttccaaaccaagcctttgttttcggtgtggggttttgggggtttgctttaatgtttttgaaattgtaaatgttgggctttgtattttgatgtaaactgagaataatggcattttagggcctgtgaccaaaaatgaagcttgtaacgaccatggatctgaataaacatgtccttgcttctga

SEQ ID NO: 16646 - DNA, 876 bp, Homo Sapiens
tcccccgggctgcaggaattcggcacgaggctacctgccatcccaccaactttggccatgaaccctcaagctcaggctcttcgaagtctcttggaggttgtagttttatctcgaaactctcgggatgccatagctgctcttggattgctccaaaaggctgtagagggcttactagatgccacaagtggtgctgatgctgaccttctgctgcgctacagggaatgccacctcttggtcctaaaagctctgcaggatggccgggcatatgggtctccatggtgcaacaaacagatcacaaggtgcctaattgaatgtcgagatgaatataaatataatgtggaggctgtggagctgctaattcgcaatcatttggttaatatgcagcagtatgatcttcacctagcgcagtcaatggagaatggcttaaactacatggctgtggcatttgctatgcagttagtaaaaatcctgctggtggatgaaaggagtgttgctcatgttactgaggcagatctgttccacaccattgaaaccctcatgaggattaatgctcattccagaggcaatgctccagaaggattgccccagctgatggaagtagtgcgatccaactatgaagcaatgattgatcgtgctcatggaggcccaaactttatgatgcattctgggatctctcaagcctcagagtatgatgaccctcccaggcctgagggagaaggcagagtatcttctgagggaatgggtgaatctctaccatttcagcagcagctggccgcgacagtaccaaagctttctctgcatttgttgacagatgcaccaccagggaatactgacaccgatgatctcataccaaggttctttcgtctgtgtactgaa

SEQ ID NO: 16647 - DNA, 903 bp, Homo Sapiens
  misc_feature (322)..(331): n is a, c, g, or t
  misc_feature (488)..(534): n is a, c, g, or t
  misc_feature (756)..(768): n is a, c, g, or t
gcacgaggctgaaagcacaaggtgatactcatttttatggtcttcccatttgtgctggtttttgcctctttgacatctgtcatcagtatttagagggtgagaagtgaatgtaacaggtataaataacatttttaaaaacaataactttgctataatcacagttgttccagagcactgtcagatacattctaatgaccagaactggtttaaaaaaagaaaatacaaccatgggaaggaaatcttaaatgaaaaacgcatctcattgtaggcatttttgcctcatattttactgggccatgtttgtttcctggtactcatgtannnnnnnnnnccagatctctttccccaagttgctattgtaagagtattctgctgcgtgtggatgcagttatacacattaaagcagatctggagtctgaagtagctataaagcagctataaaacagaaatacatgcatagctgcagaaaccatgataggtagaggacnnnnnnnnnnnnnnnnnnnnnnnnnnnnnnnnnnnnnnnnnnnnnnnacagagaagagatttttattacaaagaaaaaaattccagtgaattgtgcagaaatgctggtttttacaccatcctaaagaaaaactttacaagggtgttttggagtagaaaaaaggttataaagttggaatcttaaattgtaaaattaaccattgagtgtcaaagttctaaaagcagaactcattttgtgcaatgaacataaggaaagactactgtataggnnnnnnnnnnnnncccccttttaaatgaaaaaaagctttgcttaagggttgcatacttttattggagtaaatctgaatgatcctactcctttggagtaaaactagtgcttaccagtttccattgtatttagcttctggttggaatttg

SEQ ID NO: 16648 - DNA, 832 bp, Homo Sapiens
  misc_feature (423)..(431): n is a, c, g, or t
ccccgggctgcaggaattcggcacgaggctcttcttaagtgaaatgttaacacagggctcaatacataaaagagaaagtgaagttgttccatttggggggtcccataaggggcctcatgtttccctaggtgttaccccttcagacacagcacagcctacaaagccatggaattaaaatattaacaatgaatgcataaagatttcactgacaaataaaaaccagggagtgcattcagtgaccacaactttctaagcttctgcttttccacatgcttttctttggttttatcactttagaaaactctttgaacattaattgtctgaatggcagctatattagtcagaagctgtaatgctacacctgggaatttatctacatgatagatgctgctgaataaaatccaacaagaacgattttgtttnnnnnnnnnctttgttaaggcagtctattgttcatactaacagaaataaaacatttatgaataaagtccaaagccaagataattcttagaaagatgaagcatccctgctgggcacagtggctcacacctgaatcccagcaggtcatcaggctgtacccaccgatgagcagcacgcgccgacccaccctctcgattaccacacaactaacaaccgccgtgagcagctcgcatctcccagtcccgatgatcgcgtactggaatcttcgcttccggcactcctgccttccggaacacggaggaagcgtaagcgtacaccgagtcatttccgcagagctccatgggcactgtccagaccacgagcttgtcacctgtctcctcagggcccgatgctggaacagcctcacatgggc

SEQ ID NO: 16649 - DNA, 252 bp, Homo Sapiens
gcacgagggtcatagcctagtgatgacatatgtattgcaatacatcactcacgtgtttgtggtgatactggtgtaaacaaatctattgcactgccagtcaagtaaaagtacagcaattatgtcctgtacataatatttaataatgacaataaatgactatgttactggtttatgtatttactatactatactttttacaatttgtattagttcttgcattgctatgaataaatgcctgagattgagtaattt

SEQ ID NO: 16650 - DNA, 537 bp, Homo Sapiens
  misc_feature (467)..(484): n is a, c, g, or t
ctgagccttaaagagatgaaataaattaagcagtaaatccaggatgcaaaatcctcccaattcctgtgcatgtgctcttattgtaaggtgccaagaaaaactgatttaagttacagcccttgtttaaggggcactgtttcttgtttttgcactgaatcaagtctaaccccaacagccacatcctcctatacctagacatctcatctcaggaagtggtggtgggggtagtcagaaggaaaaataactggacatctttgtgtaaaccataatccacatgtgccgtaaatgatcttcactccttatccgagggcaaattcacaaggatccccaagatccacttttagaagccattctcatccagcagtgagaagcttccaggtaggacagaaaaaagatccagcttcagctgcacacctctgtccccttggatggggaactaagggaaaacgtctgttgtatcactgaannnnnnnnnnnnnnnnnnatacgtgtctgaataaaaatgccaaagtttttttcaaaggggggcccggtacc

SEQ ID NO: 16651 - DNA, 941 bp, Homo Sapiens
gcacgagggaaagtctgaagcattagtatctaggaggcagggatcagaggaagtagattcagaggtaaggagaattttggggctacactttcaagaaagttgtggtcaggacccaggaggtatgggtcagaaggaaaggtagaggcacacgcacgggtgactgttgagtagggacttctggctgcgccatgatctcaaccggctaatgccgagagtttgggatgacagctttctgcctctagtcggcccccggcttccccagggaaattgaaagtggaagctggttccaggtagaccagcgcttccaacccagaagcgttgggggttgttagaaagccattccccagacagcctcacacttgagtcttaagtctggtggccgccctatcgtttttaaccgtccgacaggtgcctggtattttcctccaattctaaggaagggtagaacagaatagcaagcgaaagcgctttggaggtcccttcatgattgccaaaatgttaccagggagtccttgttcttagagctccaaagatgatggtgggccgcttccatgatggcggcaagcctcttgttctctgacctggggttcctggcctcacggatactaaggaatggaatcttgggccatgcattgagtgttatagctctattcagcccaattaggatgaaccccaggcacttagcccgcgcaggaacaatggcaagcctctagcccgattgggagcagcaatggacactgcctcgctggatcacaagtgcagcagatccacccctgccagatccagagggttggaagtcagctgcgggtctgcaatgacggcaacagtggtggacggcgagtgaaagctcagctcgagccataaaaaccagaccagagagtgtgcagttgcaagatttattagtgaaaacgagctccataaatgggaggggaccaaagggg

SEQ ID NO: 16652 - DNA, 854 bp, Homo Sapiens
gcacgaggctggacatgtctgaacctcagagactaggttccagcagagttatagcctatatgtgctgctgccagggtggcatgaagtttgagtcatgtgcatgtggcatggaacctgcggctcaccccttacagaacagagtagaaaagctgctaggtattggtgagggtggggaggagtgcttcgaagggagaagccccagcaagatttattcctttttgcttcttcttctccctgtccctgccataaccatgaagccttgaacaaaccacccaaatctcaggatcttagtgttttctctgtaaattgtaatatgaacttataaagatcctccattgctgatagtctcaggttctgtgagtaacagcaaaaaaactttgtatctaacttcaaccagagcaggctgtacccttaagctctacaaaaaagaatacaccacatcccacagtccaggcaaagaatcacacgttcatattataaaagtttcaaactagatccctgcttgatctttcccctctacagtaaagcaaataactgtggcggggtgggggggcatgttttgtttgtttgttttgatgagagctgtggggagcatccttttgagagcagcaggaagcctcccccaaagtctcatatacagctaagggtatgtcacctcccttctctttcataaagttactgtcactcttcgacagacattcccaaatattggttttatgagtcctaacggctcctaggcagcctataactgtttcccattgattagctcagttcagacccagatggtggcccacttcttcctgttgtcagccagtggcctggggaagaccaaagagcccttaacacggagcctt

SEQ ID NO: 16653 - DNA, 1153 bp, Homo Sapiens
  misc_feature (237)..(264): n is a, c, g, or t
gcacgaggatttattttgagtcactcataattaattgccaaaaaagcattttatacattgagttggggggtagtggatcttagtgtggtgttgcatggaggggcgagattttatatttataatcaacacgtgggttaacatgtttttttgaaatccaagcaatacacaggaaatttaagtagaataaaaattgcagcccatttttgaaatgtcagcatgtgctgtgttcagttcagnnnnnnnnnnnnnnnnnnnnnnnnnnnnaactaataagttggttatcagtggggggttttcaaaatgtacttgttctaataagttgtacaatgaactaaatcagtggcattctctagataatgtgggggaaggttagaatattttctggccttctatggggtagcaacccagaatcaatctgaattagtcctgttttggtggagtttgtacattttaaatcctataacaaaaataatctagttttcatttccttactagctagatgcgaatttgtctttttgaatgaccctgtcaataagccagaaagggcaacccagaaaaagtgctccccacatccttctgagacttggcctgtgtgtgtggacgagaagccattcaccgtaagggtgcagaaagctcgaccaagccgaattgcaaacaacgttcgttctatttttaaatgtacaggttcgatcgtttctatagaaatgggtttatctaagaaaagtcttggtttgtcttgctgctggaaaaggcctttccaaacccctccttttattcctgtttcccgaaataaggtatttgtagagttaaggacctactgcatgcctgtccccagggccccggtggaaggaaggcagcacctgctcttccttgactcagcccatcatctgaaaattcagaagtgaaccaagggttagacgccagaggttgggcttctgttagagtggcttcaaaacatgagccttatgggaagtagccttaaaaaaagaatgggtatacgcagtgacttccgatggaaatctcccaaacaatatttcctaagtagcaatggggttggctcaagtctttattaacaaagaacatttcttctttcatctataaagaaatctttaagatgcattgacagtgttgaattacccacagcctgtgaaga

SEQ ID NO: 16654 - DNA, 1448 bp, Homo Sapiens
  misc_feature (858)..(906): n is a, c, g, or t
gcacgagggcagactttcctatgcttcatttctcctgttgctttcaaagaaggcaggagacacgtttaataacggagtatctggtgataagaattgcttgggcaaaccagctcatctggactctttctcagtcttggaagtgggaagaggaaaacttgtttccttcctgcttcttaaggatattctgagggtacactgatcaataacactaaatttggaatgaaaataccatgtgatgagtttagcctgctgatgcttccagtagatccttgtatagtttcaagatttaagttttccgatttcatataaatttcttaaagtcgaggaccttataagggtgcaatggatgtttgctaaatatgaaaaactgacttgaatttgcactctttaatgttgcgtatctgctctagtgggcaggacctagggcttaaaggggaacttcctttctccaattctaggaactgggactctaaaatgagaagctggttgtctgaagtaaccctgcaggtgtggttggggaaggtctgttttcttggatgaagggattaaactgagcaaatcactagaagtatgccctgtcccctgctcagaacactggggagctcaagagtgggctgcaatgtgcacccctcaggaatagctgtgaattgcaggtctactggctttttgctttttgtcttttgctgcaaggtaccccacgtacttaaccattctcaacagtgtaaatcagtgtcattttagaatgagatactcagcttgcttctaaagtcactgaattactgagtgagtctctcctttagagtcttcggcaaccaaattccagaattgaagagtctactactcagaggcaacaagatnnnnnnnnnnnnnnnnnnnnnnnnnnnnnnnnnnnnnnnnnnnnnnnnnccctagctaggaacacagagaatgttttgtaggatcactgggatattttccacaacttcctcttctctagcacacacatctgttgataggaaatatttgagggtttttccactaccaaatgggagcttcgtggtcctggtgtcaaacactataaacctttgaccagctgagctgtgactgctgtcacatatctgagtcctgtgtgcacagtaatatcctgggtcaggtaaaatccaggtcttcaagttttaaggattttttgaagaattcgggcttctttaagacgatccatgcccaaatccacaagcttgttgacagtggattacagtttgtgtggcaaagtccaagttgttacactgtgctttaaaaaaaatcttatctgtgtattgttaacttagagaccatgagatctatttatcaggaccaggagatacacacttcaggtccattgcaactgacttttttcttgtttttcctcaaaccctggtggagcctgggaagggggcctccacaattctgtggctttgatattagccccaatt

SEQ ID NO: 16655 - DNA, 1343 bp, Homo Sapiens
gcacgaggctcacctcccccaaagaaaatggtttttacttaatagtttgtcaaagtttgtaaattgtacccatggacttttgccagattccaactttaagggtatgaaagagggctagaaatagacctttacttttcatttggaagtatttgacaactttctaaacttttcttcctattttggggattttcaagtaatatattctctgtgtgtataacgtgtggttcactcctgtaaaatgaaattgctggaatcaatcaagccagtgcaccagtagagttatttgtaaggaacgattgtgtttgacagtaatagtcaagtctggaactatattctacagtcacccacttctgttttagaagcattttgaaacactttttggggttatagaaataagactcatgattcaatatatttatttatatttttaaagtataatatgacctcaaatcaatggaggaatgctgtattatgcaggtttgtgtcaatttcctgacattaaaattgtctgattttgtccgtttcttaaaattatgattagtgagtggtctaacagtttaaggcattgataacttacaagtagaatggggctctcaaagcattttaactcagttgctttagggtccattttttatgtaatcacttactcagtgataaatgaatctctgaaaacaaatgcttttacattttaatttaaaaagaaaacaggtgcaggccacagaaaagttttaaagtatgccttcttaccagcaatagttcattttaaaaatcatgccagatttttgccaagatcagtgtttcctcaacatgaagatagaaatagatttgtatagtgtgctcttgtacctctacatagattattatataattttgagcagttacacatttatctaaaggaaataaatcaactgtgaataaatgcatgtttaccaaaatggctgtttacagtgcatttagttctgatatttataaagatgacatttcacagaataactttaaaatagtttgaaattctatatagtttagacatcgatcacatctggagacaaaataaaatgtgcaatattttttatgtaggcgagctaacacagtgtacctaattgcagaattatctgattaatttgtaatagataagttgtataacattttcatatcttaaaatgttttttagatcaatcttgaagtgaaatattttcaaataaaattctacagaaaaattctgttggctatgatatgcacatttttgggcaagttatgaactagagccaaaagtagtattgacagttttatttactctgccgtaatttgcaagcttatcagttaagtctgtagtttttttaaaa

SEQ ID NO: 16656 - DNA, 861 bp, Homo Sapiens
gcacgagggatacctcaggattcgtgacaatgcctttaaagatccaggagagatgttcagctactaggaactgctagcaagtatagcgcgaatggctccgagctcagacactctacagctgagagtagacacttgtggtatgtggagtacagataagccaggggcaggccacggcacgctccatgaaagctaggagggagtgaaatatcagtgatcatcgcaaggaaggaggcagacaagagtaaggcacacctgactcttaggactagcagtcagaaccaggaggaaaggttttattgctatgcgggtaggtaagaacagattttacttacatccatatagttacttaaagtccagttttctgttaaacatttttcttaatatattgagccaaaactagtccagttaagctgaacttggtttttctggagatgaattgttttaaattgacaccctattgatggctcccagttgaaggaagtgagcacattatttgtactgtgaatataaatttttgcccttttatttatcttcctttgacccatttccttaaaataatggctcaaagtaatagacttccccaaatggtggggggatgggtgggttattaatgggaggtatggggggtttagcttgagatgggacttggtcttagagctagttctaaaggttgtttacttttctagggaggagtctgctactagtcttatcagctcttaaaaacagaaactcatctgtccaagttcgtggcagaaaggaacgtccttgtgaagacctttatctgagccactgtacttcgttatcactgccatgcagtttacatgagctgttctgcagctcaaattccattttgtgaatggg

SEQ ID NO: 16657 - DNA, 737 bp, Homo Sapiens
gcacgagggtccctttgcagtccatccctcacgctgctgatttgtctttgtcaccatatattagtttgctttgtggtggtgtttagtattttatataaatgggattgtgtagcatgtacttttttgtttatggtttctttcacacacaatgactttgaaattcaccaggttgcagtgtatcagtagcttattccttttattgctgagtagtgtcccattatgtgaatatgccattatttgtttttctactcacctgttgatggaccttgggattgtttccagtttggggctactgtgaataaaactgttaggaacatttgtgtacaagccactgtgtagacataggttttcctttctcttgggtaaatacctaccagtaaaatggttgggttgcatggcagatttatgtttaataaagtaactgccaaactgtttgttttccaaaggggctatacccttttatattcccaccagggttgtatagagttccaactgccaacactcagttttcagccattctgatgggaatctagtggtatctcattgtggttttattttcatttccccgggtgactaatgctggtaagcatcttttaaggtactttttggccagttgtatattttctgtgaactggctgtcaaatcttttgcccacttttaattggattgtttgtcttattgagttgtaaaagttctttatatatactgtattaaagtcctttgtaagacaaaaaccc

SEQ ID NO: 16658 - DNA, 1572 bp, Homo Sapiens
  misc_feature (253)..(264): n is a, c, g, or t
  misc_feature (490)..(502): n is a, c, g, or t
caaggttctaaaggcttatgaggtcctgaaggagccaggccttgtgatggagtaggtgacacaggcctggttgtcctgtcagcagaagggaaagcaggggctgggctgagaggaggacacggagggctctgctgaggttccttcctgggttccaccaacagggacagggagtcacttgccttccagttctgtgctgggatggcgggacagcacttggcttgcttggccagctgcgtcatgagtttgatttggnnnnnnnnnnnngcagctgcttcatatgctctgctccagcccctccccaacagctggtagcttatggtttcttcaagaggaaagtagactttatgctgtacatttgagctgtagagctaagattcgcttactggtgagctgtgaaaccttgttgctttttcccagagtctgatggcagtgactgtgatcaagggaatcttcaccgccacaagtgcaggcagcaggtgtggttcaggtnnnnnnnnnnnnnactgtgctcctttgaagccaacgtgcctccctcgcctccatactggagggacgacgcaggggagaacagagaagtgcttggccctaggattgaggcacttgtttcctagcccgctgggttagggctggtgcaagcgaggcaatgttgaggatgctttaagcactaccagccgaatccgggaactctgttaacagttgtccaaccagcagaatgagggctaactgtataaagcatgggacccaggatgaggataaggaaaggacagcggctttccctgggcagtacaatggcttgaaggcaaaaagggataaagtgacagccgactgtgactctggtgaggaggggtgagcagggaggttgattctctgatgttaactaagtggcaaagtctcaaccgtgctcagccctccccctcccagggaagagaaacaaagattcaaagtaagcatgatactagtgggtttaccagtgtttcttccaaggagacatatattttttaataaacgatagttgcaatgaactgtggctcagagaccttcttaaagtagttgagaagggagggcgtgggcaaagcagtgggaagaacatcccaaacttttgggggccagagggctctctccttagtgatgatcagctagccgagctgggccgtcctggggatcggtacagctccctggggtggtgacaggccctttgtgaaagttgtgtgcttggtcttccaccccagccccagacactgcttcaaatagcaccaaccagatgggagtccacatctgtggtggcaaaatgctgacattttcccaagaggtacacaaggtgggagaggcctgctgtagcagaggtgtgtgttagagaaagcaggggcctgatttagtagcagagaactgggtgagaaaaatggccagagaaagtgacctgccagctaccagtgtttccgaaaatgagggtgggatgggcccatttgcagagcaggacagcagtcatccccatagctctctgaggaggggagggatgcttagagcaggcagttctggcagttctgacgtggcaggtgccttgcaacttgtgcg

SEQ ID NO: 16659 - DNA, 1671 bp, Homo Sapiens
  misc_feature (1265)..(1288): n is a, c, g, or t
ccacgcgtccgctttgccatcagttttgatgtggaaacactgtgatatataaaatgttgttggacaacagtagttttaagagtaaaatatgaaacgtttaaaaagttccaaaaaaagctagctctgtcctttacttattgagacactttaactttttcctttgtatttccattgtattagataaataaatgtgaatgtaaaattgtataaattactgtacttgaatacttctgtttcccagtgttgcttgctggacattttagtgccttggacttctattgcttctgccattagcatcaacttaccagaccccagatcaataaagggcatgtggaaggaaatcgtaggtccatgtgaccccagcagtccagcagtggttatgccaaagggaaattgaaaaagtatttttttaagtcattcaacaactttgtctagagcaggtgtaagatgagtagggtgggaagttaggttggcatcagtggttaaaaacagaaagttctgtttcgggaatagtgaggagggggtgttgtaacaaaattggacaacttaaaagaatggtgtgtgctgggtgaaagacaaagactaaagaatgaggaaacaaacgtgatgcctggccagtgactgtcatataaacctttcttatttgagctaggcttgaacagacgtgacctagaagaaactgaacataaagagaagggggtggggggctagttttcaagttggggaacctgatagtgaaaagtcacagatggagaaaatttgctctcagaaaaactgtttggattgctttcctcttgttgcacatgtaccatgcatttctcagcttggggtactacattttgtggaaagttaatctatctatctttccacatctgaattaatcattctaggaaagaatacttattcctactcatttcctttatgatgtccaaatggttgcaggatcataatctattgtgccacctttatttctagaagtacaactaatatgttcacattttcaaataaataatactccccgtaagtaataactgcaaccaatcagtgttattcagtgctatgcctccttgtaatgggtagttattaattattttcagagctttccggaaatactgtcctaactggctatgtttaggatctttgttatctctgaagacaaagaaagaagctaggactcttaattttggggtgcttcttgactcttagttgggaaactgaaaatatttccaaccttttacccacgtcaatggcatattctgggaatnnnnnnnnnnnnnnnnnnnnnnnnagaaagaggctggaggctcctgtaccctgttcattccttaagggccctgcttcccttaataagtaagtaagttggtctacggccctaaatatgcaaatgagagctgaaggtttttaaaaggtagaaaggaaaagggcaagggcttccacccctgctttaaaatgatttatttattctctgcttgtatttcttgtggagagagtaaggatagaaccaacaaggggctgagtagctgagaaaggggccacccaagagtgaaacatactttataccagaggagcagtggagcctcatgcagcacattatcatttgttatttgggtttaataataattttgacatcttttcactcatacacaaaaagtcagaacttggtgtaattac

SEQ ID NO: 16660 - DNA, 899 bp, Homo Sapiens
  misc_feature (742)..(751): n is a, c, g, or t
ggctcggtgttttgactgcaagtctttttggatagaattttatagttagaaagtagctaacacttgggttttataggcacaaaaaacaagtcttatactagctgtactttattttttgagttcttattaataaggaacatccacttttgcattgacagtgatttcaagattgctttatcagcctttaaaggattcttgactagtcgtgcacatcagaactgccaggtccccagtggttctgaagcagtaagctttgggtgggctctggcatcagcactttcactaagcttcacagataattctgatgcatactccaggcctgaaccattgatcaatttgaaacatgcataacaaagcaaaaaaagttttgtttcaccttttgaaatacagttaactcttttaccatgccagagatcattcagagagacaggtcgttgctccggagtgatacagatctggcagtacccagcccttgtgtgtgtgcgttagctcagcacctgcccacactgcgagcccccgtaggatgtgccttgtccttccctgtttcagcacttaacacactacctggtacagagtatgtagtgggcatctgttgaatgaatgcttttcccagtagcagtgtattcatacaatattaatataattgtcccctggcttacagataaaatgaaagcatcaagtgcccagtgagtgagacccaggtgttcttcctccacccctagtggtcccctggggcaggtcnnnnnnnnnngtaacactcacaattctgttctgtagtcaatcattgattgacttgtctgtgaacttgcaggaactgtttcatagtttcattacacagagtaaactgtttgccatgcaaggttattttgcatctgcatttaagtgataatgttgaatca

SEQ ID NO: 16661 - DNA, 805 bp, Homo Sapiens
atatagtttcaggttttattttcataattatcttcctatagaagcaataatctgtatttccataacaacacatttaatattctactcatcagagttgggaaaaataggaataaagcagattccatacagaaataccgtactctgcatatgtacaaataaattcaatatattaaatctattttgtagctggacttcacttacaatgtaacagaacattgaatattagattctgagcatattcatgcaaacttccactttggtgaaagtgatgacagtggagttctggaagacaattttccttgtaaacaccaagttttgcactttggactatgctctcaagatagaaacttacgtgagtggaaaaagaaaatgtataaatgtgaaacaaatattccttaccacacagaataaccctgacaacaaacaatatccccaagtcctggttattcaatcctcaccgtgggcaggaagggtgaaggaggctgcacctggacacagccttttgtgtggtttaaagcatagctgcgctgctgctacagaatgcacttcatcatcaccttttttaaaaaaagttttcagtacataagaagagtaaaattaaaaaattttttcccccagactttaatgggtaatatgatctatctatacataaatagtctacagtatctttaaagtattgccaaatctgtttaaacagattactaattagctcaaatgagcattaatgtaagactccagaagtttccgattggatctaaaggatacaagctgcaatgatgggatctttgaaacaccggacgcgtgg

SEQ ID NO: 16662 - DNA, 1438 bp, Homo Sapiens
gcacgaggctcctgctggccccgcccccacctgtcagccttctgacaaccaccacatagttgcaggggtgatgcacacagctaaggctctcctaagctctttgtccactgccctttggaagctttttaattgatggcttgcctcttctgcctcggaaagtcaagccaaaggaccaacttcttttcacaccgttggattccattctaaaagctaattaagcctagaggcccaattagaaaagaattccttgggaagttggtaacaattccaagaatgtgtgagcaccagggaaagctatgccagcagttgaaacaccgagagcaacagcagacttttttatatgaaagtaacatgcaaataactgaagggtctcaggtcttgaaattagtgaagtcttttgtagcatgaaaggcttgagatgtatatccaggtgtgctttgtaaatgagaactccagagacgacatttaggatctgacaaaaagaaattttcagtgaaaatcaagcttcctggaaaggggatttggggggaagcactgatttcgctaaaacatttaaattctaaactacctggctttggaaaaagagccaaaaaccatatatgactctgagcctactttgtataatgcagatcagatgcctgctctatatatggctaaatggaagatgcctgcctcccgcaaattctccagcaggacgtttatttagctttttcaaaagagctgctaatagatcaaggaaagatattccttataaggaaaagaatgcagagaatttgaaaatagcccagtaagactgaaggcaaaagagggagaaaaaggttactacaattcttaagggaaaaaaataggataataattattgtaactatgtagtgctaacatgtctttattgaaaagtcttgttgaagggagcgctggaatggggtggggcagaaatgggaaagaagttatttaaagtcagctggtgtgggaagcagcaggggagggagcttcttgaatcttgttttggttatttttcccaccgggaaactgcccctaaatctggcatatatggcttttttgatagtgtattgatcacattcccttttaggacactttaggttgtctggagtttggagcccgtaggaatattgaagaagttagtgaagaaatgctatacagtcatttgttgattaatgaagggggataaggtctgagacatgtgtcgttaggtgatttattcattgtgcaaacaccatagagtgtatggtacttacacaaacctagagggtatagcctactaaacacctaggctacaaacttgtacagtgtgttactgtactgaatactgtcaacaattgtaacacaaatcaccaggcgataggaattttttagttctattgtaatcttatgaggctactctcatatatgcagcccctcattgaccaaaacatcatta

SEQ ID NO: 16663 - DNA, 1321 bp, Homo Sapiens
  misc_feature (111)..(146): n is a, c, g, or t
  misc_feature (320)..(362): n is a, c, g, or t
  misc_feature (467)..(561): n is a, c, g, or t
gcacgaggcccaggctttggctgaatttgaagaaaaaaatgaatgagaactggaagaaagaactggaaaaacacagggagaaattgttaagtggaagtgagagctcatccnnnnnnnnnnnnnnnnnnnnnnnnnnnnnnnnnnnntctggtaggtattcatcttcttcttcatcaagctctgattcttccagcagttcttctgattctgaagatgaggataagaaacaaggaaaacggagaaagaaaaagaagaaccgttcacataaatcttctgaaagctccatgtcagaaactgaatcagacagtaaggatagtttnnnnnnnnnnnnnnnnnnnnnnnnnnnnnnnnnnnnnnnnnnngatattaaaggactcagcaaaaagagaaagatgtattctgaagataaacctttatcatctgagtccttgtcagaatcagagtatattgaggaggtgcgagcaaannnnnnnnnnnnnnnnnnnnnnnnnnnnnnnnnnnnnnnnnnnnnnnnnnnnnnnnnnnnnnnnnnnnnnnnnnnnnnnnnnnnnnnnnnnnnnngctgctagttcaagtcctgactcaccataacattaagaaaaatcaggattcccttataaagaaagtgcaatgtctgaggaaatttcaactgtgaaaactacaacatatttactaaaatgcatgaattttcttgtttttggaattattcctggactattcagtagccactcagatgccactgtgtgaaagggccataaatgttgcctgctgcttgaacatctatttttttctcttccagtgcttgataactctgggagataatacactgcagtcgtactagtggttaagatatttgggaataaaattaatacttttgactagaagcgtctaaggataaaccaacagaaattgaatctggatacatctttaagatgtaatcagaaatgaccagatgactctagttagaatttttgaaggagggattacattaatatttcaaaacccttactctgtagataagtgtattttaattttttcccctcgtatacttttatttacctggggaaggagcttttagggttggggggtggtttgctatctctttagctagcagaatagtgtgcctttgatcctcacacatcctgtattatggacacagtagccatgcttcacggggaggtcagagctggctaccagcagtcttgccctttactgagcttagtgtcatctttggatgctgtatatgctgctttgagtgaaccaaaaaacagccatttgcagcatgagaaaccccaaaggctctgggatttacttcacttta

SEQ ID NO: 16664 - DNA, 923 bp, Homo Sapiens
gcacgaggcttttatttttaagaaaaattcataagcttcagaatataatttaaaatattttagagtgaaaaatgagcactgaaaattatacatggtcatgatttttaaataaatttttatccatgtttaaggataatgtgtcaggcacattgatctaaaatgtaattacgatggtaaatgttcaaatctagatcagtgtgtaatgtggtacattagtttgtaaaatgctttcacagcattaactcattgttaattcttataccgccaaatgagatatcatttctttcctatccatctgttttacaaatgaggagacaggctcagagaagtaacctacttatctaaggccacatagctagtaagtggtggaaccagaactggaactaaggccatttaactgcaaatactgacctcctgtcatttatcaagccattttcagacggcatgatattctcctgaggagcaaaggaatggaattagagctagcacaaggagaaattgtgcatagcttgctgcctacgtaacttatgcagaagatctgagcagtcttcctgtttttagggatattttgcacatgtgaactatatagtgagaaaatgtcaaaaactaatacatgatatactgtttgtctcttagtgtccatccttgagtaatagaattttgttttagatttatttgaacatttaccatcacaattaaattttaggtcaacaaccagccttgagaaatccaaataccaatttgactataaatatagtaatacgtttaactgcaataactatagctataagtgcgtaccaaaccatgttttttccaaatgaccttaatttcttggcactacccatgttggatacctcatttgcttccccaaagactgtgcccaaaatttctgttgtttctacatgattctgcctgcccacaaa

SEQ ID NO: 16665 - DNA, 147 bp, Homo Sapiens
ttgtgatctgttcctgccccactctaactgatcaattgactttgtgacaatacatcctccccacccttgcgataatgtattttgtgatattcaccgcccttgtgaatgtactttgtagggtataccctccctgcctttaagaaggtt

SEQ ID NO: 16666 - DNA, 826 bp, Homo Sapiens
aaaggggaaaaatctttaattgatttctcaggtaatttttttccaaattgtacataaagtgttcttatgttctctatttggatgtttcaggaaacatacaaatgaaatacagtacatagacaaatgaaatgctaataaaaagtaggatgatattaaaatatccttactttgcctgtatggaacaaaggcagtctactccatcggggaatcaaagcaaatgtgaataaaaggtttccaccttgcaaaactgtgagcttcatttgccctggagaaaactactaggcaaggcttcacatgacagtacctgtagggatgtccatggggctgtgaagcaggtgtattgtatcgaacatgcagctgcaatgaaggcgtggagctcaggaaaagcagccactgacaatgcccctcctggccgcagggtcttctgtgcagcctcccatggatcaatataccagttagttaaaacacacatcagtattttctgtcctttagcaacgatgatgatatttgccaccagcgagtgtgatctgtgaggcgattttaaaatgcagtcctgggattctactgtattgaaacacctttgattttctatttgaatacttccaagctttgtaattatgccaccatgtgctcgtgatcgtaagaaattaattttaaactaaatattcttcagtatcccttttcatatatattttcacctcatatacatagtttgggataaaatagtgtaagagtataggaaaatgcaacaaattaaagggtaggacaataaataaaacaccatttacccttgttcttcaaagttttaaggttcaaaaattattgg

SEQ ID NO: 16667 - DNA, 1306 bp, Homo Sapiens
gcacgaggtaacacaccagcaccccactcgactctatttgtttttaatttaactgtccctatttttgacataggagtaaataaatatactagaaaagcaaattctcatgatatgctaaaatatcattagcatttattttaaattggacccagtctctgcagagttaccaggaatctttccttccagcatccctttactgaccacctacctgtacctcttggttacactcattttttccatttgataattggaaccaacttataactgtttaataattgacactttagattatctcttaataccttcttaaatgtctatatatcccagtgctctggatcagtgtctaaaaatcactggcaacactgcatgaggttgttggttttgttttgttttattaattagtctttcacaggaggaataattgccctcctttatatacttatctattgataatcccctctccctccagaacacaaatcagagggaaagggggtgttcagctgtactaccaaatcaggaagatgtaaggtttacaaattggctaagaatcatggctctgtagccatttcaaccagaataattttattgctaatctgctttgtgtgacagcattccaggccagccagatgggactgccttgtctggaggctttgttcatctcgaaggacacacacttccacactgtttgtgagccctcccacctccacaacttcagttgtaaatcaagtgtgtggatctcaaagggtgcaatttatctttatataggaatacatttctagggcttccttcaagcccactctcttcaccctattttttcttatcttaaattgagagaaagagaattaatcttatactttgtcaaaacattttctaccatatttccagatgacatctgcgcttgaagagtcaaaggaatctgtgtctaatatcctgtttttaactgccaacacccctttcattggcatgacggaatgaaaggatgcatgtctccacttcctgaccctccgcccacttccttctccctccaccacccccagtcgtcagctccttccctcatttatttttgttaagttgtgtgaattatttttaacccatttatcctgtttgtgcatagggtttttaagaaaaacagcacagtgcaacgagcaaatctttttggggtgtgtgggaagcaagggagggaggacatggagaaaagttctttaaacaatagcaactattgaacatgtgtaaaatcctgtatcatttatgaaatatgtataaaagcaatgtaccttctggacaataaatacttattcaattttta

SEQ ID NO: 16668 - DNA, 335 bp, Homo Sapiens
  misc_feature (178)..(193): n is a, c, g, or t
  misc_feature (217)..(271): n is a, c, g, or t
caacaaaatggtcatccaaactcaaacttgagaaaatatcttgctttcaaattggcactgattctgcctgctttatttttagcgctatcacaggacccagagcctatgcccttttaaacttaccacaaaagcagaagattaattcaatttaagatgatactctcatttgttacgtccnnnnnnnnnnnnnnnnggaaatggagtcttgctttgtcannnnnnnnnnnnnnnnnnnnnnnnnnnnnnnnnnnnnnnnnnnnnnnnnnnnnnngttcaagtaattctcccacctcaagcctccctagtagctgggattacagggacgcaccaccatg

SEQ ID NO: 16669 - DNA, 1576 bp, Homo Sapiens
gcacgaggcccctgtcttcaaactgtttggtgtaacagaatattgatatgcagcttggtggatttcaccagttaatgcacattcttcttccctcctccccccattaatatgtatactgaaaaatgtgcatttgtctgaggaattattttgtttgctaccacttaatgaatctcaaaattttgagtaaatgtacctcagtctaatcagactttttatgacctttataactacatttaaaacccttaattcctatttctgggtgtttgcgagcctgattgctatcatgaagtaaaaatttattactctaggtattcactagctaaataaacatagttcttgtttagcaagcatatgttgttcctcagctcttttctccagcttttgcagtgtcctggcatccttaaaatactttgaaaatatggccttgatccatggattaaatcagtatctaagtgaatgtgttgatgttttattgatcagatctatataagtgggaatacagcatatatctggatattcttatagttatctttttaacatcttatttttttcattaattacatatcaacattaattttgtatcttgaagcaaattgattttgtataattaaatgtgtcaagcatctgtattaattgatttgatggcataaggttatgaaaataatgtactgccccatgtattactgttccaaaaggagaaagctatgtagaaagatacattaagggtgaaaatagcaatacagtagatttgaataccttgatgttttgcattacttcatttatgtttacatcatgtttagaaatgttttcatttactgtggtctttggtcacttcagctcaaagacctagtgatggatatttctttgaggctttcatttatataattttattttgtacaatgttttttttaaatgtgcaaatactgtattcaagtgaaaaaaatacagtatttgtagataaccatagctactacacagttcttcggtagtcccagtgtagttatatcagtgtttactgaagggaacatcaaaatattaatggtatattataaaataaagactttcttaaaggaaaattgcacctattttacctttttaagagtaagccatgaaatcttgtaacatgtctcttaactatttataatgaaaagtggcatttgggtatagtcaccacagcaatgttctacatccctaagattatctaggtaggacatgtcaaagatgactgttgtcattctggaggtcctattagagaatattataaaagggtgaccttgtaggaaggatctgagtcctccccctgaggttctctttttcttggtgctttattagcaactctggatatttttataaaactagttacattataaacggtttcaaacatgtttaatttacattaggtttttatgtaagagtgtcatggaaagcactcagcaagcaggctgattgcaatagactcagacctgcgaataaatgtaattgaaagtctattctggtgaggagtacttccccgtgccttttacctggattctattctaaggaaatgggtgcagcatcctttggaaaaaaatctttt

SEQ ID NO: 16670 - DNA, 719 bp, Homo Sapiens
  misc_feature (113)..(124): n is a, c, g, or t
ctgtattctcgaagcaattctgccacttgatcgtattcacaggggccctggtaggctcctttagaaggaccatttctgttcctagagcttaactagaattcattcttcactgnnnnnnnnnnnngttacttaagaaagcatttctttcctaatctcactcaaatctgcagaattatttgtaattagtaatacaaaatctggccaaaaggagacttgtaaatagcgtaaagtggtgtcttatgctaaacggtggaatgtataggcagagaagctctttgaagttgtcagatgagctgggctcacaagcctgattcaaacaggctgtcggtctcctctcaccccttaatactgtgcagcccaaactcctaggactcttgaacatctgagcagttttgtgctttgagccactttttgacaaaaatggctccatttttccacagcgtggttttcttaaaatagtttaatgttttatagtctcatagtagtagtgttgctttctaagctataacagtcgactttattcttctactctgaaaaatcttgacttgtttgagtgtatataatatatataaagggagccttaatggattggttttcataatttaatattttttgtatttgctcttgtataattgtttttaacggaaagtattaaagaattgagggtggaattcttagaaccaaagttattcttaataaaaatcaccacatgcttggaa

SEQ ID NO: 16671 - DNA, 716 bp, Homo Sapiens
  misc_feature (65)..(109): n is a, c, g, or t
tagacttggactcaaacaatcctcccatctcgcctcctcctataaagcactgggagtacaggcannnnnnnnnnnnnnnnnnnnnnnnnnnnnnnnnnnnnnnnnnnnnagatattacatattttgaatactaatgatctgttatgtatgttccaattatcttttttagtctggtttgtcttcatattttggttatgaaatcttgaatttttaaaaacgtaattttaccaatctttcataatgatttgctttttctggtttttgtataggaaatgtcataaaaatagtcctattcagccttccaaaagttacaaaatttttgtttttaacatttagatgtttagtccaactgaaatttgttttcttttatggcatgattttggaatcttgttttaattatttttacatatttatagctgttcctccaagtatcaatttttcaagtgcaacatctgtcatgcagttactatgtaagggccagattctgacctttctgttctttttatctgaaggaaatttgaacatgccacccccaaatatgccgatttggcatactgattattttgagctaaaggtgcttgactaacagtagtttgcagaaatggctattttaactgtccctttcctacctgtagcaagccatacaaactttctttgataaagatgcctttcctgataccaagatgaaaaaaaggcctctaatcatctgaaacagc

SEQ ID NO: 16672 - DNA, 1164 bp, Homo Sapiens
gcacgaggcttccttgtctcaaccgccatgaaaattctgaacactccaaattcagttgaataatccaaaacaaaatttataagtataaaataattttacttcttatagtaatagtatactttaaaaagcctcagggtatattatcttctaaacagctacaattcagtgcagctacattaaccaactatgttctctagttgagaacaactaggcctatttcactgctgtgtagcctcagtgcctaacatgggtgccaaataaatattcgtagaattacactgaattgtaaaaaccattcgtttttgtttacaattgccaaaaatctcaaaaggccctgtatttatgtaattctttgaaattattattttattttgatttctcagttattgactggctgggtgtgacttagtacataagtactcaatattataaaaacctcaaataattgacttgattttacacaacatccttcccttttctacaagttaatttttttacaaatcatttgggttatctcctaaataggttatattttattgcttctagaaacaatgtttcaaaatatatgtgcattatcagtaataatttgtataaatatttcccacaacaattttcataattttcaaagactaatttcttgactgaagatattttgctagggaagtgaaactttaaaattttgtagattttaaaaaatattgttgaatggtgtcatgcaaaggatttatatagtgtgctcccactaactgtacagatcaggacacatatttttagacatctaagtctgtagcttaaatggaggttactcttccatcatctagaattgtttacttagtaattgttgtttcttttattattatagacttactatcagttttattttgccaagtatgcaacaggtatatcactagtatatgaaaatgtaaatatcacttgtgtactcaaacaaaagttggtcttaagcttccaccttgagcagccttggaaacctaacctgcctcttttagcataatcacattttctaaatgattttctttgttcctgaaaaagtgatttgtattagttttacatttgttttttggaagattatatttgtatatgtatcatcataaaatatttaaataaaaagtatctttagagtgaaaaaaaacctgcagcccgggg

SEQ ID NO: 16673 - DNA, 1255 bp, Homo Sapiens
  misc_feature (452)..(613): n is a, c, g, or t
cccgggctgcaggaattcggcacgagggcagaagcgagatgacgaagggaacgtcatcgtttggaaagcgtcgcaataagacgcacacgttgtgccgccgctgtggctctaaggcctaccaccttcagaagtcgacctgtggcaaatgtggctaccctgccaagcgcaagagaaagtataactggagtgccaaggctaaaagacgaaataccaccggaactggtcgaatgaggcacctaaaaattgtataccgcagattcaggcatggattccgtgaaggaacaacacctaaacccaagagggcagctgttgcagcatccagttcatcttaagaatgtcaacgattagtcatgcaataaatgttctggttttaaaaaatacatatctggttttggagtttggatcataatacaagagaagcacagggcaaagacactgcataacctcaagannnnnnnnnnnnnnnnnnnnnnnnnnnnnnnnnnnnnnnnnnnnnnnnnnnnnnnnnnnnnnnnnnnnnnnnnnnnnnnnnnnnnnnnnnnnnnnnnnnnnnnnnnnnnnnnnnnnnnnnnnnnnnnnnnnnnnnnnnnnnnnnnnnnnnnnnnnnnnnnnnggataaaggaaggacttaagcaaaatcttccttgtaagtagaaggatgttttgacaagaaaagttgcaatggaaaaatggttctcatgtacacgagtatgtagaataagcatcgtgtgtggattggattcagatcaaaacattgcttttatgtttgtgtctttatacggtgggagtataccctggtgccccaggatgaagacttgacctgacccatgtatttttagattactcacagataacaaaaagtattttcatcatgattagttgcgaaaacagttttatttcaataggtaaaacgtgcagtctctatgtaatcgtcagaaggtaatcttaattatagcttgggtgtgctttaaactgcaagctggcagtggagggcacgattcctctgatttcagctttctccttatacttttctggagctgtgagctgcaagttaactcagtgggattaaagtgtagactggaggtacaaaaggtgaggagtgaggagatagggtagttcttccttggctggctggcttcatgatccctgggccccgcagataattaaatcgactttttctgtctcaggcatttgtatgacctctttggaggttccctgctgggtagttatccttgtatctgatggacccatctca

SEQ ID NO: 16674 - DNA, 857 bp, Homo Sapiens
  misc_feature (708)..(719): n is a, c, g, or t
gcacgaggaaagaagagaggagagagaagaaattctttttctgaaaatgagaagcatacacaccgaattaaagacagtgaaaatttcagaagaaaagatagatcaaagtcaaaggaaatgaatagaaagcactcaggctcaagaagtgatgaagatagatatcaaaatggtgccgagagacgatgggaaaaatctagcagatactctgaacaatccagagaatcaaagaaaaatcaggaccggcgaagagaaaagtctccagcaaaacaaaaataattctacaaaatgacataaactggacatgccttatattcagttgaaacaaattattttttactttgacgaactttatagagaattcttgtataaagtattggtttgtatttgtaaatttaaaaaatgttttcattttaacatgttttataattgatacatctcaaggccctacccataaaattatttgaaaactttcaccagaaagggatgtaagtctcgcttatattttgtgaataaaatgatcaaaagctcattgattcagtgatgttttttcaattgacaaaatatttttttagttgtttaagaagctgttatagtgaattatcagtgcttttttgtttgtaactgaagaccaaaacaggtgaaactttttcagtttaacagttttgctttgttaatgagatgtttatgaatctttttcaggtagtcacnnnnnnnnnnnncagtagaggattttgttacatttttcatattaggcttggaacaaagtatgtaatgtgtaatttttttcacaagtgttggtaagctaggtgtatgttagtctttaaaccatacccattatttataattaaacttctccc

SEQ ID NO: 16675 - DNA, 910 bp, Homo Sapiens
gcacgaggcacgaaataaaaatatattcttaggctatcatctctaaaccattataaacacagagattgagagtaataatgagtaaatctatacaaatctatacacacagtgttggagcaacaatttttacaaaaacaaatattccaaacaaatcataaaattaagcttttggtaaaaagttacagctaatagactaaactaaaaacatattacagtaaatggtgtgaaagtgattttatgaactaatagacctaacattttaaatggagttcaaattgagttcatcttaaattttatgagtcattaaatcatgtggcattttatatcttcagatactagcttgaactctgaaaattagagtttaaaaacctgaaaacttgggaaataatgtgaatgtgtcatttgagggggaaataactttttttattcttgtagatattagaagagatttgtcagaaaaataactggggacagccagtgtaccagctgcactctgctattggacaagaccaaagacagctattcttgtacaaaataactattcctgctctagccagccagaatcctgcaatccaccctttcacacctccaaagctgagtgcctttgtggatgaagcaaagacgtatgcagccgaatacaccctgcagaccctgggcatccccactgatggaggcgatggcaccatggctactgctgctgctgctgctactgctttcccggatatgctgtccctaatgcaactgcacccgtgtctgcagcccagctcagcaagcggtaaccttggacaagacttagcagcatatacaacctatgaggtctaccattttgcagtgactgcccgaggggatggatatggcaccttctgaagatgctttttaaatttaagaataaaaccaccaaaactctatt

SEQ ID NO: 16676 - DNA, 669 bp, Homo Sapiens
  misc_feature (68)..(77): n is a, c, g, or t
  misc_feature (276)..(286): n is a, c, g, or t
gcacgaggttttaaataaaataattttatttcataaaaagaaataaactagaaagaacaatgcccttnnnnnnnnnntgtttgcttcactaaaaccatgttgtgaaggaaattcatcaaaggctgttaccttattcaacacgcgtagaaattgggttctgatttaaatagagccaaccagtcattttctgagactaaactctggcaaactgcttcttcatgtagggaattgataatttagaaactagtttgcattttcagtatgtctccaaaggannnnnnnnnnnaagtaaactatccgcctaaattgttaagcccttttggggcagcaaaaacagcccttattacccatcaacaaccagtttgaacggtaattcagtgttctttgggaaaatgtgtttttacaaaggagcagtaattaggcccccactgcttaacagatgaaccaaaacaaaaaaggaacgaaaatgtaacctattggtccaatgaattccctgaatttaaatgcaagacaacttatgaggccacttgaagaccaacctttacccatgacatctggtaacttttcttctttgagatggggtcacccaggctggaatacagtggggcagtcagctcactgcagcctcgactgcctgatatcaaggcagcctcccaaatagctgggact

SEQ ID NO: 16677 - DNA, 1202 bp, Homo Sapiens
gcacgaggctacttcagtctgagttactcgggagggaaaagtgcagctcctctgatcatctgccccatgagtgggatagatgggttttctggccatgttgggaatcatggtcattccatggagacctccccttgaggaggtgaattcaggccaaaagggctgttggctgtaatcctacgccaggcacaaggcatcttgttgccttgccacgtcctgtcacagctgggtatccttaccatgttccacgcccttgcagtgggagacaggatgtccatgttctctaccatccttttccttcccatgcagattgtgaaatgtaatgagatgtatcaagatatcctagaaataaaaaccagatgtccacctccagtgtttcatactttctggttttacacatcgctggagggataaagagtatggataatctttggatttggagagccgttcaagatacttccagcttcttggctcagcctggcttcctctggttcagccccacataatgattatggctatttgctgtcatttctgggctagggctcctttctaacaacctagactggaataaggccctgtcagcatggctccctttatcccagttttccgtctgggaacagtacctctgcccctgattcccaatgtgccatagttttattaactccattaaagaagcctgtatgtgttttggttagttacagttattttacaataatggtgggtaatggccccacctctgttatgagataatgttctaatcaatgtctctgcctttgtatcttttctgagggctttgtctgttctcttcattctaatgaaaggtgtattctagtgctgggtgcatatcatccaggataatattctgcccaactccatcctctgttactagatcccttaccagtcacatttgtggactggtggccagtcgtataccatccctggaaggattctgggacaatattccagggattcattgacttcttggctccttttctccatttcctttgggggaagggggaattgaccatgcttaagtgcatcctatcaaggggcagctccgtccccatggccattggatcatgagacactctgaagtcagaaggctggggcagatcacttctagcaagccccccatgatgggtctcagtcctgcttctctgtgggtacgtgcccctctgtttaaaataaactgaatatggatgttt

SEQ ID NO: 16678 - DNA, 581 bp, Homo Sapiens
  misc_feature (342)..(400): n is a, c, g, or t
ataaataaaatactaataagtattgtaaatattgaagggataagtttcctaatccttcttagagcatctctggaaactagtatactgataagtatatttaggtaaattccagatagcattatagaagggattatgaaaatgttctgagtgctgaaattgaaaggaatatgctgtgaattgtttaaatgtattggtgtatttctttgtactaattcttaaaaatatataggaagaatatacacttttttgacacagaaatttctttcccaggaattcattttaaggaaataatcataaatatgtccacagatttctctacaatgatgtatgtcccaccatttnnnnnnnnnnnnnnnnnnnnnnnnnnnnnnnnnnnnnnnnnnnnnnnnnnnnnnnnnnnaattcaaaactttttgagtaccattgtgacacatgtcacctgacttcatgtgggcaagtcacagtcaaaacacagtcacaactttatttcatataaaatatatactgtataaattaccttcaggctgtgtttataaggttatatgagacataaatgaattttgtgtatagatttgggtccc

SEQ ID NO: 16679 - DNA, 1068 bp, Homo Sapiens
  misc_feature (346)..(387): n is a, c, g, or t
  misc_feature (396)..(396): n is a, c, g, or t
atcccccgggctgcaggaattcggcacgaggggactgtgcccagctgacctttcccttccttgccctcatcttgctgccagggtctgcaggtttgccaccgtcccggccccagtctgaaacatgggattatttcagaattggaggtggcagcttcagaaaaaaatccttctcgtgtgttgactgctgagatccaggaactgggaaatcaacccccagtttgtagattgctctctttggaaattctgtggcccaacctcgtggctgttttctggaattccttctatcggggcagacagtgctgtgcctttcttgacttcaggatgttccaaggatgctgctggatcnnnnnnnnnnnnnnnnnnnnnnnnnnnnnnnnnnnnnnnnnncgcgtgtantgtgcgcctgaccctgatttctgcaacctccagatttctttcttgacccttcaaagtggaacagtccagtgccaaaaattttagagtttgagaaggtcacagaaatcctctagttggtgcctccacagtcttcattttacagaggaactcagggctaatggagttaatgcaactagaacagggttttgggtctgtgttctttctaccgtcagcacctgtgtggtcaattctggacacttcccagagaagtctttgagtagagaatcctactcaaatttcgatcttttaagcattcctctcctttccctttgcctcccctgttgccttttcttcccctgatttctcctctggtcatctcctctcccttctgcgtgtaagccatgggaaagggatgagggaggacagcttctggttaaacacaggtccctcttccacatcaaatgaacattggcttcctgggacagaaggccttcaaaggagggattgcaaagcaaggcaaagcgttctgtcttcattttccccatccccatgagacaagactgatggagagggtggtggggcaacactgcttaatggatgccttttcacatcatttcagtttttagccctcatgactgtattttctaatcagagacaataacattttaaataaaacaacgacaaagaaaaaaa

SEQ ID NO: 16680 - DNA, 1279 bp, Homo Sapiens
ccggatgtctaggccaatgataattatttttgatgcagtgtggattagttcttttgttaaccccactgtcttggggaatgatgccagctgggaaattgagtttttgactgaaacatggagccttcactgctttttttctggttcctatgaagatttggaacatagaaaacacaaaaactcaccttaaaatttgagcaggtcgttgatggcaaaaataattttaaggaaaaaggaatattcttatgtagttattctaaagtttaaggagcgttgttgaccataatattgcttagttttcttactgctgttaagtaagtaaattgtttcaaagtaggttttgtgtgtgtgtgcctagtgtaaaagaactgaaattttgatgcttacagcacttggctcgtgcatttgtatcaaaatttgcctgcctctttatgagggaggcctgcttttcacacctcagtttatttaatacgaggcaagttgtaagacaacactcattctaggtgattctgtggtgccatgaaatttaaggtaatttggggaaaaggattagtcagttttaagcaagagtcacatcttttgagctttcgattatcagtgtagtacctgactaaaaatgaagtaatacccttaaaccatttataatttctagtatttctctgaaagatcgttttggggacaaaagtgacttgacatgtccaatttcatttcagaataaaaagctagcatctttaaaaatctcagattgcttgcttacagatacaagtaagaattatggacaaacgattccttttagaggattacttttttcaatttcggttttagtaatctaggctttgcctgtaaagaatacaacgatggattttaaatactgtttgtggaatgtgtttaaaggattgattctagaacctttgtatatttgatagtatttctaactttcatttctttactgtttgcagttaatgttcatgttctgctatgcaatcgtttatatgcacgtttctttaatttttttagattttcctggatgtatagtttaaacaacaaaaagtctatttaaactgtagcagtagtttacagttctagcaagaggaaagttgtggggttaaactttgtattttctttcttatagaggcttctaaaaaggtatttttatatgttctttttaacaaatattgtgtacaacctttaaaacatcaatgtttgggatcaaaacaagacccagcttattttctgcttgctgtaaattaagcaaacatgctataataaaacaaaatgaagg

SEQ ID NO: 16681 - DNA, 1653 bp, Homo Sapiens
  misc_feature (1157)..(1179): n is a, c, g, or t
  misc_feature (1225)..(1237): n is a, c, g, or t
  misc_feature (1367)..(1430): n is a, c, g, or t
gcacgaggcacacttctcactgctcacaatgagaggccaaagattacccttggacatccagattttctattgtgccagacctgacgaagagccttttgtgaagatcatcactgttgaagaggcaaagcgcaggaagagcacatgcagctactatgaagacgaggacgaagaggtgctgcctgtcctacggccccacagcgcgctcctggagaatatgcacatcgagcagctggcccgacgccttcctgcaagggtgcaagggtatccatggagactggcctatagcacgttagagcacgggaccagcttaaagacgctctaccggaaatcggcatcactagacagtcctgtcctattggtcatcaaagatatggataatcagatttttggagcatatgcaactcatcctttcaagttcagtgaccactattatggcacaggcgaaacttttctctacacattcagccctcattttaaggtctttaagtggagtggagaaaattcatactttatcaatggagacataagttctttagaacttggtggtggagggggacgatttggtttatggctagatgctgatttataccacggacgaagcaactcttgcagcactttcaataatgatattctttccaaaaaggaagacttcatagttcaggatctggaggtgtgggcatttgattgaaattcagactgccttaaaatataacattaaaaagactgggttcgatcagccctcctaaagctggctggaaaaagaagccccagcccagcctgcctcatcccaccccaatgcttcctttctgccatcatctcagagcatgatcacattgcagaaagattctggaaggtccatgtagagggcagacattgaagaaagaaacttaaaatccaggttgttgaaaagactttgtactcccacttcctccaaatccatacagtgaggaatcagagtgtttatagatatatgagttgaatgcaatttttatttttggtaactgtgaaaaataagatactgtggatatatacatgccttgtgtatttatcagcataattttcattaccaaaatgtacagctattatttgccatggaaaaggttagtctcatttagaaaaatcgaaagtgcacagcacttaaagggaatatatgaggnnnnnnnnnnnnnnnnnnnnnnncttttatttattatttgtagtatattgtctgaaatgtgtcggcagnnnnnnnnnnnnnaatgtgtcaaatcttgaaatattaaatgtatacattttgtgctatgttttgggaacaaatctgtttgatttatatagttttatattgaattttttttgccctgattgtttagggtgaagcatatatctannnnnnnnnnnnnnnnnnnnnnnnnnnnnnnnnnnnnnnnnnnnnnnnnnnnnnnnnnnnnnnntatgagtgtataattctaaatttctaaaaactcattatgaatgttcatcaatttgactattataggccagctttccatttagtcaataaaagcgtacatttttagttacttaccttgaacatattcgtgtgaaaaagaatacatcatttctcacagtcttaagttgatatttatagaaatgaatacctttgtgaacctagacttagaacaaatcctgcttttg

SEQ ID NO: 16682 - DNA, 600 bp, Homo Sapiens
ttggaagctcataacctcatcagaaactgcctttagccacactcctgaccttctagatgagtaacaaaaaaatgaaataagttcttggaaattaagccatttattttaatttgctatttttttcaatgttctaggtatctttaaatttgttattgtggaatcattttcctgccagatacctttatcaaaattattggcctcatgagagctgaagtaagtcagctttttggtgaactttagtggacttctgtgagattgtagttgtactttgtatctctaaatctaaagatagttttttaaaactcccaaagaaaatctgctctcctttctgatctaaaaactcatctttggggtaaagagttaagtgtccaaaggttgtcacagttcatgaggtcagagggctagcctggcacctggactctgcccatccacagctgacagattccaacagaagtgtatttaaattctccagtagacaatgctgggtaagggagggggtagggctgggttattaagatacaggctgctgtattttacattggttgtgggggaaggggagcctggagaaaacaaagtcactattcccttttttgaaacagg

SEQ ID NO: 16683 - DNA, 939 bp, Homo Sapiens
gcacgaggaaacaacagaagtggaggtggagaggggatgctttggtttttcttgattatgactttgggcagaagtaaaaataaaaactacacatttccattcttaggaattgggaattaccaagaataaatgggaatgcacccagctggtacctgtctaggaagaaggactttgggatgaagaggttgttgacagcaggcctctggacattgttaagggactgaaacatagaatattggctccaaggaagagactgtccagacctaactgatcaaagaagaaattatagacagtgcttttaataatttgtctttttaaccccaggttctctgtcatttttttattcttcggtgctgtgatcatcacatcagttctgttgcttttcccgcgagctggtgaattcccagccccagaagtggaagttaagattgtggatgactttttcattggccgctatgtcctgctggctttccttagtgccatcttccttggaggcctcttcttggttttaatccattatgttctggagccgatctatgccaaaccactgcactcctactgaccactcttcaggaatacgaaaacctgttctctccttcattgtgatgacattgatgagcaggaaggcactattcagagccttgttttgacagccctcatgccttaaggttagaggagtatctgtccatcactaagacaaatctctggagtcctggcttccagaaacaggattgccaaattgtccctgtggggctagattcttaccagcttaagaaggatattgctatcttcttagtacccgtaccttagatttccaactgttttgaaagggaaatagtaacagtgatctgcttagagtggattttcactcagtccttagtaagtggattttggggaaaaagcacctgggcttctggtccttttgataatatataaaat

SEQ ID NO: 16684 - DNA, 553 bp, Homo Sapiens
  misc_feature (175)..(274): n is a, c, g, or t
tggaaactgccttgtttctatggttacagtacctgtgtttagccccattcttagccttgttgatcatgagtgctgggataggggatgaattgaggggctgtgggaggctgtccctcttccttcacccctccccatttcttttcttttttgagatggaatctcactctgtcgcccnnnnnnnnnnnnnnnnnnnnnnnnnnnnnnnnnnnnnnnnnnnnnnnnnnnnnnnnnnnnnnnnnnnnnnnnnnnnnnnnnnnnnnnnnnnnnnnnnnnngcagggacagttggtcagcgtcagttctagggtggtcgcgagtttggagaaggggctgaacatatagcacctccatctgctgcctggaaactgccttgtttctatggttacagtacctgtgtttagccccattcttagccttgttgatcatgagtgctgggataggggatgaattgaggggctgtgggaggctgtccctcttccttcacccctccccatttcttttcttttttgagatggaatctcactccatcctgggcaagagtgagaccttggctc

SEQ ID NO: 16685 - DNA, 1314 bp, Homo Sapiens
  misc_feature (445)..(728): n is a, c, g, or t
gcacgaggaccgccagcaccactgctcctgccacgcgtctcaggcagccacgagggcggccacttccaggacaccgggcagtgtggggggtccatagaccacaggagcagctctctgaagggggactccccgttggtgaagggcagccttggccatgtggaaagcgggcttgaggacgtgttgggaaacacagaccggggcagtctgtgcagtgctgagacgaaatttgagtccaacgtgtgtgtgtgcgacttctccatcgagctctcgcaggccatgctggagagaagcgcccagtcccacagcttgctggagcacggggcgaggaccgacatctgctttccgccgcagctgagcaccctgacaccactccacatcgctgccgcccttcctggggaggagggggtacagattgtggagctgctgttgcatgccatcaccgatnnnnnnnnnnnnnnnnnnnnnnnnnnnnnnnnnnnnnnnnnnnnnnnnnnnnnnnnnnnnnnnnnnnnnnnnnnnnnnnnnnnnnnnnnnnnnnnnnnnnnnnnnnnnnnnnnnnnnnnnnnnnnnnnnnnnnnnnnnnnnnnnnnnnnnnnnnnnnnnnnnnnnnnnnnnnnnnnnnnnnnnnnnnnnnnnnnnnnnnnnnnnnnnnnnnnnnnnnnnnnnnnnnnnnnnnnnnnnnnnnnnnnnnnnnnnnnnnnnnnnnnnnnnnnnnnnnnnnnnnnnnnaaaccctgggaaaagtgaagtatggctgtaagtctcatggttcagtcctagcaagaagcgagaattctgagatcctccagaaagtcgagcagcacccacctccaacctcgggccagtgtcttcaggctttactggggacctgcgagctggcctaatgtggtggcctgcaagccaggccatccctgggcgccacagacgagctccgagccaggtcaggcttcggaggccacaagctcagcctcaggcccaggcactgattgtggcagaggggccactacccaaggtctagctaggcccaagacctagttacccagacagtgagaagcccctggaaggcagaaaagttgggagcatggcagacagggaagggaaacattttcagggaaaagacatgtatcacatgtcttcagaagcaagtcaggtttcatgtaaccgagtgtcctcttgcgtgtccaaaagtagcccagggctgtagcacaggcttcacagtgattttgtgttcagccgtgagtcacactacatgcccccgtgaagctgggcattggtgacgtccaggttgtccttgagtaataaaaacgtatgttgc

SEQ ID NO: 16686 - DNA, 1155 bp, Homo Sapiens
gcacgaggctccacgaaaaaagcaagcaaaatcccattttggagacaagaagcagcttgattccaaaggtgactgccagaaagcaactgattcagacctttcttctccacggcataaacaaagtccagggcaccaggattctgattcagatctgtcacctccacggaatagacctagacaccggagctctgattctgacctctctccaccaaggaggagacagaggaccaaatcttctgattctgacctgtccccgcctcgaaggagtcagcctcctggaaagaaggctgcacacatgtattctggggctaaaactgggttggtgttaactgacatacagcgagaacagcaggagctcaaggaacaggatcaagaaaccatggcatttgaagctgaatttcaatatgctgaaaccgtatttcgagataagtctggtcgtaagaggaatttgaaactcgaacgtttagagcaaaggaggaaagcagaaaaggactcagagagagatgagctgtatgcccagtggggaaaagggcttgcccagagccggcaacagcaacaaaatgtggaggatgcaatgaaagagatgcaaaagcctctggcccgctatattgatgacgaagatctggataggatgctaagagaacaggaaagagagggggaccctatggccaacttcatcaagaagaataaggccaaggagaacaagaataaaaaagtgagacctcgctacagtggtccagcacctcctcccaacagatttaatatctggcctggatatcgctgggacggagtggacagatccaatggatttgaacagaagcgctttgccaggcttgccagcaagaaggcagtggaggaacttgcctacaaatggagtgttgaggatatgtaactttcctgaggctgtgggggtggctgggctgtggtagtgggcataggcagcgagatatccagtggtaacagttgtctgtgctaataattggagcccacacagaccagcaacttgttgaatgccagttttgaccacagaagaatattcgagacctgatgtttggactgaggtacctgtacttcttgggtgtgacagcaccggctgttgctggctttcagaggaagcattgatttctcattgaccagggtttgttcttggtaggg

SEQ ID NO: 16687 - DNA, 774 bp, Homo Sapiens
gcaaatcagtttttaatggcactaaaacgaccatttggtctacagtgtgataaatgatagagatctaactacaaaatggaaaaatggcatcaaaacccatctgcagaatctttgccgaaagggagattctttctaggatttggaagaaataaatttatttcatcaaggtgcttaaacgttaacatcaaactaattgaagtgtttcagaatgctaaaacttattgaaatttttatggaatctctgctgccaatttctttgtcagaagggaccagaaaccctcactgaccccagataagatagatgtttattgctgcacattctcttcaaatgctttgtctcctcaaaaaggctgtgactgctgcagggcatggagtcctccttccatcacagctgcggctgcctcagatctagccagagaggcagagtagcacggcaggcatgcagtaagtccttgggtttcatttaaggcacggtgttccagtgactatcaaactcttgattgaaaatggagcccctgactatttctgcagaactttagccaaaagggtgaagtgtgcatggattaggaagctctctgcaaaggctgcttcactgagctttaatgagagaatttgaaggagctggctcatagcaaggggcccagtgaggccagaggtcctcatctgccaagggtccaacacctaaaaggcagaaaagtctcagggacacactcagggaccctccctgctgggcctgtagagtgcctcttgagtgaataaaagtaagacaccctt

SEQ ID NO: 16688 - DNA, 820 bp, Homo Sapiens
aatctgtgccatgtacatgtattatacagtatattcacaaaaagaggggggaaattccatttttaacaattaaatacataattattaagttttaaaaattctcctttgtgtaccactccaaaatcctctcctgcacatactatttttttggaaacacctagtcgtctcatcgttatcacaccggttgtaactatgtacctacgtgtctaccttccccatcagactcgggaacaaggagtcgggtttgagtcccactgtcccaagcacagaacgctggactcccagtagaccatatgttgcaaataaagaccttcgtccctttcaactcaggccgtccacgagcccaggagttccaacaaaatgatgtacagcaaccttttccaggcctttatgttgcctcaatatttctcacctgcaaaatgggaatgatccgtacctgcctcgctgtgctgtcggaaggagtcagacgatgggtgtgaaagtattgtaacactatagaaattaattcactcatccatttaacaggcaattattaagtgctagggtggtgcagcgcgattaccaccgcattacacgcgttcctccagcaggttgcatccttcccgtcccgcgtagggggggaagggcgtctccccaccaagtttttctcccagcgaactccgggtggtgaccttattcaaaatggcgcaggcggcctcgggggctagtgcggcggcgcggactccgcgtgccctctgacctgttggcagcaggcggagggggggaaccgggcgccgccatattggctgttgtcctgtgagggagcggtagcggcggcggc

SEQ ID NO: 16689 - DNA, 813 bp, Homo Sapiens
  misc_feature (477)..(656): n is a, c, g, or t
cccccgggctgcaggaattcggcacgaggtgtcttgttgatttgtgtatgttgaaccggcgttgcatcccaggatgaagccaacttgatcatggtacataagctttttgatgtgctgctggatttggtttgccggtattttgttaagaattttcgcattgatgttcatcagggatattggcctgaaattttctttttttgttgtgtctctgccaggttttggtgtcaggatgatgctggcttcatagaatgagttggggaggattccctctttttctattgtttggaatagtttcagaaggaatgttaccagctcctctttgtacctctggtagaattcggctgtgaatctctctggtcctggacttttattggttggtaggctattaattgctgcctcggtttcagaacttgttataggtctattcagggatttgacctctttctggtttagtcttgggagggtgtatgggtccannnnnnnnnnnnnnnnnnnnnnnnnnnnnnnnnnnnnnnnnnnnnnnnnnnnnnnnnnnnnnnnnnnnnnnnnnnnnnnnnnnnnnnnnnnnnnnnnnnnnnnnnnnnnnnnnnnnnnnnnnnnnnnnnnnnnnnnnnnnnnnnnnnnnnnnnnnnnnnnnnnnnnnnnnnnnnnnnnnntaaaataaggactggatgtgggtgatgaataaatgaggatttggtatactattttctctacttcttatgttcaaaatattttataataagttaaaatgaataataaaataaccaaaaaagatctcaaaaactactatattttgtacattcatattac

SEQ ID NO: 16690 - DNA, 948 bp, Homo Sapiens
ccgggctgcaggaattcggcacgaggcaaaggcatacccgtgtaaatctaggagttatttccagagattgttttaaggagcagtcttatattcagggtagaaagttatgattggatctgctgttaaggagaacaaaggagcttctaaaggtttgggaggtttactggtagtaactattctaggaaatatttatgttttaaggtgatgttcacatgggttctttagaaggaacatagtcaagtgtgatggattaactctatatagtctttctcctcttgtgcgtgtaggaaatctgacctgcagtgtcagttgatgtgacaagagataaagaaagcacagtattttaaaatctaaagcagattcctttcttagaaaacaataggaaaaaattatagatggatgtctttgctgaaatctaacaattagctcatattccatgagaaagagtggcctaagaattatttcatgttacctagccttctgaagctactcacttgatgtgcctagcactttgaaactaaccttttctttctttgttcatgacagtttaattccaaatatttactattttctcttgtaactgttagaacagttccttttgacattaatttttgcctacatatatatttttaagttgagaccaaatcggtgaagtgttgagcaagtaacatttatgatgtgtgtatattggaacaaatgtaaaagggttacaaagattagaaacagagtcataaaaaatggcttgatttataaaggcattacttttggtgctttatataatgggcatatattgaactaaaaatttgtatatacagtatgtcagcatttcttagtaacttctcttgaatccatttttaatatctaatattgtacaggttggggagttacattcttcaggccatactatcccgactataataaatttataaaataaattgaaaaatcatt

SEQ ID NO: 16691 - DNA, 868 bp, Homo Sapiens
gcacgaggtcccttttttttgtggctcttagtgttttaagccttacttctggcccctctcacctcttactctttgttctagtcatcatgacagagttgggatttcccaaacttgccccattgcagcctcagggtctataaatatgccaacccaaaattccagccctcagcctcctggcctcattaagactcagtttgagaatcacttcctctgagcagcctgtacctaaccccaccccagatctgccccagattatcgtgcacccatcactggaggagtctctcgtgtggtcgtcactgtccatttctttgtgtgatgtcctcactagactgtgagctccttgcaagcagggactgtgactaaaccatctctgtatccctgctgggggcactaactagctggtgaacccataagtacgtggacttgaacggcccagtggagggtctgtatgagaggtatccgcatagggcaatacacggtgtgagagaagaactgcagcttcagaagggctaggaggccaggttctcagcaggagtttccagagcacatagcctgtaaccaccaggaaacaggcagagatacagagcctcgaagctgagaaaagacagtgccttacttctccttgaagaggggccttgtgtggtgaaagtaacacatctgtgttctaatttgactccctcaccggctatgtgactttgggttagacggacctctaatatttgcatggctgatagcaaaagtgtatacagaggcccacataccatttatctaatattttaaagttaaaaactaacaaccattaaatacagtttttactctatcctatcctattctgttctcttacttcgatgaatataccttcctaatg

SEQ ID NO: 16692 - DNA, 1548 bp, Homo Sapiens
  misc_feature (1123)..(1131): n is a, c, g, or t
gcacgagggggagaagctgaggaggtcccgatcacacagcaagaatccaaaaagatccaggtccagagagcatcgcagacatcgatctcgctccatgtcacgtgaacgcaagaggagaactcgatccaaatctcgggagaaacgccatcgccacaggtcccgctccagcagccgtagccgcagccgtagccaccagagaagtcggcacagttctagagataggagcagagaacgatccaagaggaggtattgatgtgtcaatcagaggatatggagctaccttaatgttttagagttgtttatgtttacttatgttacttatgtttagagttcagattattggtttgaaacttttgcatctggtaatatgtacacatttatgtgtgggtgtacaacatttttctgtgattatatgggtagttttgaaagaatatacttatgagccagagcaagaaattggaaccaatatgtgtagaggttattgcttttctctgcttagtgtgtcttggaaaaaagttctttacaggtaaataattttaaataccaatacccttagtatggatcagcaaattaggggctctgagaagtcctttcattacaagagttgtttagctttgatttattgttttctaaacttatttgagctgggatgctttttcagagcagacacattctagtatattcttgttttatctgcactatagatatgtattgttacataccttcagcttggcaaggcagactaataaggaggttccaagacttcccttggtttaatgagaacattcaaaaggtgcaggcatagggtaaggtatgtttgaggacttgaatatctattaaggatagacaaaggattataatgtggtagaagagtttagcattcatagtctgtatagatcaaactgtcaaaacttctcaggtcacatgatggcccttaaaccaggtaatttctgtgtaacgtaagccatgtttaaaattgcttttttcttgacaactattcagaagtatatgtatgataaacattttttgagtgcctagtacctactagtcttacatattctgtggattactccacataaaatctataataaaatccacagaaagctgttaaaatctttcctannnnnnnnngactcaactttccattccctgaaatcactcacaagctgagtttgttaataggctctcaatattttatttcttatattctggccttgtttttagtatttcttaaggtgattttaataataattaattgtatatgttttactgtactagacttagtaaaacataagaaagacgtataacatagttgaacaactttaagttgctctaagaagtttcctatgtgaggctgggattacaggcgtgagccaccgtgcccggcccaaaggggaaactcttgtgggaggagcagaggggctcacatctcccctctgattcccccatgcacattgccttatctctccccatctagccaggaatctattgtgtttttcttctgccatttactatgatttgtgtatgtgccgctaccacaaccccccc

SEQ ID NO: 16693 - DNA, 974 bp, Homo Sapiens
  misc_feature (204)..(214): n is a, c, g, or t
  misc_feature (216)..(477): n is a, c, g, or t
  misc_feature (580)..(591): n is a, c, g, or t
acccacgcgtccgcaaagatctttttaggccttcattttatgttttttcttaactgttatattatgattgtgacatagattatactactactaatttttggatgtttcaaaaggtcaagaagtaaaagatgttagaaagcaatgagtgagtccttttgatttttaacttattccccatgtccctatacttcgtgtgcttttccnnnnnnnnnnngnnnnnnnnnnnnnnnnnnnnnnnnnnnnnnnnnnnnnnnnnnnnnnnnnnnnnnnnnnnnnnnnnnnnnnnnnnnnnnnnnnnnnnnnnnnnnnnnnnnnnnnnnnnnnnnnnnnnnnnnnnnnnnnnnnnnnnnnnnnnnnnnnnnnnnnnnnnnnnnnnnnnnnnnnnnnnnnnnnnnnnnnnnnnnnnnnnnnnnnnnnnnnnnnnnnnnnnnnnnnnnnnnnnnnnnnnnnnnnnnnnnnnnnnnnnnnnnnnnnnnntgagccactctgcccggcttatttttctttatgtttttgcttcgtaagaggttctgttgagcagtgatttgcaactcttgctgacgttgctggggaagctttnnnnnnnnnnnngatgccccacagagattctgattttaattgttctgatttaattggcttggagtagaattcaggcattgatatctttaaaaactccccagtgttgagaaacaaatttagagagttgagaagtaggtatattaaattacagaatcttactgagttttggtagactgataatacaatttgctttgcttttcttaaatttgcattgagatgggatttgaagcatattgtgctcttgtgaatgttgaagttgcattgtagaagtttagaagctctggctatgggttgcctaaattgatgttttgaggaagcatattaatgttataaacttcgctgactttgaaggttgtgttgtagcatgaggaacacaaataaaacaattctaaatc

SEQ ID NO: 16694 - DNA, 731 bp, Homo Sapiens
gcacgagggtgacctgaaagatcactgtgcagcagcaatcttgacttctggaacaattgccatttgggacttacttctcggtcagtgtactgccctcctcccacctgtctctgaccaacattggtcttttgtgaaatggtcgggtacagactctcatttgctggctggacaaaaagatggaaatatatttgtataccactattcataagttagggtaaagtgaaaacacaattttctggatatattgggcctcttagtattttttggagttttaaatataaaggagaatatctgaatgacacttaaaatgattgcttgtttatgtccagacagacttattttttattctaatgatggtagcaccactgatcttggatgtacatttatgtatactttgagaaaaagggttttaggttgatttttgtaatttcccacatttgtacatgtgcttttaaaggtgtacataaagcttcaaatggcaataaatatttatttttatacattctgcttggcatgttattgtttcccattctttcaagatcatttgcagaagcaagaactaattattatacaaccaggatatttaatcaatagtctttgcctagtaagtgtaaatttcagttcagttaacttactacactaatatgcaatatactttttgtgctatttgtaatactttatttttacatacatactaaaataaaatgaaacctactaaaatatcctaaaaa

SEQ ID NO: 16695 - DNA, 723 bp, Homo Sapiens
gggctgcaggaattcggcacgaggctgacccatgccccctttgtgatgaagccaaggaagtactcaagccttatgaaaacaggttcattttacaggaggtgaacatcacacttccagaaaactctgtctggtatgaaaggtataaatttgatattcctgtctttcacttgaatggccagtttctgatgatgcatcgagtaaacacctcaaaacttgaaaaacagctcctgaaacttgagcagcaaagtactggaggctgactgatgccctcatgattttccaccctctcttcccataaagcatcttcctaaggaaatgaccatggcctgatactcattttgtcacttgtacagagccctaaggatgttctgaattcagtggtgccaaataaatgttgacattccccttttggttgatggaagtatcagtgtgggaactgtttgcttaatggcattttataaaataagaagagcatattagcagggagggagatgatggagggagggagaagtccatttgtcttatttatcctttttgtattaatagagaagcacttcacagtcactgggcaatgccatttataggaagaaggttctgcattcctgctgctgccccggagggcttaacttttttaatgaaagaataaatgctcttccactcagtagataaagtgaaatgtgaattgttaataactgtgcacggtcataaagcgatgttttaagg

SEQ ID NO: 16696 - DNA, 910 bp, Homo Sapiens
gcacgaggttttgctaattgttttataaccacgacaaactagtacagagaatgccctgtacaaaacacaacaaaggttcaaacatcgagatgttcccttagcaaggctgaaaatttcagtctctggtatttggaatttaggctgcagtccttgtttttggatggatcactgggtgtgtggcacagtccatgcttttaaccagatttgaacagaagaatggccacttggcccaggtagaagtagatgaagtgtttggtttcatgtgtcacataactaccgaagttcctccccacgatgcaatgccaggtgggattgtacttcttgtcaaattcctggaaaagacaaaagaaaagaactaggattttaattaccagaggtcagtgtttgcctcttggataagccagagcctgtaggggcagaaaggaggaacgtcagcatctgcaaattcttagaatgaaagaatgttccccagctccaagccgcctacatagtacattaatacaaacatacttgcagtctgagcgaagatgggaatggaggctgaggaggtcaaaggacgaaaggtcagccctaaagacagggtgttttgttattatggtaattacaccttcataccttctataatattcattgacagacggtgacatcaacaggtgtagtttatcatgttctgtgtagagaactaaactaccctactgtatttgccatgcccccaattccaagaaaacggcaaaaaattagcccatcccattcctcatcacaaagatcttaactgcacccctgcaacacaagacttttccaataggacaaaacttcaacagcattgtataccaaatgatttgcggatcaaattaattttacaggaacacaatactgaagcactccactgttgctgtaaaactgctggaaa

SEQ ID NO: 16697 - DNA, 720 bp, Homo Sapiens
tttttttgataatttagaaatttattacaaaacttttaataaaaaatacaatgatattacaaatttggttttccaaagctttcaaatttttcttaacattatctttcgttttaagaacacttttgaagtcggcagttatttaaaatccttactagaaaaaaaccaaagcccaaggattttgcatttagtcatcatctaggtatacagcgtgttttccgaaagcatcctttaagagtttggagatttgatgaaattgctcatgtaataagcagttagtgaatactattgaatcctaaacccagataagtcatcttgggctggctgtgtttttcatgtgaagaaactcatttatagcacaggcaccccaggccaatagagatgattacagatctctggtttcagaagttctgaccccttattcagctaccaaatacttaattgctaaaggaattactcccagcaggcacaaaacggtttctgaatatgacagaaaaggtacacaaagaatcatttaagacatcctggttacaacatactttatctttaaaagggtgtgagagtagttggggaacttagaaattctgtgacttaggtgtgggtggatcttatttaggaagactaaagctatggacacaacacgtgaaagaaccactcagaagcagccctaggaagcccaggtgcccacatcgaaagcactcccaggtgaaagcagccaggcag

SEQ ID NO: 16698 - DNA, 880 bp, Homo Sapiens
gcacgaggccccaggttgctgatctctctccaatccctgtggtgctgtacagtgtcccagccaacacagggctggacctgcctgtggatgcagtggtcacgctttcccagcacccgaatattgtgggcatgaaggacagcggtggtgatgtgagtggcagcagctccggggctggggtcctctcctccttttctgggtcctagcacttttgctcctgagggcagctctgagatctgtttccaaccttggcttctgtgtggattctctctgtcgtgcgggctctctgggactttcttgagggcatctctttgagcactgggctttcattccaccacacttacccggccctcatccaggatgaggctctgggcacagctctcacaccacatttgctgttgcaggtgaccaggattgggctgattgttcacaagaccaggaagcaggattttcaggtgttggctggatcggctggctttctgatggccagctatgccttgggtaggccgcccactgctctcaaattgtcatgggtgaccaagagatacccaggtacctgggtcttccgggagagatcgtgagggctggggctgggtctgcagatggtagtttgccagcctgcccactctgaaaactcataaacctggccacgccgcttacctgtctgaattcgggatgctgtgagtaaccttgttggctgaaggaggatggccgtgtacaatccctggcctgtagtagggatgcctgcagtttgttctgagtcctgagctccttgattagatgacaaacttagctgctctaatcccaccttgtacatcattctctgagggcagaggcctggggccctcctctgtaattcaggagtccattttcctctcccctg

SEQ ID NO: 16699 - DNA, 987 bp, Homo Sapiens
  misc_feature (180)..(310): n is a, c, g, or t
gcacgaggtggggctctatttttgctttggctttctggtgagagagtgaggaagcattctttccttcactaagtttgtctttcttgtcttctggatagattgattttaagagactaagggaatttacaaactaaagattttagtcatctggtggaaaaggagactttaagattgtttagnnnnnnnnnnnnnnnnnnnnnnnnnnnnnnnnnnnnnnnnnnnnnnnnnnnnnnnnnnnnnnnnnnnnnnnnnnnnnnnnnnnnnnnnnnnnnnnnnnnnnnnnnnnnnnnnnnnnnnnnnnnnnnnnnnngtttagctctgtttttcataatagaaatagaaaaggtaaaattgcttttcttctgaaaagaacaagtattgttcatccaagaagggtttttgtgactgaatcagcagtgcctgccctagtcatagctgtgcttcaaaaacctcagcatgattagtgttggagcaaaacaaggaagcaaagcaaatactgtttttgaaattctatctgttgcttgaactattttgtaataattaaactttgatgttgagaaatcacaactttattgtacacttcattgcaacttgaaattcatggtcttaaagtgagatttgaatttctattgagcgcctttaaaaaagtaataccaaaccataaagttaaaatctatgtatattgagtcatatctaaaaccacgtataaacataaattgtatttcctgttttaattccaggggaagtactgtttgggaaagctattattaggtaaatgttttacaaattactgtttctcactttcagtcataccctaatgatcccagcaagataatgtcctgtcttctaagatgtgcatcaagcctggtacatactgaaaaccctataaggtcctggataatttttgtttgattattcattgaagaaacatttattttccaattgtgtgaagtttttgactgttaataaaagaatctgtcaaccatc

SEQ ID NO: 16700 - DNA, 932 bp, Homo Sapiens
gcacgagggggaagcccgcaagaggcctcagcggtggccgtccgagcgccgagaggtgagggtgcccccgcctcacctgcagaggggccgttccgggctcgaacccggcaccttccggaaaatggcggctgccaggcccagcctgggccgagtcctcccaggatcctctgtcctgttcctgtgtgacatgcaggagaagttccgccacaacatcgcctacttcccacagatcgtctcagtggctgcccgcatgctcaaggtggcccggctgcttgaggtgccagtcatgctgacggagcagtacccacaaggcctgggccccacggtgcccgagctggggactgagggccttcggccgctggccaagacctgcttcagcatggtgcctgccctgcagcaggagctggacagtcggccccagctgcgctctgtgctgctctgtggcattgaggcacaggcctgcatcttgaacacgaccctggacctcctagaccgggggctgcaggtccatgtggtggtggacgcctgctcctcacgcagccaggtggaccggctggtggctctggcccgcatgagacagagtggtgccttcctctccaccagcgaagggctcattctgcagcttgtgggcgatgccgtccacccccagttcaaggagatccagaaactcatcaaggagcccgccccagacagcggactgctgggcctcttccaaggccagaactccctcctccactgaactccaaccctgccttgagggaagaccaccctccctgtcacccggacctcagtggaagcccgtcccccccatccctggatcccaagagtggtgcgatcaccaggagtgccgcccccttgtggggggggcaaggtgctgccttcccattggaaagctgctcccggaaatgcaaatgaaactcctggaaactggg

SEQ ID NO: 16701 - DNA, 1367 bp, Homo Sapiens
ctggctcacaactttaattgattgctttccctccactgggcccaccgggtcggcttacatagctcatagctcagtgctgctgaaataaacccagggcaagaaaggtatgaacaaccagtgaatgccactggagcataaatgttcacaaaattgtaaagaaggggtgacaagaagcaagcagtggggcagggagtgtcactgatgtccgaaaccccgggtcaaaccaacacgcagcacagccactcggccagagagagctgaaccatgccatccttgtcttcgtccagaaggctgaatagtttgaaaagggtctccaggcggatcatacaagccacgaagctgtcaaagttgatgccaagcttgctgcacgcataccgcagggcaatggtctgctgcacctggctgttgagggtgaaacctgccttcctgagggctgtcctcatctcgtgggcatcgatggtgcccgagtggttataatcagtttcccaatagatctccaaatacttctgaatcttcagccagagcgtcttgaattccaccgcccccaaagtgcccgttccattgctatccaacagactgatcatttccctgcaagtgttgatgttgaatccatcgaattttatgtctgttctcttggaaaacgcctcattcaaaagtatcttgagtgcattggcagtaatctcagaatccttccctgccaacttctcaaacagcctcctgaactggtcatcttcctgatccacctcactgggatgtggctcatatgggtttccagctaccacatccccaatttctagggcctgggccttcttctctgagaacactctcaagcagaactcgccgtctttgaagggttcaaatgtggatggcaccaccaggtactccccagggggcagccgggcccggccagagacctcccgcaggttgacgtaggtgctggtgcgggctgagggctggtaggccaggaagaaatcccggcccaagtgtgcgtccgtgtgactctccagctccttgggaacctggtagacggcatagccgatgctaagcatgccttgtcctatccgcttccgccacctgcgatttttctgcatcaggcccagcagcactgtacagcagggttcaccgatgctctcctcctggtcctcatccacttcatccaaacggattttgaactggggattggtccagtacgtggctgggtagttctggcagcccccagctgtggagccccgggtccagtggccgttgaacaggaccaggttccatttgtgcacctcctcgctactcagagagtccggggacaggttgcagatctccaaccgagagaactgcctcacgaaatctgaaagtgacatccagaattctcc

SEQ ID NO: 16702 - DNA, 775 bp, Homo Sapiens
gcacgagggtcccctacaactgacagagggactgaggcaagagcttcgggaggcccagacccacatccgagccacgtgcatctctccaggtgtggtggagacacaattcgccttcaaactccacgacaaggaccctgagaaggcagctgccacctatgagcaaatgaagtgtctcaaacccgaggatgtggccgaggctgttatctacgtcctcagcacccccgcacacatccagattggagacatccagatgaggcccacggagcaggtgacctagtgactgtgggagctcctccttccctccccacccttcatggcttgcctcctgcctctggattttaggtgttgatttctggatcacgggataccacttcctgtccacaccccgaccaggggctagaaaatttgtttgagatttttatatcatcttgtcaaattgcttcagttgtaaatgtgaaaaatgggctggggaaaggaggtggtgtccctaattgttttacttgttaacttgttcttgtgcccctgggcacttggcctttgtctgctctcagtgtcttccctttgacatgggaaaggagttgtggccaaaatccccatcttcttgcacctcaacgtctgtggctcagggctggggtggcagagggaggccttcaccttatatctgtgttgttatccagggctccagacttcctcctctgcctgccccactgcaccctctcccccttatctatctccttctcggctccccagcccagtcttggcttcttgtcctctc

SEQ ID NO: 16703 - DNA, 744 bp, Homo Sapiens
gcacgagggaggaagtagaggaattagaggaagagacagcaaaggaagaacctgctgacttccctgttgagcaacctgaagaaaattaaatataaggtattagatttaaaaggagctttacatttcggttctaatgtaaaaaagggtaagaaatttaatagcttaaaatatgaattaacacccatgttgcatgcattccacatattaaaatttgttttatataatttctaaatgtttaacatttgtttaataaaatgaaggcaaaactattttagtttagtttttatagctaccagacttagatccgataaattgtttgtataatttttaagcttaatttttattactttattggtgttaaggataacaaatgtgtattgttagtatatctattctaatcattttatcttaaatgctgctcttgggagtgaatattcaagtgtgcatcaattttttgaatacttaccctggaagatataaactgggcaagtattttgtgctctgtgtatttttttactgcattagacattgaatagtaatttgcgttaagatacgcttaaaggctctttgtgaccatgtttccctttgtagcaataaaatgttttttacgaaaactttctccctggattagcagtttaaatgaaacagagttcatcaatgaaatgagtatttaaaataaaaatttgccttaatgtatcagttcagctcacaagtattttaaatgattgagaagacttgaattaa

SEQ ID NO: 16704 - DNA, 729 bp, Homo Sapiens
gcacgaggccagtcagtgctgtgttgggagctttctggaggctgtggactgaaggccttgagggaagcagtggctggaggagggtgctggacccatgacacgttgcttcctctggcttttccctgctgggccgctttctcagaggcacttccccacccctaacacccagtgggcccccccaggttctgtgccactcagagggaccctggcaggggccagaaccacttaagggtggtgctggagggccttgtgccccagtcccatcccaggacgccctgagggatggacgcagccatgcaccccccatctggggcctctccctgctccctctcccacctggcagctgggagttctggcttctaggcctgccctgtcaccaggcctctgagtggccaggcccttccacctccccatctgtaaaacgaggcagctgcccggacagccttggggtccttagtggccctgcaggtcctctggcagctctgctgaccccaccctctcccggactgcccttctgtcccagaggggtcaccctgacccggcccaccttgccactgggctttggactccagccctgacagggcccagccacactggctctgcccctcgaaggggctatgagcaaggtaggagggagctggtctcctttcttccggccccacccaggccctgagcacccctcaccctgtgagggccccaggccttaatctctggcggggtcatgggttt

SEQ ID NO: 16705 - DNA, 863 bp, Homo Sapiens
gcacgaggctcaagcactcctcctgcgtcagcctcccaagtagctggtattacatgtgcacaccaccatgcccagctaactttttaaattttttgtaaagatggggtctcactatgttgtccaggctgatcttgaacttcttgcctcaagcacttctcccattggcttcccaaagcacagagattacaggagtgagtcaccactcagccacttgcatcttttgaacacttggaatatgtccagtctggaattttagatatgtacacacccacacacatacacatgtcctgttttgatgtcctataattaattttctcttagtttttaacttttatctatcttattaatgtacagaatcgccctgaaacctggctatggaaaatatcttagtataaattcagatgaacttgttgttggcgttcagatgcaattggaccaagagaacaatgggaaccagtctttcaaaatgtgagtgctgttattgtttataaaaacttcctgtcagtttaacacaaagtctgtagcagtcaataataatatatttaaaaagaaaaagtaggatgcaatagtacaatacattaaattggaataaatcagtaagaacacagagtccttaaagagatctcaaaaatatagtgcaacaaaaatagctttagtacttttgcccacaattatttctgtatacccttagtgcccgatatggatctcatttccattgaagaaccagtcaattttagtcacagagtataaaacagaatcgttcctaagtatcttccttgtggcagaatcatggatgctttcagaactttagagactgtaagcgaaagtagagctagctaataccaagtgtgacaatttgccta

SEQ ID NO: 16706 - DNA, 387 bp, Homo Sapiens
cctaaaaaagatcccccgggctgcaggctgataatcaaggtgaatgagcaaacagcacagaaaaagaaacagcagtatatgtggaagaaagcaagaaaaatcaactggcctggaacctaagacttgtccaaagatgtcacagagagtaaaatgagaaaaatccagtagcccgtgcccagagcagttcctcgtacccagcagaaggctaacaagccctgagatgaacgatgctcttcccaaggaaggcagaggaggcgacagtccatttgcgttctctcctctgcaagtacaggatctcgtttgattctcaaaaccaccctagaggagacaggaggcacctgaggcccagagacgtgaagccacctgtccaaggccatacagcagatg

SEQ ID NO: 16707 - DNA, 485 bp, Homo Sapiens
  misc_feature (355)..(405): n is a, c, g, or t
cccgggctgcaggaattcggcacgaggattataatattttattatagaaaaagcatcccaaatacaggatttcgtaaacactggtaggtgaacaagtgcaattttaaaagtaaatacaaagtagaggcaaaacctacaagcattttgccttcagaagaaaatgtaatgttctcctgcactagtgatcccacccagaacacaaatgtggctccatctcccatgaaagcatcatatttgctttctgagctcagtattcccatttcaataattgcaaagtgatggcaagaagtggcactgaatacattactacaaacccttgacttaaaatattgagacagggtcttgccctgtcatnnnnnnnnnnnnnnnnnnnnnnnnnnnnnnnnnnnnnnnnnnnnnnnnnnntgggctcaagcaatcatcctgtctcagcctcttgagtggctgggaccacaggtatgcactaccatgtccatgcctggcta

SEQ ID NO: 16708 - DNA, 193 bp, Homo Sapiens
ggggggggccccccaaaaggatccaactttacttacccgggctggcaacgtcaaacttttttaaaagggcccccaaatttaatttccggggccgtctttttaaaacgccgggaggggaaaaacccggggtttacccaatttaatccctttgaaccaatcccccttttccccacggggggaaaaaagaaaaagg

SEQ ID NO: 16709 - DNA, 1093 bp, Homo Sapiens
  misc_feature (776)..(793): n is a, c, g, or t
gcacgagggtcaacatggaaaacctctgctgaggatgcatccgagtttggaaaccccacttaagggatggagcctgggggatcacattaaacggaaaatgccaacgacttctaccacctctacgcgtttttagtttttcattttctcgaaggaagcgccagaagcctgtggagtaattgtaactagagggagaacggaaagctgaggtgactgctccggggacttggcgcggcgccttggtggctttggttgctcttccacgctcccggcagctgaccagaatctcttggagggtctcctgggccacctcggccgcgccagtcgtgcagtgagacttctgtagttttaaaatgccacagtccacggcccggtcggcaccgctcgcctgaatcgtgggctttgggaaccttggaggctgctgctccaggaactcgcggtcggccgggagccggggagcttcgttgctgggagcgggcggtattcgcggactccggcggccctggcgggtcgcggccgggatccgagccggggatgacgatgctgatggagctgatggggcaagagtgggaacggaggcacgtacactgaactttaagtcatccaagttgggacttaagatagcaggttaatattgtctcaggcgagacttagaacgtcttttctggtatcccagtctgcagtgggcaaatctattgtctttatttctcatttaagggcagaatggagggatgacatatttttacttttcaagaggcggttgccacttttaagtcacnnnnnnnnnnnnnnnnnnacatacacaaacatacgatagtgtgttttcagagcaagtatcaaaggctaaagacttggagtgatactagtgtttaaaagcctttttaaaaaaattaagatgtgatgagaaactggagaattgacttttaaaaatttcttttctgtagaagaggctatcttcaaaatggagtcctaaagtatatctgatggatagaatttaaattcttaacactgtatatacccctgtggtcaaaagcatcaacgtaaaacttgatgtttatcagattacttatgtttcatttttctgtggttagaaaaa

SEQ ID NO: 16710 - DNA, 1248 bp, Homo Sapiens
  misc_feature (94)..(144): n is a, c, g, or t
gcacgaggcatcctatctgctcaagaagggctttttatagtagaataatatcagtggatgaaaacagcttaacattttaccatgcttaagtttnnnnnnnnnnnnnnnnnnnnnnnnnnnnnnnnnnnnnnnnnnnnnnnnnnnttttttaaaatttctctaaatgtaggcctggctgggctttgaccttttccgtttttaaatcactcacagagggtgggacaggaggaagagtgaaggaaaaggtcaaacctgttttaagggcaacctgcctttgttctgaattggtcttaagaacattaccagctccaggtttaaattgttcagtttcatgcagttccaatagctgatcattgttgagatgaggacaaaatcctttgtcctcactagtttgctttacatttttgaaaagtattatttttgtccaagtgcttatcaactaaaccttgtgttaggtaagaatggaatttattaagtgaatcagtgtgacccttcttgtcataagattatcttaaagctgaagccaaaatatgcttcaaaagaagaggactttattgttcattgtagttcatacattcaaagcatctgaactgtagtttctatagcaagccaattacatccataagtggagaaggaaatagataaatgtcaaagtatgattggtggagggagcaaggttgaagataatctggggttgaaattttctagttttcattctgtacatttttagttagacatcagatttgaaatattaatgtttacctttcaatgtgtggtatcggctggactcagtaacacccctttcttcagctggggatggggaatggattattggaaaatggaaagaagaaagtaactaaaagccttcctttcacagtttctggcatcactaccactactgattaaacaagaataagagaacattttatcatcatctgctttattcacataaatgaagttgtgatgaataaatctgcttttatgcagacacaaggaattaagtggcttcgtcattgtccttctacctcaaagataatttattccaaaagctaagataaatggaagactcttgaacttgtgaactgatgtgaaatgcagaatctcttttgagtctttgctgtttggaagattgaaaaatattgttcagcatgggtgaccaccagaaagtaatcttaagccatctagatgtcacaattgaaacaaactggggagttggttgctattgtaaaataaaatatactgttttga

SEQ ID NO: 16711 - DNA, 1520 bp, Homo Sapiens
  misc_feature (342)..(376): n is a, c, g, or t
  misc_feature (997)..(1135): n is a, c, g, or t
  misc_feature (1137)..(1166): n is a, c, g, or t
gcacgagggtttgtttaaaggtttaaattgttgaaaaagagcatttgccttctttaatgaatgatggtctcacaattcagttgactttgacctaatatttaagaatataaatatattttatttgaaaggctgagtgttgccctcaaacacttgctaaaactgcctagggcaggattcattagggcttgcagacaatgtcacctaaattgctgaatgtactcattataatatgatatctgacaaaggtagtacagcgtttctgagtcatttgggaccaactgcagtggttgtttaaaatgctggttcctgcacacaattctctatctactgaagcacatctgnnnnnnnnnnnnnnnnnnnnnnnnnnnnnnnnnnnaaagtttcccccagtgattccagtgcacctgaaaagttgagaaccacaggcttagtggtacgttggggtttcccacgctaggctgcatagcattataacctgggaacgttaaaaaaaatacagacattcttgattcttagtgtagttatgatgtggatcctacgtattttttaaaaaactctccagataattttgatgtcacgagtcactagtatagactatctatctagtgagttgtattataagcgatgaaatactttaaaagctacccagtaactcttgggattaattttatgaaataaattctgagctgctgcttttgatatagtcagacttaagactgaaccccagtagacaggcaatagatatagaattctggttagctaattgaacttttgtgacctgtttaaaaacaaatcaaatttattgaacaaatgacaaggcacaaatactttcagaattgtatttcagttttgaagatttaaaaaaaatgtgaaaataaatatatattagtatcctttattttaaagtcaattgtaaaccagaagtactgttattttggtgattaaaatccaaaactttagctgtatttcagtaacaaaaacataccttactagactnnnnnnnnnnnnnnnnnnnnnnnnnnnnnnnnnnnnnnnnnnnnnnnnnnnnnnnnnnnnnnnnnnnnnnnnnnnnnnnnnnnnnnnnnnnnnnnnnnnnnnnnnnnnnnnnnnnnnnnnnnnnnnnnnnnnnnnnnnntnnnnnnnnnnnnnnnnnnnnnnnnnnnnnngtatcttactgactaaactggaatggaaatcttataattagtgttgtatttttctgcaaaatagtgaattggtacttgggagacttctgttctttgttgaaaaaaattgcctttgttttgaaattatatcacctgtgttctgaactaaaatgatgggagttcattttgtatttactttgcagtaagtatcatgtaaatatgcaaatgttgaatgtaatatagattgtgtcctcattgagtttttgggtgatacagtttataaatataacaattatacaccctcatacattcgtctgattttgagcttgtaagatgagaactgctttttacacatttaataaaaaaaggtctttg

SEQ ID NO: 16712 - DNA, 883 bp, Homo Sapiens
gcacgagggctgcgcggggctcccccggcgccgcggctagtgcgcccgccgcctcggccgcctcagcctcccgcgccgcccgcttggggaacgaggagcaggacgcggcctcggtggggcccgggccgaacggctgcggacacctgggcgccgaggagccgagcgccgccgtctccggcatggatcagtgcgtgacggtggagcgcgagctggagaaggtgctgcacaagttctcaggctacgggcagctgtgcgagcgcggcctggaggagctcatcgactacaccggcggcctcaagcacgagatcctgcagagccacggccaagatgctgaattatcagggacactttcacttgttttgacacagtgctgtaaaagaataaaggatactgttcaaaaattggcctccgaccacaaagacatccacagcagtgtttctcgggttggaaaagccattgataagaattttgattctgacattagcagtgtgggaatagatggctgctggcaggcagacagccaaaggcttctcaatgaagtgatggtggagcacttctttcgacaaggaatgctggatgtggctgaggagctctgtcaggaatctggtctttctgtagacccaagtcagaaggaaccatttgtggagttaaatagaatattagaggcattaaaggtcagagttctgagacctgctctggagtgggcagtgtcaaaccgggaaatgcttatagctcaaaacagctccttggaatttaagctacacagactgtattttattagcttgttaatgggtgggaccacaaatcaccgagaggcattacaatatgctaaaaattttcagccatttggccctaaatcatcaaaaaaccatccaggttttga

SEQ ID NO: 16713 - DNA, 475 bp, Homo Sapiens
gcacgagggggggagctacaaagcacaacaatgtacatagtgtagaaacactaacagctgggagaggggagccagctgtccagccagcatgttcctgttgtacagcccggtctccctgcgcgctctgctccttcccatgtgcagacagatcagggaggaacctccaatgggtgggggacagtgagcttcggcctggccaaggtgggtgggtgggctctcagattcagctctgtgtaaagattctctagcgggctgcgctcccaagttcccctgctctgtgaaagtgaagaattagtacagctgtgttttttaaagccacctctctgtctccaccccatgggcccacacccaggtgggggaggaggaagccactgcatctgttggctcagggccccagcctgtgcgagcagggcgcctgggctgttgtgtctcctgtctgtgccgatctctattaaaggactccctcttggtgggc

SEQ ID NO: 16714 - DNA, 923 bp, Homo Sapiens
gcacgagggtcagctcagtcagggtggtgaccaaggaccctgaacaaggtgtttggttccccgggccgacatcaggactggagtccagcctccctgcagattccacaggtgcctccctcacccgtgtccacatttatccttcagcatcctgcctggaagtcctctgctgtgccacccagataggattctcctaggccttccctccccccaggcgagtgtgcagctgggttcttcctgagccagcgccgcaaccacgcggagccggagtgtgtgtctcacactgacagcaggttctgattcattcttttttcagtgccaggtggagctcaacaggaaagtcctagcggatctggccatctacgagccaaagactttcaaatctttggctgccttggccagtaggaggcgacacgaaggatttgctgctgccttgggggatgggaaggaacctgaaggcattttttccagagtggtgcagtaccactgaggactgttgctgtattgattaggaaaagagacagagtaatttgcagtttgtttgatttatacttttgtttatctacaacccaataacagacatgagggatggccctgtctctctgggacagagcctcacagatgatgtccatgttttgtgtgaatgaaactcaaacactcttcagtttttagggtcattttctggtatcgagcgaccacaccgaggagcacaccctgcttccaaggctgctgccttctgcacacagtgggggatccccacccaccctggctcccctcaagggctgcgtgcccagtgcccgctttccagttacctgacccaccctgagtccctattccattttgctcggggatgacctcagacatgccctgtggatcagctctgccactactcagaacgaccagctttcaagggttccccttcgtgc

SEQ ID NO: 16715 - DNA, 600 bp, Homo Sapiens
gcacgaggcagaatccagctgcttccactccagggtaggtctgaagccaaccgtcctcggtttcctggcctgtggcatcagtctggttggattacacacaaagccctgcagatctgctgcttttcctgattctcctgtcctgagtgagtgcaaggggctcccctgtcgccgatgtgttctttgaagcagatgctgtgcctgatacctgctggagagtcccaccgccttgagcttctgggtcgagaaaggccaagttgcacactactgagagactgccatgcaccccctggaggcctcagaacattcgacatgctccagtcatggccacggcagtgactgctgattgcctaaccccacatgtgttctcccccttccctgataatcaagcccctgattttcagctgggcacaaaataattcttcctagaacaactccacgtgtgttatcgcccttgcagctgggggtggccaccactggggagaggcagggtgaagaggtcgaaggagcctgagttagcagggatgagcagtggccaggtaaccccagacccattatcctctggatttcttttatgtgaaacaataaaatgtcttgtattcg

SEQ ID NO: 16716 - DNA, 1113 bp, Homo Sapiens
gcacgaggcctcagcctctcaaaagtgctgggattacaggcatgaggcgccgcacttggcctagtgttttcttaactgtgaaattcccattcatttcttgaatgaggctacatcttatggacagagcaaagttattgtcctacagattcttaaaactataattatggctattgcatgaaatttaaatagattttattatgtctgcaaatctctgggcttttatttttctggaaaatataggagctttaatcaaaacataatagttctttttgtaattccatgttaataaaaacaaatactagcaattgcttgaattttaatgaatatttaaaagttcaagagccacggaaatcacttccagagataagagttccctttctaaatagaacacatttttaaaaaataagttatgtttgctactaaaacatttacactgttagactattatgtgcatgttgccaagactcttaagtaacttggatatcaactgtgaagggcctacctctaaaaagtaacaggtcatacaaatacaaatgtaactgtaaaaattccactggattcttgcatatttgcaagattagattattcaaaagaaatttcagtgctaaaattaaccagcaacataagttctatgggctttgaaaattgttctcatctttttaaagttgatgcattttcaatcctgcttacacaggctgttcatttggataagtaaataaaatgtctaaggtgaacttggcattatgtggagatgttggaccgttatagagcaatacaaattcctatgctgtcattctgttttctgcaaatgcaaacgtgcttatatggtcaacagtgcaaaaatagggtagttggctgcatatttagggtattacctaagcatttgttctctaacgttgctctactagaatgatttttttcttgcatcttttcacattaatgatgttctttatataactttcatgcgattatttagttttttaaattaataaagtgaatttaagaaatattgaaataaacatctaagtaattgcattttaaacccttgtttcttactgtgggagaggggaaatacagcactcatttcttgttttaattgcagagtaagtgaaa

SEQ ID NO: 16717 - DNA, 778 bp, Homo Sapiens
gcacgaggccaccacacccagtccaaaaagtgattttctaattccatagtttcttctacatttcttaactggaattttgtaaggaagagttatccttattcatttatttacccatttacttgtaggagcatgtatcataaattcttaatctatggggtgtagttagctactgtaaatttgatgcacatatttttccagattcaataagtaggatccccatcaagctatcttctgaatctttaaaaatgtattctccttatttcatgggtatataattattttctgggcaacagtttgttcatggtacatttgtctccagccctagactcagaaaaatgtaatttattttaatggagaatactatttagaagctgcagtctctgtgtagggaggtgttcctaggtaatagtgccctggcttttagatcttctctatggaggatatggcaaagacatacaaaattatatatacgtatccacacattaataactctatttctatattaaaaacatgaccacaagccaacacttttaattccactgcagcactgctgggttatttcttgctttccaaattcccttgtctgtagctatctttcatcacttgcaaaaatagcacgtgctcaatcctagattaaaatataagctactctcagaattgataactcataccactctttttaaaaatcaactaaccagaattcagtttttattcacagttcttatctttagctcagggcgtaatataaaagcactaggtttaaaacttacttggtcag

SEQ ID NO: 16718 - DNA, 917 bp, Homo Sapiens
gcacgaggtgtctcaccaatgctacccctataatgtttctgaataactgttttccaggaggtataaaccagtggagtttatcattgaatagagtgcagagaaaggaccgcaagaaagctgatcacctcagcaatgaatgatttcaatacgatttcacccaaatggtctcacacaccagcctagtaaaccagagataaggtgtaatgtcatccttccttccttctccctgcctcaactgtcaaagattgacaacttacatgttgtttactttttgccttctatttctgttcataattattatcagaaggcatagcacccacaagcctaatcatactgccttacaaccttattcctcttcattttgtcttctcacttacctgcagaaacccagtttatttttgttctccctttaccacaccagccttgtaactgttatgaatgaccctcaatctcactggaatctgaatcactcaggaattcaagcaaactggatgttttaaccactgttcagctttcttatggaatgacagagaacttgtaaagataaaacaccagtttgcaggaagaaaggaagagaatggaaattgcttctggaaaatactagttttacaatatgttttgtttgtctgctctcttaaataaacttaatcctataaacattttttaagaactagccattaagactgttaagttctcaattataaaggaataaaatgttttaaggaggatttatttgcccttgcttatatgaactgcatatttttagtaggaaatcatgtaatttaaattagtattggttaacagatttaacgtagaaaatggacatataaagaatacaaggaaaatgtctacatgtaataatggatggtagtgatataatgcattttgtcatcccatgctgattcagtaaaaataaa

SEQ ID NO: 16719 - DNA, 1313 bp, Homo Sapiens
gcacgaggcggatgtagccaagacattgctatttaaatgctctatcttaaaggaaccaaccacagaaagccttcaagccctgtgtgctctagggttggcaatgcaggatgctacactgtcaaaagcagcacttaatgagttactgaagcacatcaaacacaaagacagtaattatcagaggtgccttcttacatcagcgatttatgcactccaaggccgcagtgtggctgtgcaaaaacaaatatctaaagctgttcacagcaaccctggtgaccctgctctttggtctctgttgtctcgagttgttgcacagtatgctcaacgaaatgcaaagggaggtgttgtagcaggaaatgtggctcatattctggactcaaatcatggaaagaaggcattactgtacactgcggtaaatcagttggctatgggaagcagttcagcagaagatgaaaaaaatactgcactaaagaccattcagaaggcagctctcctttctccaggtgatcctgctatctgggctgggctaatggcagcctgtcacgctgatgataaactggccttagtgaacaacactcagccaaagaggatagatttatacttggcactgttatctgctgtttctgcttcaattaaagacgaaaaattctttgaaaattacaaccagtcccttgaaaagtggtctctctcacaagctgtcactggtctaatagacacaggaagaatatctgaagctgaaactctctgcacaaagaatttaaaaagtaaccctgatcagccagccgttatcttacttttgagacaagttcagtgtaaaccactcctggagtcacaaaagccactcccagatgctgtacttgaagaactacaaaaaacagtcatgtccaactcaacctctgttccagcttggcagtggctggcacatgtgtatcaatcccaaggaatgatgagagctgcagagatgtgttacagaaagagtctacaattggcatcccaacggggcagttggagtgggaagctctcaagtctgttgagactagcactacttgcattaaaagtctgtatggctaacatttccaatgatcactggccatctttggttcaagaggctacaactgaggccttgaagctttgcttttgtccactggctgttcttttacaagctttgttacaattcaaacgcaaaatgggggcaagagagacacgggcgtcttttggaaaagagtggtatatcagcctgggtatcccaaatctattgcatcaactgcacgttggtacctactgagacacttatatgccaaagatgactatgagct

SEQ ID NO: 16720 - DNA, 1424 bp, Homo Sapiens
  misc_feature (438)..(477): n is a, c, g, or t
  misc_feature (1111)..(1120): n is a, c, g, or t
gcgcgagggttttatctagttcaaaaaaggtgacaacgtctaaattttgatgtggacctctctccatagagagccgctcctaagtgcaagaaattccaacaggtgtcagtaggacttggccctgggggacaacaagtggcaggaacaggatcctttaaaacagtgtcaaacttctcatgcatggagcatgaattcttactaatagagactgtagtttttttcttgtctttggtaaatatataaaagaccttaatttttcttttttaatgaatggagaaaacatgagaaaaccagatggacctgttagtactacatttttaaggcattttatatttgatggtgccgtacttttaataataataaaactgaagttttttagtggcaatactgatttattttttaaaccagaaagataatccatattgattacttactacnnnnnnnnnnnnnnnnnnnnnnnnnnnnnnnnnnnnnnnnttcatatgaagcaacgtaacagataactgagcacttggctcaagtggtcagacttttcataatgttactgtgtaagtttggaattacctaataaccccaggctcaggattaacagaaggttctgggtgagttttaaaacatttaatatacctatgatttgttttacaacttgaagaaaaggcaggcagtcttgtgtctaatgagcttaatgcaaattctaattatactgcaaataatttaaagttttgattgcattctacaattgtctgtttggaaaattacatattatgaagtcattatatattttatcaaatcagaaaaagtcagctcagaactgtagcagcagggagttctaaagatgacatgaactatactataggggtgccctactctatatggcctagggctttggtttgggtcagtcttgttctttcagatacataacaccagcagtactttcgggctcacttcaagaaccagataactctcccaaaccatgatacatgaagtgtataatcaagatttttaattaagctttagaattctttatttgtgtagagtgatggaaatgaccaagaagtaataatataaagcaaaagaattgggagagatcaggttttaagtatataaatannnnnnnnnnctcatggcatattctcaaaggtgttttgttacaaaccagattttcattttttaaaaaatgagacttggtggtatttaaaacctacacctaccatgttgctatttcactttcattgctttagttgcttaatatttaagctttgcttcatgctaccttttgtctgtatttcaatcttcataagcctattttgttttgtagacttgaatgataaaaattgtttctcatcttaagtatgctcagagttttaaatgttaaagaatgttgtgtaacctttatccaataaagtctttgattttttaaaaaa

SEQ ID NO: 16721 - DNA, 1304 bp, Homo Sapiens
  misc_feature (326)..(334): n is a, c, g, or t
  misc_feature (953)..(994): n is a, c, g, or t
gcacgaggatagactttaatttgtgcatttgtgataatttatgactgcaaaaaacacttgttttcttagaatgacatagtgaaaggcacatttcatttgaatgcatagtgtaccattctaaaatatcctaatttctttacaaagtgcttgagcagtcacatacacatacagtaatagcaaaatatatttacactctataaagcttaaaattttaaatctgactaaaatatatatatattttaaactacaaaaaattagtgctttcttcagcttaattgtgtaaatagaccctgccttctaatttttttagtgattgacttcaattnnnnnnnnnttctgtacactgtgtagttacgaaatgctgtcagtttttaatgctaagagcctattttagacattactttctttgctatttgagaaccaaaaaagtgagcagactgtacctcaaaagtatttagtgttttattttaatgttgtattaacacagtttaaattaaagccagacaattaagctaagttcctctattgtcctttgccgaggaaattaactggcattttaaaataactttaaaccacatattgttcccccattctataagattttctcccaaaggatcttgggtaataaacaatttggaaggtaatataaatgatctctggacaattttaattgttctcagagtacaatgaaaagatgctaaaacatcccagcaaatatttataaatgtttttagctcaactctccataaatcagtgtgctttttcatgtttctcataagatttacacctgaacaatttttaagagatgagctcactgtaattaaatagttaattcagtatggttacttaacagcttgctattcctgaggtataatgaccctaacatgctaagcacaggatcaaagatgctattactaaactaagaaaaaacaataaagtcatagattaggagnnnnnnnnnnnnnnnnnnnnnnnnnnnnnnnnnnnnnnnnnntacaggcaagtggaaagtcatggtttgtaaaaagacaaccctaaaagagtataaaaagccacagacggatcctttgaagagttgtataaaatatttcatcaaattatttttgagacttttgaggtacagctttagtgttataattcattttttaataaaatatagactgttttatcaaaaatatttatacattctgttacaatatattgcttttgccctcaataactgccaatataaaatctggatccagtggcctaaaatgtacaaatgcacttaatgtaaatgctggagtttgaggtgtccctcgtgc

SEQ ID NO: 16722 - DNA, 1248 bp, Homo Sapiens
gcacgaggctacggtggcatcacagatcctggcacagtgcccagggttccctctcatttctctcggctgcctcttggagggtgggcagaagatgggcagtcggcatcaaggcaccctgagcccgtgcccgaagagggctcggaggatgagctaccccctcaggtgcacaaggtatagacaaggctgagcagggttcctgtggcccaggatggaggccaccgctgccctgccatcccgtctgcctgccatgggacggctcctctgagtgttccctggccccacgtgtgtggtgtttgtgtgtctgtgcctggccaagggaggtgccaacactgggcttgccacagccccaggagaggaatttggggcctaggaaccgagggcacacgggactctagcctcatccccaggacccccttggctcagagtgtggtgctagaaactggtccccagcccagccccagtactgccacctttacacctacccctgcaagtccccagagggctgcccacgatagaagctgccaagcagggagaacctgtgccaactgtggagtggggaggttgggcctggaccctcaacccctgcaaccttccctagccccctcaatagatgagcaggtcaggctgtggcccttacctcacccgcagttctcgcccagtgctgcagccggctcacctctctccgcttcttgcacatcactggcctgtgtgtgctgcttgctcctgttctgttcgcttgctcccgttccgttcggcttttgctttgcgttagggtgaagaccctagcgtccagctcccctcaacgctatattttgacactaaaaaagaaggtttctaaattgtaggagcaggatggaaatactttgctgcccttgccatcttttaggatgggcccccaggagactgaggtcttcctgggccctcattgctgcttatcgtaccccccatcacctgcacatgggacagaccgggctggagggtgaccttggctgtgtacgtcccagcaaaagagctctggcccgcatctcgctgtgccctgaagggggatgaagggcgatgcctcgcccgaggctttgggctgctgcactgcatgctgggactgctcctactctctgtcccacccctcacccagctgtggtccggctttgggagagtggtgaattgcgctgcccgaactcggagcggagcagggtagggaccgtgtacagcttgataacccttaataaaaagggagtttgaccagaaaaa

SEQ ID NO: 16723 - DNA, 606 bp, Homo Sapiens
  misc_feature (43)..(51): n is a, c, g, or t
  misc_feature (284)..(304): n is a, c, g, or t
  misc_feature (313)..(314): n is a, c, g, or t
gcacgagggaaagtaaaactctgtatttaactggcaatgaggnnnnnnnnnttttgtagagaagtgttggtctgtatagttctttatattaagtgggattcattgtaatgcctctgcatttattctgttgcctcagctgttacttgaagatggcgtaatatataatttatcctgtggtatcagtgataaaaatgatacctttctgtaggaggggtttatcataatatgctgcttcttgaaggcttgcacttccagaattgtgtttccttctgctgtgccattcnnnnnnnnnnnnnnnnnnnnnaataatctnnatcttgaccagtcctggtcatttgctcccctccttgtctgtggaccatgataagcccaagtactgacttcagagctgggtaacagaaattaaagtgaaaagacctttacgtggagaatttgcatgcgtaatataagaaggtgttctttaggtatgttacaggattactttaaaccatttgactttcgctccaaagttatgttggtagtatagcaaattatgatgaatagctttaattgtatgtttaaaagtctcatatgttcacatgcttaaatctgggtatcacaatttaa

SEQ ID NO: 16724 - DNA, 475 bp, Homo Sapiens
ccacgcgtccgctggccagccctgccacttaccaggttggctctgtatggctaagcgttttctcctaaaatcccttgaaaactgtgagaagaccataataagatcatatctttaattctatttcacaagtcacacaatattccaatcaaatacagatggttgagaaaagtcatccatcttccctccccaccctcccacagcccctcaaccactgccctgaaacttatatgctgttatccgcagctccatctggagcatcacagctactgtcaaccctgacgctctttctgaaaaaacaccggatggacatcagaactatttctttaaggatgttactgagccacacaggaaaacttgccttatgattttgaatgcacggatctgatttgactaaacatgataactagaggatcacccaatctactcccattttcaactctaaatcatcagagtgtctcaaatccaaagcacacac

SEQ ID NO: 16725 - DNA, 513 bp, Homo Sapiens
  misc_feature (335)..(414): n is a, c, g, or t
attgttcatgtacaactttatttaaaatggcaatctgagttgtcttcctgacatactctgtaccaaatcttagtactcagtttcatcaagtcctttgccaattcatatattcaaaagaaacatgataaaatgtaaaaggagaatggagtgcgttaaggaataatcaataatttaagattatcaataattttgatattaatattaatttcttagctgtcctactttaatgattttcattgaaactctggcacatctttaatagtctcatgacattactatttaaataaacatgattttcatccaaattattttattcttcttttttgtttttcctnnnnnnnnnnnnnnnnnnnnnnnnnnnnnnnnnnnnnnnnnnnnnnnnnnnnnnnnnnnnnnnnnnnnnnnnnnnnnnnngttcaagcgatcctcccgcctcacccttccaattagctgggactacagatgcccaccaccagccccagctaacttttgtatttttagtagagacagggt

SEQ ID NO: 16726 - DNA, 1756 bp, Homo Sapiens
gcacgaggtaaagatgctctacatgcacactcaattacgcccacaccagccatgcaaaattaaacccggtaagagagtgacagtgatatccaaggtatccactactaccgatgctttaagatgttgtttaccatttataccttctgtgaaaaatagaaggtattttaagaaaagtaactttggtgatctaataaaagggtttggcaaactacaccctgggtccacatttggtctaccacccgcttttgtgctgcctgcaagctaagactaatgtttacatttttaaatggttggaggaaaaaagaaaacttatgacatgaaatttatatgaaattcagatttcagtgtccataaataaacttttattgggacgttgccatgctcattcatttacgtgttgtctgtggcactcttacgctacaagggcagaactgattagcttcaacagagactgtatggcctacaaagaccatatggcctaaaatttcaagtatctggccatttatatatagtttgctgatccctgatctaatagcactaattctaatagcaactattcctttcaattcacctaaagacagacctttagcctttagacagacttgtaagtggaaaggaacatgggtttctgtgctcatttcatagcgtagactagtaatgatctaatgactagaatggggcctattttgatcactaaatgccctattatttccacaatatagtatagtaaagcagtcaatactgcactttctgatggagtcttaaggagtcacagtatttataaccattttgagctaataagctatacctcactctctgctttctctctcactctttttgatagtgtgttagggtgaaaaatcagttatttaacccaatttacttgtgaaagaagttttatctttatggactatgatgacttttgacatcaccatttcttgaagaccttggtattaaatgcatgagaaaccttttgccatctagaaatttctaagtttgtttatgttataagactgtaattaattgatagggaatttgggatctcaatccagggctttttgaaatcagatcattaaatatctcgtcactttggggacttgttatttttaactatgatgtggatatcctgttttaattatgaagtctagaattggtacatatgttgtatgctttgtaaagaatttcacttggtctaatttattgcatatactagcttctgttggaaaatgactgacagctagaaagtttaaggtaatttctaagtatactacctataagtaactgataagaattaggcatcattcagtgatatagcagatgactaatgggtttttcaggccctgcacttctctttcccattttcctgttgcattcagcctcttcaatgcttagtcacacctccactatagtacaaacaaacaaacaaacagaagaaaggaaagatggtgaattttgcaacagagctgcaaaaagtcagtcaaagcaggaagaggttgaaggaactaaaacaaacaaacaaaggtgtctggactacagcacagtggacatgccatccatactggcctgtgccccgttatcaatcactgggcacaacagtgaagaagtgcaaatcaagtggtgtttgtttgtttgtttgtagtaaggaccgtaacccaccccttcctccccccaaaactatactgttatttttctatgtaagcaaattgtttgaaatgctttgaaaatgaaatcttaatattaaaaggcatatgcatgt

SEQ ID NO: 16727 - DNA, 1425 bp, Homo Sapiens
gcacgagggtttctcccactttcagttgattaccattacaggatcttaggcttctttttatctttttgcagtgccttgcatccactggttgtttgttttttctgttgggcactacttatttccttacctctggtttcttctcctacagcttatgttctgaaatgtgtattcctaaaatactgttttcctcttgttacttttctgctcgaggacttccagtaacttaccattgtttataaggtgatgttcaaacccttcagtctggagactttctgccacctatctgactgtacctttatcttcaagcttatctctttccaaacaagaggctcatttagcagctttctctgattgccatgttcatcctacactcagcctcattcagtttacagcatggaaactgtataggacctctttcctatagaaattgaagacacttaaataggaagaaaattaaaatatacatttggatacatgagtattccagtcaaataatatctataaaataccagatagagtataaaagacaactgaaggacaacagagtgatgaaaggactttattaggcatttggatttggttatgatttaaatttcaatttaattagaacgtttccatggcaaggaaggaagcatggaggactgtggaaaagtcattcagtattgagttcatttgcattagaggaatttcatagtttaaaacttgtatatctttacctatccttcgtatgttttcttcttaagcatatttgactttttctacctcagcatctgtataagaaaatatttgtgagtcagatgtttgtgggttttccttacctattattattttcttccatgctttacaacacattttttaaactaccttgttcttaaataattacacggacctgcttctgtgtactttcacagaatctttgacagttaaaaattgtatgttatataaaaatttgacaagcttctacagttaggaaaagcctttagaaatctgccttccccaaaccgtatgttatcatagcactcatgtctccccatgtctaaaaggtaaatagatacagaaacctcaccaaaagttgaatcatctgtactaaaccactgcttttttatccagactttttatataaatcttttattttccaaaaaactgatcttttacctacccctcttagagttaaaaatattgcctgtcaggcaagagtatagtatgccaatataaataatatgctttatttggttagaaacagttggtttgggaagctagcaacatagcatattctttacaaatttaataaggtgtattttgatactgtgataacctgcattgtaaattaccaaatgggttggaattgaccagtttatacttattaaaatttttgatgtgccatggctatccattcattgcatttgtgaattgtgctttagaaaa

SEQ ID NO: 16728 - DNA, 1330 bp, Homo Sapiens
gcacgaggtgccgcgctgtatcgtgtcgccggcagggaggcacagcgcctctctgatcttcctgcatggctcaggtgattctggacaaggattaagaatggggatcaagcaggttttaaatcaggagttaacattccaacacataaaaattatttatccaacagctcctcccagatttaaaataaccaatgactgcccagaacaccttgaatcaattgatgtcatgtgtcaagtgcttactgatttgattgatgaagaagtaaaaagtggcatcaagaagaacaggatattaataggaggattctctatgggaggatgcatggcaatgcatttagcatatagaaatcatcaagatgtgggaggagtatttgctctttctagttttctgaataaagcatctgctgtttaccaggctcttcagaagagtaatggtgtacttcctgaattatttcagtgtcatggtactgcagatgaggtagttcttcattcttgggcagaagagacaaactcaatgttaaaatctctaggagtgaccacgaagtttcatagttttccaaatgtttaccatgagctaagcaaaactgagttagacatattgaagttatggattcttacaaagctgccaggagaaatggaaaaacaaaaatgaatgaatcaagagtgatttgttaatgtaagtgtaatgtctttgtgaaaagtgatttttactgccaaattataatgataattaaaatattaagaaataacactttcctgacttttttattattaaaatgcttatcactgtagacagtagctaatcttattaatgaaaaacaatagacaaacatctgtgcataatttttcagacacaattctgtaaatatttggaaaccttttaagtatttaaacttttaaatttttgaaataaagtattctaaactaatataaataaggacaatgaaaaaacatgaaaggacttagcataatgttattttatcttttctacaactttgtttaaattacctttccaaagatatttgtgtttatgtaattttccacggaataacattaatactctaggtttataaaccggtttcacattatttcatttgatcatcacaagagctttgtgaagtaagccgagaagttgttactggtatttaataatagcaatagaggagttaaagactttcccacagcttgcaggtcaagacaagaaattcaggtctcctaattctcagtggagctctatttctgttaacccaaattgctgctctgtttaggtctcaatttcatctgtaaaatgatactaatagtacttatccattggatttttgttgagatttaa

SEQ ID NO: 16729 - DNA, 1477 bp, Homo Sapiens
gcacgaggaagttcaataaatactttgttgaatttattaataaaatggcagaaatgtcattctcttccatatatgtttaataaatccctgataggtgctaagcactgcactaggtaaaaattctcttctgatgctgtctttttggccaaccatttttttatcatttattcattagctgacatttgctaagtgctttggaggggtcaaaaggggaagtaatgagaaatcaaagatggtccctacatcaaggataaactatctttttttagtcactcaaagtcataaccctttggaaacaaaacccaccagtaccccagattttgaccacagatgaatcagtactacaaggactggttagagggttgaatgaatctgtatactcagcacttaacacagcactctgggtaaaagaaaaaagatcctcaaagatattagttggttacatcaagaaaggacaaacttaggttaatctataacttcatctcagaggaacaggaactttggagataaacagggctctgccacttgcaagttgcaccatccctggtttctccatctgtaaattgattaaaacactgcctatctaataagattaaataagttagaagcattcagttaaatgtcaactgaaactattgttcatgtaaattgtgcttgatgctttttctttctagattcaatgattattgtcattttacctccataggccctcaatagaaatcagttgcagagggcagaagcctagatattttcaccttaaaattggagggtgaaagacattgaggtgaagtagagatagagggtacacagaaaaatcgtataagtaaaactaacatcgttaacattatttactgtaagttatctttgtaagagtggtaaaatacattgtgttgttaaataatttcatttaaaaaatgcatcactttgtgtgtttttatattgctaaaaccataaggccagtctacaaggtttgtagataaaatagaaacataccttccttgaaaagcagaataaattttttaaaggcaggaaggaagtgtttgaaccatgtgtcaacaagctttactgtcaaagcaggcttttggtatgggaagaaaaatacttataaatacttgttttaatatttgctttattaaaatacatttaaaatacagcatttttaaatctctaagctcaacttgaagatataagaacagtaaatttgataaaaatgagaaattacattcccatttctttaacaatttgtaaattccaattatcctgaacatttaacaccatttacatattttattaatcacattttcttaaacatttgataagagatttaatattttgatccaactaccaaaaaagcagacttgtgtacttgacagatttttctaaacacttcacaactcacgattcaaacaaagacaaaatagcatatcaaagttatcactcagttggaaagcactcataccataggcttttattcatt

SEQ ID NO: 16730 - DNA, 1335 bp, Homo Sapiens
gcacgagggacagcagcggccgcgggccagagggccggggccggggccgcgacccgcatcgggatcgcacccgctcccgctcccgctcgcggtcccctttgtcgcccaggtcccgccgcggctctgcgcgggagcgcagagaggccccagagcgcccgagcctggaggacacagagccgtcggattccggggacgagatgatggacccggccagcttggaggcggaggccgaccaaggcctgtgccgccagatccgccatcagtaccgggcgctcatcaactccgtccaacaaaaccgtgaggacatactgaatgccggtgacaaattaacagaggtccttgaagaggctaacactctgtttaatgaagtgtcccgagcaagagaagcagtcctggatgcccactttcttgttttggcttcagatttgggcaaagagaaagcaaagcagctgcgctcagacctgagctcctttgacatgttaagatatgttgaaactctactcacacatatgggtgtaaatccgctagaagctgaagaactcatccgtgatgaagatagtcctgattttgaattcatagtctatgactcctggaagataacaggcagaacagcagaaaacacctttaataaaacccatacattccactttctgttgggttcaatatacggagagtgccctgtgccaaagccacgagttgatcgtccaagaaaagttcctgtgatacaagaggagagggcaatgcctgcccagttaagaagaatggaagaatctcatcaagaagcaacagagaaagaagtagaaagaatcttgggattgttgcagacatattttcgagaagatcctgataccccaatgtccttctttgactttgtggttgatcctcattctttcccccgtacagtggaaaacatctttcatgtttccttcattatacgggatggttttgcaagaataagacttgaccaagaccgactgccagtaatagagcctgttagtattaatgaagaaaatgagggatttgaacataacacacaagttagaaatcaaggaattatagctttgagttaccgtgactgggaggagattgtgaagacctttgagatttcagagcctgtgattactccaagtcagaggcagcagaagccaagtgcttgatgctagctgaaggactcaaatggatagtgaagtccaaaacggaaagcggcatgtattgtacatattgtatgattcaacatttttaaaggcagattgtttttagtaaaatgtagcttttgatagttaataaatttgtcatggttgtctttgattaaaggaaactcaccgccatattcac

SEQ ID NO: 16731 - DNA, 804 bp, Homo Sapiens
tccggtaaatgtagtattcttaacctgttctatattacttatacctattgtctatatagctttaatttatagttgtcagtttaactattggcatgtctggcaaagaaaattaaactttaagagttttataaactgtttctaggttgctaaagaatttatttttctactatatatggtatagacaaagcatcaaactatgtacaggaaaaaagcctgactatttctatttggaagtaggctgaaaagagaattttcaaaactgttcgtgtcttcagttcattctgtcataactttgctattgtaatatgtgaataccagtttatttaagctgttctcttttatactgtattaatttaatgttcatctgcgtttagtaccatttttgttattaaaactggcatttaccgtttttcacattaacccaccttgcaccttcccccaaacttatctccacttttctatgcattctatcattgatttgacacacttcatagtgagtcatttaaatactctacgtttggttcaattaaccagtaggttacagttattgaaaattaaagtacagtttgtttttgccaagggtttagatatgcttttaaatattagaaacatctaagaacagaataacataattaaacttttttctggtaagttactggaaggtttcactgtttagggacctatcatatgagacttcttaaaggattaaaagaataggatagtctcataattgtgagtaaacatcaaggcattatatttacaatactgaataaaatttcatctacacacatgttgcccattgtt

SEQ ID NO: 16732 - DNA, 1427 bp, Homo Sapiens
  misc_feature (465)..(474): n is a, c, g, or t
  misc_feature (984)..(994): n is a, c, g, or t
gcacgaggctttggaatactatgtattaggagaatcttttgagacttctgctccttgggacagggtggtagatctctgtagaaatgtaaaagaaagaataacaagggaatgcaaagagaagggtgttcagtttgctcctttttctacatgcagggtgacgcagacttacgatgcaggtgcttgtatctacttctattttgcctttaactacaggggaattagtgacccactgaccgtatttgaacaaactgaggcagctgctagagaagaaatccttgctaatggagggagcctgtcacatcaccatggagtgggcaagttacggaagcaatggctaaaggaaagtatctctgatgtcggctttgggatgctgaagtctgtcaaggaatatgtggaccccaataacatctttggaaacagaaaccttttataaatccattagtaccattacaaaaaaatgtcaannnnnnnnnnaagttttcaactgtggttatactagtaatcaaatatatcatggactatattttggatacatttgtttctttggtttaaaataagtttgttttcattctgtagtttgttttgtttctacatctatggattgacagatagtattcctaaatctctctcattgtaggtacatcattttacattcagcggttgtcatttcaaattttagtcaggcagcacaaagctgtcaattattccagaggaagctgctgccagctgttttgtattgttgcttcctcttggggaacaaagacagatttggtatcattgattgctcagctagcctctttttaaaagaacgtttctgggaatcagatgtctagggaaggattccactgaggagtgatacacgtgtacattgtttaagagcatagtctagtgtgagtaggccattaaggggaaggatattcatgaaagaatttaggcaacctgttatttagaaagccttcacgtctgtaaggtgcttggcctacnnnnnnnnnnnaaattagtatacatgcataaaaccttgtatcatcaatatacaaattattctgttaggggacatgtttttgttctccatgtttctgtttctattgtggtatgagttgtatttgtatcactgagataacctattgttatattctaattcattgataatatgttttgtaagataagctgacatccttcattgcaagtgaagaacaggtttaccatgaaatgaatgcctttattcaacttagagtcctaatgtttctgatttcacattctttgttgctgaaatgcagagaaaccagctacagcaagagcataaggaaaactcttagacttaatgtctccaattgcaagattgtttcactaaagaacagtcatcattcaactactgaatttgaaagcttcaccgtttcaatgacaaaatcatttttgattttttaaaa

SEQ ID NO: 16733 - DNA, 438 bp, Homo Sapiens
gaattcgtcacgaggctggcctctgctggggaaggcatctttcccaaaggtatccccaagtaccatgttgaaaatgtcctcagtctgttgctccatctttctgagcctctgcttggtatgtcatgtttatggtcactacggatgagtgtgtgcagagtttgggttgattcttttaaatgctacaaacaagagctatttcttttcaataaaaaaggtttggattcggcctcttcctctgagcccacctcccagccctccagggagcatcagtgtacctgagtcactttgtctgcatctcttcatcccacaaaacacgaggctgggtctcattcagcggcctctcaccaaccttcaagatccagaagaaaacaggaacgttcagctctgccctgtgtcgtatctaatcacatacattaatttatctaaccacataagtta

SEQ ID NO: 16734 - DNA, 279 bp, Homo Sapiens
aaatcccccgggctgcaggaattccgcacgaggctgcagcatccttgtgtgtagataaattagtcgacagaaactcagcactggggacaggattgcaaagtcggggacatagatgcagacagttgttgagatttggggatagccgggcttgtgagcggtgcccatttccagatgaagcctttcagcccttctgagtccccggcccttggtgcgatgtctgtgagtttgacctgcccagcgtgtgggctggctcaatgctgaataaagtgggtttgtgtc

SEQ ID NO: 16735 - DNA, 74 bp, Homo Sapiens
gctcaggccatcctcccactcatcctcccaagtggctggggctacaggcgtgtgccaccagacccagctaattt

SEQ ID NO: 16736 - DNA, 1519 bp, Homo Sapiens
ccccgggctgcaggaattcggcacgaggggccgtcccacctactacatagatactaatgctctgcgtgttccgagggagaatatggaggccatttcacctctaaaaaatgggatggttgaagactgggatagtttccaagctattttggatcatacctacaaaatgcatgtcaaatcagaagccagtctccatcctgttctcatgtcagaggcaccgtggaatactagagcaaagagagagaaactgacagagttaatgtttgaacactacaacatccctgccttcttcctttgcaaaactgcagttttgacagcatttgctaatggtcgttctactgggctgattttggacagtggagccactcataccactgcaattccagtccacgatggctatgtccttcaacaaggcattgtgaaatcccctcttgctggagactttattactatgcagtgcagagaactcttccaagaaatgaatattgaattggttcctccatatatgattgcatcaaaagaagctgttcgtgaaggatctccagcaaactggaaaagaaaagagaagttgcctcaggttacgaggtcttggcacaattatatgtgtaattgtgttatccaggattttcaagcttcggtacttcaagtgtcagattcaacttatgatgaacaagtggctgcacagatgccaactgttcattatgaattccccaatggctacaattgtgattttggtgcagagcggctaaagattccagaaggattatttgacccttccaatgtaaaggggttatcaggaaacacaatgttaggagtcagtcatgttgtcaccacaagtgttgggatgtgtgatattgacatcagaccaggtctctatggcagtgtaatagtgccaggaggaaacacactaatacagagttttactgacaggttgaatagagagctgtctcagaaaactcctccaagtatgcggttgaaattgattgcaaataatacaacagtggaacggaggtttagctcatggattggcggctccattctagcctctttgggtacctttcaacagatgtggatttccaagcaagaatatgaagaaggagggaagcagtgtgtagaaagaaaatgcccttgagaaagagttcccaagcttctaccttccttttgtcaccttacgtttcatagctttagtatactcaggaaaagaatgaccatcttttgtagaatgtttatacatttttgcatatttcaatttccacttaaattttttaaagctttaactggctctataaattaagtttgtgctttccttgaaatgcacttattcttattacaagcattttataattttgtataaatgtctattttctctaaatattttgctttcagtaaaatgctttccaactctgtttagtgtattaattaccagtggattggtagaactgctttttattgactagtaaaagttactgcctatgctttttaccttaggcttacagaattaaataaaaattagccctcgtgc

SEQ ID NO: 16737 - DNA, 660 bp, Homo Sapiens
aaaggctatcaatacaaaagtttatctaaattactgtacagctatacaatggaatactctacaaaatggagagatccataagataaagcaaatgaataaagcaaaatgcatgtgttgacagctgttgtgatacctcagttcttgtcttcttggtttaaaagaatttaaatgagacagcaaaggagatgcagcataatttattgcaaaagaaaaggagtattttgaaagttaggaggagaacagacagtacacctgagagagagaattcagggccggctgctcgtaagggtgagacagcattgattattgctggagaaactccctttatgggagttttgcattattattcataaggaggtgaggtgttgcagtaatcatgtcctgggtggtcctctgcacaggtgcagtagctgttaatgcttgttcatacaccacatgtctcagtagcatcttaaatttccacctagaggtgtgttttttattattatcatgtgcaaaggatcagtttgaggacaggtaaaatcaaaatgtgtatgctctctagaaggaaagtccctactgaagatagctttgcttaaatgagctcaattacaatgtgaatgctgaggtttattgtgttggctgtatggtcatgaaaaaatggtcatttccttgactacc

SEQ ID NO: 16738 - DNA, 935 bp, Homo Sapiens
gcacgaggcttctcggtgctagttggccatcttgactcaatgttgggatacactaccagagaagatttttttgttgatgtgctgttcaaagtgaattctgaaggaaaaggttgctcacctctgtttcagagcatacccttttaaacctttttagacttgtcctcttctagaattcattataaccccaaagtgtaaaaactatttggaagttgcccctgacaagctattatacatctctggtaaatcctgctgaatgtaagggatattcagagcttttcatacctcatcatgatgttatttaagcagccaacttatgtgacctgatttaaacttttaaaaaatccacttcattcaaactagaaagagtcaaagacaaaggacatttatcagccaagagtgtgacgcattcttcgcatctagtctgtagtagtgtctgtgctctgggatggataccgtctgatgtctgtttgttattgatggcgcagccactgcaaaactagtcaactcccatctataactgttactttttctagtgctgctttgtgctgagagaacattttagtttactgcacttgacctgtaaaagactgattctttgtaattttagggataaattaggtggttaatttaaagaagaaatttcaatgttgcctttacatcacattaaaatataacttctttcagaaggataatagaagcactgattcatagtaaaaatcttgtttttagctttgacttttttgtggctgttttttaaaattgtaaattactagtaacatgtcatttctataggatgttttaaattatgtaccttccattggatagttaaataatttcattttataagccaatttgagtggggaagatacaaagcacacagttgtctcctcacattagagagtagtgtggcattcagacattccggaatttttgct

SEQ ID NO: 16739 - DNA, 962 bp, Homo Sapiens
gcacgagggttagatataagaatgtaatgatattcatgcactgaattctaagccaatatgaacaaaaatgctgcatgaatggcacatataggtcaccaaagttcattcacaggtagaaaaaacttgtgctttcttttccatctaaaaacaaaaggagactttctttatctcatttaaagaacagctctttgaaattgaaattgaccctttttgcttgaccttaaggagattagcttccagtagatgagtttgcaaaatacttttcctgttcttttgttttgctggtattgaaaacatcccactaaatcagatgaagaggcatgggaggaaaaatatccaaattaattactaaaatcgagaagagaaggcaaactcttgaaaagtaaaaaggtgtttgtgaccttcagtatttattgaacagaggaaataactgacaagggcaatacaattcaatgttcatgtagtaacattcatgtcacttgttgaatttggttctcatatgtatattgcatacacataaattcaaactataagtcgtcatttttgagccatcatcttacattcatgtaatgaaattatggaagagagtaaaaactagctcttaacttagtaaatataatatggtatttaaaatcaggtcactacagtaaggttctaagtattgccaattgaaaagctagaaatggtattactgttgcaaagtgttgtcaataattgactccaatagcattgtaaatacttgtatcccacaactattttaaacccagcaataaaatggattttctaattcacttcaattctttatttctcttacctatctatgtcttggtacataagaaaagtgtttccatcactgcattggtagaattatttcagtgttattatttatgtgatttcgtatgtctacacaaaatgaattagtttatttatattgtgatacagttgttttgagaaatattttt

SEQ ID NO: 16740 - DNA, 1043 bp, Homo Sapiens
gcacgaggtggacatcgggcagcactgccagattttcttccatttgtgtgtgatgattgttcaggaatattttgccttgaacacagaagcagggagtctcatggttgtcctgaggtgactgtaatcaatgagagactgaagacagatcaacatacatcttacccatgctctttcaaagactgtgctgagagagaacttgtggcagttatatgtccttattgtgagaagaatttttgcctgagacaccgtcatcagtcagatcatgagtgtgaaaaactggaaatcccaaagcctcgaatggctgccactcagaaacttgttaaagacattattgattccaagacaggagaaacagcaagtaaacgatggaaaggtgccaaaaatagtgaaacagctgcaaaggttgcattgatgaaattaaagatgcatgctgatggcgataagtcattaccacagacagaaagaatttactttcaggttttcttacctaaagggagcaaagagaagagcaaaccaatgttcttttgccaccgatggagcattggaaaggccatagactttgccgcttctctagccaggcttaaaaatgacaataacaaatttacagctaagaaattaaggctgtgtcacattacttcaggagaagccttacccttggatcatactttggaaacctggattgctaaggaggattgtcctttatataatggtggaaatataatcttggaatatcttaatgatgaagaacaattctgtaaaaatgttgaatcttacttggaatagtcattcaaagattcaagtcagaaatcacagggaaaattctattacatgtttaagtccatttattttactacaaatactatttttgtaatttttaaaagttgctttttaacttatttccccttatgtcacattttaaattatgagttttctattagagtttttggttttaagtttaattgtgtacggatcctcaattattagcaaatcttatatttaattagctttcattagtttatgctgtagtgacaacaacaaagatg

SEQ ID NO: 16741 - DNA, 1204 bp, Homo Sapiens
tccgggcggcggcgatggcggcggggatagtggcttctcgcagactccgcgacctactgacccggcgactgacaggctccaactacccgggactcagtattagccttcgcctcactggctcctctgcacaagaggaggcttccggagtagccctcggtgaagccccagaccacagctatgagtcccttcgtgtgacgtctgcgcagaaacatgttctgcatgtccagctcaaccggcccaacaagaggaatgccatgaacaaggtcttctggagagagatggtagagtgcttcaacaagatttcgagagacgctgactgtcgggcggtggtgatctctggtgcaggaaaaatgttcactgcaggtattgacctgatggacatggcttcggacatcctgcagcccaaaggagatgatgtggcccggatcagctggtacctccgtgacatcatcactcgataccaggagaccttcaacgtcatcgagaggtgccccaagcccgtgattgctgccgtccatgggggctgcattggcggaggtgtggaccttgtcaccgcctgtgacatccggtactgtgcccaggatgctttcttccaggtgaaggaggtggacgtgggtttggctgccgatgtaggaacactgcagcgcctgcccaaggtcatcgggaaccagagcctggtcaacgagctggccttcaccgcccgcaagatgatggctgacgaggccctgggcagtgggctggtcagccgggtgttcccagacaaagaggtcatgctggatgctgccttagcgctggcggccgagatttccagcaagagccccgtggcggtgcagagcaccaaggtcaacctgctgtattcccgcgaccattcggtggccgagagcctcaactacgtggcgtcctggaacatgagcatgctgcagacccaagacctcgtgaagtcggtccaggccacgactgagaacaaggaactgaaaaccgtcaccttctccaagctctgagagccctcgcgtcccaggccccagccagggggccggccttgtcccgcctcatccacagaaagggaggatgggcgatgacagttgtttctatgccttctgacccagtttcccagtttataactttatgacaatgagtttctcaagcccaaggccttatcttcaccccacaaacaataaagcaaagtaaagaaaaaacctcgtgc

SEQ ID NO: 16742 - DNA, 974 bp, Homo Sapiens
gcacgaggttttgattcttttgtacaaggttgggtgattgtgggtgagattgtgcagtaggaataacagctgctggttgagaattacccctcaaaagtgaaaatagcgtgagctgtatatggtaagtggattgacctctaaactccctagaagggctgtagcaccccctccagagcccgaaggccaggaccctccagctccatctcaggacacttcctaagaatacgccagacaccttttgaaagctaatttttggtgaagaaatggattcggttacataagagtgcaacttcagactgaagataggccaaggtcgtcactgatctcaagatttcaaccttgaccatgggcagtgaccagattgaaaggggagcaagttcggcagtgggagagttgaccgtgtcaccccctgcattgtgctgccatttggccagcctgtccaagggcatgacaccaagtagacactacagagagagaaacactacagcaacccagggttgtcctgaaacagacttttatacttgaacgtggagactgcacatggactttagggtttgtgctgtgggataaacggaagctacagtgagaacatagccagtcccaaagacaatttcaaagaaaaatgacagtaaagattagctgggagtagtctttgacagtgcttatttgatactgtctctcagagtttgcaaaccagattgtacaagtcattagcgtcagatagctttaaagttgtgaccttcttgtacatgaatcttctagccagtttcctttcctttgtaacgaaacatgaaatcctagaatgtatgagaagttcagacattaggcataaggaaactcgtttgcaggctctctgtccagggctgcttcctgtcctggaggggccagtgagtcttaggtatgtttattttattctcacatttgtgtttttttagaaaagtgaatggtcaataaatggcttatctttcataata

SEQ ID NO: 16743 - DNA, 851 bp, Homo Sapiens
gcacgaggccggaggagaggctctctagtctgaaggcaccgccggcttgcgccgagctgagtgccgggtttccctattccaatcctgtttgaaatggtttcttcagcagggcttaaaagagcagccttcatcctgaaaatgtatttccttttgtttaatgctttgagtagataatcctgaattgaggtcatgaggaggccccccaggccagacagtcctgaacccctctgacacttggaaactgaatataagtaaaatgtccaggtggactctgagtatttcctgtggatcctgggaaagtactgttgcacaaaggctgcaaagctggactcaggaatgtcctccaaccagcagcgctgacctaagagctccctgtgccgtctatccagaccagacttcggtagatgcctttgttagatctatcacatgtaaacgagcttgtatctccttccctgtgccacgagagagattggctttttattccagtctaggcagagacagaagaatgttgaataagagcacgattagagtcctgtctggttatctgttgcccaagaaaagaactctgctgtccaggcactgcttggcttactatcccagcaaagactgcagttttgtggacttttgaccaccttgggctggcactcttagcacacctgagacagatttaagcctccctaagagactgaagagaggaacaggtgtcagatactcataggcactgagatctacaaatgggaagcttgtgagtggcccatctttgttggcctacgaactttggtttgatgccagtcaggtgccacatgagaacctttgctgagatgcaaataaagtaagagaatgttttcctg

SEQ ID NO: 16744 - DNA, 1936 bp, Homo Sapiens
  misc_feature (1122)..(1131): n is a, c, g, or t
  misc_feature (1392)..(1423): n is a, c, g, or t
  misc_feature (1511)..(1565): n is a, c, g, or t
gcacgagggtcagggtgccggcgtcgtggtgcttgggtggtcgccaccaagaagactttggtggggtagtctcggggcagctcagcggcccgctgtgcccgtttctggcctcgctcgcagcttgcacgtcgagactcgtaggccgcaccgtagggcgagcgtgcgggtcgccgccgcggccgcctcggggtctgggcccagccgcagcctcttctaccgcggccggttgggagtcgccgcgagatgcagcctccgggcccgcccccggcctatgcccccactaacggggacttcacctttgtctcctcagcagacgcggaagatctcagtggttcaatagcatccccagatgtcaaattaaatcttggtggagattttatcaaagaatctacagctactacatttctgagacaaagaggttatggctggcttctggaagttgaagatgatgatcctgaagataacaagccactcttggaagaattggacattgatctaaaggatatttactacaaaatccgatgtgttttgatgccaatgccatcacttggttttaatagacaagtggtgagagacaatcctgacttttggggtcctctggctgttgttcttttcttttccatgatatcattatatggacagtttagggtggtctcatggattataaccatttggatatttggttcactaacaattttcttactggccagagttcttggtggagaagttgcatatggccaagtccttggagttataggatattcattacttcctctcattgtaatagcccctgtacttttggtggttggatcatttgaagtggtgtctacacttataaaactgtttggtgtgttttgggctgcctacagtgctgcttcattgttagtgggtgaagaattcaagaccaaaaagcctcttctgatttatccaatctttttattatacatttattttttgtcgttatatactggtgtgtgatccaagttatacatgaatagaaaaagatggtgttaaatttgtgtgtaggctgggaattcttgctgaaggaatgggagaaaacctgttgctgcaaattttacatgttccagatggaaagggaagtctaacgctttttaaaacaannnnnnnnnngtatttaattaagcaattgcagttatctgggattttgggtcagaattttaaattctgtttgattctccatattcccagtgaataaaatacaaaagcattgtgtttttaagattgtgtcgatattcacctaaaaacttgtgccaaaagcacctggattggtaattatatttcacttaaagggtaaatttgacaatatcttgataatcaaaagtgcaatttttttcttcaaaatgttttctccagcatcacagatcctgcagnnnnnnnnnnnnnnnnnnnnnnnnnnnnnnnngaaataattcttactcacaaaatatatttctgataaacattaagatattaaatctgatgcacaaactttttaatttggccattaatcnnnnnnnnnnnnnnnnnnnnnnnnnnnnnnnnnnnnnnnnnnnnnnnnnnnnnnntcacacatgcttcgatacttccttgttaagaattcttaataactactaaaactgatttttaatagttgctgatatatatttggtttgtttgggtatacttttcaaaaccatttttgaatgtccaaacatctgatttaaagtttctgtttatctttctgaccaaaggagcaagaggtataatggatatggcattcattaaaatctttactatgtacaaaaacagtaatatttacagcatcagtaaatatttttaagtggtacttctaaatcataaaagttggggaaagagacctttaaaatcttgtggtgttgaacaatgttatatgaagtagaaaaaataaaatacttcccagttgtgtgttttgttttac

SEQ ID NO: 16745 - DNA, 1576 bp, Homo Sapiens
  misc_feature (107)..(151): n is a, c, g, or t
  misc_feature (907)..(922): n is a, c, g, or t
cttttttccttgttgcttttgaaatttttgcaattattttaagaatccagtctttcagaccagcccttttattaagctttgaatttttaattgatttttttaaagtnnnnnnnnnnnnnnnnnnnnnnnnnnnnnnnnnnnnnnnnnnnnntccgctactcttactcccctgcctccccctaccccagcccatgagagttcccttgcactcccctctgcctttgcaactgatcatcctccctttctccttggcttgaagcatctatgtccagtatctgtgaaatgatgttttatctgtgtgtcaggatgagaaacggcagtcattccaccaagtgttggaaactggttagcctggagacaagggtttctggggccacagctcagggatgtgtatttaattacaggatccccagaaactcctctctaggctgccacagcaacattttttctgggcttgggagccatacctgaactgtttcctccaaggcgggaactccagagagcctgccaagtctggagcaagctggggcttctgctttggccagacctgggccaccatgagacttgaaggcttctagctgtcctacgacacgagccacggtggccctgcctctccccgctcatagaagcctggtccctctgtctagcccagttcccatctagcatccgtcttctgggcctgaagccctaaatggaccacagcctgcacaggaatcaactgtaggctcaaagggaggcggtgagtaaggtcagagcctgctccaagcccaagaacaaaagttgtgttatgggtggaggctagtcccccagatctagccctgccgtctttgccctttaatgaccattgttttctttctctaaaatgtcttgtaataggtgataatgttgttgattcaaatttccatgnnnnnnnnnnnnnnnnctacctcttaagcgacatcctggtcgattcctctctgaggaatcctgtgggaaaagaatactgtagctcctgctctgtttacatgtttctgtcgggaaagaagccccgcctgccctggggtgttggtgtttttgtctgtgttgccatcccaggtctgccataggggctggtggctgcattgtgatgtctgggctgtgtctggggattccttcccacctacccagccagggactagtcacccccctgaagaggcctccatttccttcctgtgctccagggcatagggagcaccactcccacagacaccacctttaagggctctagtggcacacacatccacgagcctacccccaggttacctgccctaggtccacctccacccacagtcctgtgtgtaggaatcgaggaaacgggatgtccctgagcccttgtctccaaagggccggccaagggctgcccgccagcctgactccatcaaccctccatgaccaaatgatagctggcgggctctgcaggctacccaggccctctgctacctcccaccctgccagctggcaagggatgggccctgttctgtgaattgactacctgtggaaatgtgaccatttagtgtaaatgcatgtttagcaagtgttaggtactgtatttgaacca

SEQ ID NO: 16746 - DNA, 907 bp, Homo Sapiens
  misc_feature (818)..(832): n is a, c, g, or t
tcccccgggctgcaggcaacgtcaatgtcttttctgagctttccgctcctcgtcgcaatgaagactttgtcctcctgctcacctacgtcctcttcttgatggcgctgaccttcctcatgtcctccttcaccttctgtggttccttcacgggctggaagagacatggggcccacatctacctcacgatgctcctctccattgccatctgggtggcctggatcaccctgctcatgcttcctgactttgaccgcaggtgggatgacaccatcctcagctccgccttggctgccaatggctgggtgttcctgttggcttatgttagtcccgagttttggctgctcacaaagcaacgaaaccccatggattatcctgttgaggatgctttctgtaaacctcaactcgtgaagaagagctatggtgtggagaacagagcctactctcaagaggaaatcactcaaggttttgaagagacaggggacacgctctatgccccctattccacacattttcagctgcagaaccagcctccccaaaaggaattctccatcccacgggcccacgcttggccgagcccttacaaagactatgaagtaaagaaagagggcagctaactctgtcctgaagagtgggacaaatgcagccgggcggcagatctagcgggagctcaaagggatgtgggcgaaatcttgagtcttctgagaaaactgtacaagacactacgggaacagtttgcctctctcccagcctcaaccacaattcttccatgctggggctgatgtgggctagtaagactccagttcttagaggcgctgtagtannnnnnnnnnnnnnngtctcatcctttggatacttcttttaagtgggagtctcaggcaactcaagtttagacccttactccttttgtttg

SEQ ID NO: 16747 - DNA, 1366 bp, Homo Sapiens
  misc_feature (865)..(873): n is a, c, g, or t
gcacgaggctaactcacatttattaaaaattgaagattacagaaaagcataagattggcatcattaaacaagcttaattaacttacctttgactaataaatgaaaatatttaataacactaaaggaattttgagaataagttctattccaaccttagaaattaaaaataaaagcaaagcagctattctccaaaggagaaagcaaccacagatctccctctagtggcaaaagataaagttgctgctgaaaagctgaattgctcctccatacatagaactgctcagacatttcttctataaaattctaacttaagattctaaatcaatatataaggaaaatagatctattttttgccaatgacatttgggtatctggggctttcaccaaataaaagtttataaagccataaccaaactgtgagaaacagaaaagggagcagttctcctctgttggtaaatattctgggatagagcatgaaaggagctgactcagaagtataaagtagtaagcagcagtgagtgggctgtgtaacaactcagggtacatcaaaagaaataatatattataagagttcttaaccaaaacaacacttttcattctggtattcagtttcaaaagacagctctgccacattgccagttttaattacaaccatacacactcatttagatttcactactgaactactttcaagtacaagaaggaactcaaaatagaaacgacttatgatacaactattgttattccctcacagcttcagggaaaacaggctttatatacactgtagtaagtacagaatgtacagaagacagttatatatacaaaagtgcattaatatagtaatatatttagcagtaatacaggnnnnnnnnntcctggttaacaatctgatacattacagtatttaaaactacttgaagattctccaaaccagtcaacttcctacttgctttggttatgatattgctgctacataactaatctttgaaactaaaaagcaaaaacaaaaacccacaatttgaaatttttacccatatgtgaattgttttgcatatacttgtttaccattaatagcctttgacaatagtccttaaattcccaacacaaaggttcagaatagataatacttgttaagtgagagtactcaaataggaaattaaatggatccactacaggaacagacattatctgctccattgttaaaagcctcagctagataacctaaccacaaatgtcaatttcagtctcagtttaaatccaataggtcagctactgttaaaagagccagcagctccacaaaactagtcatggcttcaggccactgttccttagaacaatttagaatattaagtgttaaccctcgtgc

SEQ ID NO: 16748 - DNA, 730 bp, Homo Sapiens
aatcccccgggctgcaggaattcggcacgagggctgcccctaccttgggatgccagccttcaaacctgggggaaaggtgcttctgagtgatagcaatcttcatgatgcctaggaggttcctgacatgggacccatctgctcctccagccaactcctgtccctcacatcccaccatggtggctcctcccacctcctctggatttgttcactctgagatctgtttgcagagtgggtgcttagcagacagagtgaagctggctggggggcacagtggtgtgtagtgctgctgtgtatcaaaagaccaaggtattatgggacctggtttcagaatgggatgggtttcttcacctcatgttaagagaagggagtgtgtcctgaagaagcccttcttctgatgttaaaatgctgaccagaacgctcttgagcccaggcatcgttgagcattaacactctgtgacagagctgcagacccctgccttgagtctcatctcagcaatgctgccaccctcttgtctttcagagttgttagtttactccattctttgtgacacgagtcaagtggctcacaacctcctcagggcaccagaggactcactcactggttgctgtgatgatatccagtgtccctctgcccccttccatccccaaccacatttgactgtagcattgcatctgtgtcctgttgtcatttatgttaaccttcaggtattaaacttgctgcatatcttga

SEQ ID NO: 16749 - DNA, 926 bp, Homo Sapiens
gcacgaggattttaatcaagcaaaaacaaatttatatccattatttctaaaaataaaattagacttttccaatccttaacatctgcatttaataatatcttctaaccaaaatacagatgctaaaacagcaagttacattatatcttgtacagcatacagtatgttcactgtttacacttactttaattctagttggtcatgtactcaatgcatacttaaacatcactcaataaaattttcacaattaacaaaaaaatgtgacaaggctgtcttaaaacggctctgctataaattgtatagaatatacagaattacaaagtcaagtatttttttatcaaaatatacacccctccctgaaactaacacaagctatcaacattttaaatgaatacaattatagaaaatatttgcaaaattattttttcatgtataaatattctgccatatttactttggtctagaattatcagcatacaagtccacttaaaaaatatccacatataagggctgggagagagacatcactacaggtaattttatatttggggttaactcaaatccaaatgactagaatatacagtaaatgtctttgattaatattattaactgataaaacaaattaggggatcataggattgcttattcaatattctaattatcaattcaaaaatgattttcgtaagccctttgtgactatctctttaataaaacccaaatgaatagtgtagggtgtacatatatacaatgtataaaataaagttgaatttgcttgcattttcccatttttctctacttatataatactgtatgtaagtgaaagtagatgaacaaaagataaatgcagatacaatagtggggttacttaacagcaaggtactacagtattaaaggtcaactttaatcatgtcctttcctgggcgtttaaa

SEQ ID NO: 16750 - DNA, 686 bp, Homo Sapiens
  misc_feature (624)..(636): n is a, c, g, or t
gaggaaagaaacacaatggcttgatggtcgaggacaggtttattttaaagaaaacaaacccaagagtggcttctggctgagttagatcagaggcatgctctcttacagactaagagtttttaaggattcagggtgggagagtttaccagaggcttggactgcttctgtgtctctttaggtgtgcttatctgggagggagttgtgtgtctgtttccatacatcttcctgcagctgcaggcatacccccaggtctgcttttagcttccctatcttagtgcacctgaagggaaagaatgtgcttattaaggcccactgttatactggggcccaatgtatgagggtgaagtttggcaattacccaagagactttccccccacctccctctgtgcctgagctgtctcatctatgttttactgtctgctctttctgtctgcttgttgttagaagagaagtgattttcttgaaatgcatgaggctggaaagggagctggcacttaaagtggcggtgtttgtccgagaggatggtgctcctgctctgtcacagtgggcatggggattcaggccactgccaccgaatttcaagagcccaagcacagagcccagaactaaattgtgagggtttnnnnnnnnnnnnngctttattgaagtataattgacatacaataaacttgaatatttaaagtgt

SEQ ID NO: 16751 - DNA, 2417 bp, Homo Sapiens
  misc_feature (271)..(284): n is a, c, g, or t
  misc_feature (1110)..(1252): n is a, c, g, or t
  misc_feature (1260)..(1268): n is a, c, g, or t
gaattcggcacgaggcacagcctttaaaaaggcttcgattatttcagttgagtaaagcatggtgctaatggaccagggtcacagtttcaaaacttgaacaatccagttagcatcacagagaaagaaattcttctgcatttgctcattgcaccagtaactccagctagtaattttgctaggtagctgcagttagccctgcaaggaaagaagaggtcagttagcacaaaccctttaccatgactggaaaactcagtatcacgtatttaaacannnnnnnnnnnnnnagccatgtagaaactctaaattaagccaatattctcatttgagaatgaggatgtctcagctgagaaacgttttaaattctctttattcataatgttctttgaagggtttaaaacaagatgttgataaatctaagctgatgagtttgctcaaaacaggaagttgaaattgttgagacaggaatggaaaatataattaattgatacctatgaggatttggaggcttggcattttaatttgcagataataccctggtaattctcatgaaaaatagacttggataacttttgataaaagactaattccaaaatggccactttgttcctgtctttaatatctaaatacttactgaggtcctccatcttctatattatgaattttcatttattaagcaaatgtcatattaccttgaaattcagaagagaagaaacatatactgtgtccagagtataatgaacctgcagagttgtgcttcttactgctaattctgggagctttcacagtactgtcatcatttgtaaatggaaattctgcttttctgtttctgctccttctggagcagtgctactctgtaattttcctgaggcttatcacctcagtcatttcttttttaaatgtctgtgactggcagtgattctttttcttaaaaatctattaaatttgatgtcaaattagggagaaagatagttactcatcttgggctcttgtgccaatagcccttgtatgtatgtacttagagttttccaagtatgttctaagcacagaagtttctaaatggggccaaaattcagacttgagtatgttctttgaataccttaagaagttacnnnnnnnnnnnnnnnnnnnnnnnnnnnnnnnnnnnnnnnnnnnnnnnnnnnnnnnnnnnnnnnnnnnnnnnnnnnnnnnnnnnnnnnnnnnnnnnnnnnnnnnnnnnnnnnnnnnnnnnnnnnnnnnnnnnnnnnnnnnnnnntgtctccnnnnnnnnngttacacctaggtgtgaattttggcacaaaggagtgacaaacttatagttaaaagctgaataacttcagtgtggtataaaacgtggtttttaggctatgtttgtgattgctgaaaagaattctagtttacctcaaaatccttctctttccccaaattaagtgcctggccagctgtcataaattacatattccttttggtttttttaaaggttacatgttcaagagtgaaaataagatgttctgtctgaaggctaccatgccggatctgtaaatgaacctgttaaatgctgtatttgctccaacggcttactatagaatgttacttaatacaatatcatacttattacaatttttactataggagtgtaataggtaaaattaatctctattttagtgggcccatgtttagtctttcaccatcctttaaactgctgtgaatttttttgtcatgacttgaaagcaaggatagagaaacactttagagatatgtggggttttttaccattccagagcttgtgagcataatcatatttgctttatatttatagtcatgaactcctaagttggcagctacaaccaagaaccaaaaaatggtgcgttctgcttcttgtaattcatctctgctaataaattataagaagcaaggaaaattagggaaaatattttatttggatggtttctataaacaagggactataattcttgtacattatttttcatctttgctgtttctttgagcagtctaatgtgccacacaattatctaaggtatttgttttctataagaattgttttaaaagtattcttgttaccagagtagttgtattatatttcaaacgtaagatgatttttaaaagcctgagtactgacctaagatggaattgtatgaactctgctctggagggaggggaggatgtctgtggaagttgtaagacttttatttttttgtgccatcaaatataggtaaaaataattgtgcaattctgctgtttaaacagggaactattggcctccttggccctaaatggaagggcccgatattttaagttgattattttattgtaaattaatccacctagttctttttaatttgggtgaatgttttttcttgttaatgatgtttaaaaataaaactggaagttcttggctt

SEQ ID NO: 16752 - DNA, 930 bp, Homo Sapiens
gcacgaggattttgacttgctaaaattacattttttaaacggtagttttgaatgacattctaaatgtaatttagtttgactttgtgtttatatggccaatttggggtatggtcctgtatgttttttgtaatgtcataatgggagctgcagtgttgtgcaggtatcaaagagcttcccagttttcatgttagtaaacttggaaataattttctcatgcacctgatttttagcttcctattttaacaccgattattcttaaaccttatgggagtaaatacccatctgtcattaactaaaatgagtagttaggtttggaagtagacagtggcttaccaaattgagattggcaaacttgtgggaactctttgttttcctttcacatctgtgagttcaaatataatacaaattaatgtagaactagagtactaaagtgactttttttcagagcatgtatacactttattttatcattgttctcctctagatactttcagtttctgatggcatagctgaagtcatgttgtggctttattagtttcaggaacttggatgtctgttttaaaccttagctatcattttagtcatcccaggaagtttgacttgactattcttatttaaatatttttcaaactgttgcaacttaatactaggaaaaaggaaggactagctgagctgacggaagttaagcttgctttcttaaccgcaaggcttagagcctttattatgctaattggcattatgaattttttagggactccttaacacacagctatcccaaacctgttttttaggacacctaagtgttactaattcagaaatgctgttcagggtctagggatggttgacaaagtatagccatattttgtgtagcctgagaactaaaatgttctttacttttttaaatggtggaaaaatcaaagaattattttg

SEQ ID NO: 16753 - DNA, 1594 bp, Homo Sapiens
ttgcgtgcaattttgtattttcatagtcgtatctttttaaaggtatcatgatttcagttgtggtcaggaagtatgtgccttaaatcctctactctagacccaaagtttggagagctatattatttaataagttgtttgtgacagccttgttacctttttcatttgatttgagggagaaagactgtgatcctgacagattccttctcataaaatggcctaatgtgtatcagtctaggacttctggggagggaacctctaccatgcattctgtcccaggatgtcaaagtcataagaatcagggtcccctgaaataaaatcactgaaaagatatgttctgttatatattatttaaaaaatttatctggtgccaccaaagaatgacagcagtttctaaccaacttcatatttatagcatcttatgaagatattgtaaggcttagcatattttgccactggttttctttgtaatataggttgaaagtgagacatgtttgaatacttttgtatgtaaatatctcccattctttttctatctcttcttggtctatatttactaagaattgatacttaaaaaacagttcactaatgaactctacatattattgaacactcacagggcaatattgatttgggtgctactagacttttacctaacattagtctttctcaatagttgttgtaaaggatagtattcaatccagtaaatattaaagtgtattagtttaatgaaggttatttatatactgtcataccacaaacctatggtggaaagaacatctgcattcaccagaatgtacttgttcctttggctgtgaataaattggataagacttttttattgtaagttccagctgttggaagatacggggataagattgacattgctgttgcagtattgcaaaaacatgactaaattggttaattatgtctaccgcttatgtttaagagaatcctttcactaacttaaattgttaacattgttgtgatattgagaaagaatattaacctaaacagtcactttacaacaatcatgtaaagacgtgtgcctgcagttgaggttttttgcatttctgagcctgctttgtattcatgagaaacaaaaacataatgggagaaaagttttagataagcagcattgtaagtttttgtaaagtttgggatgtcaaagtattaacgaagggtactgaaaacatacttttacttgggtcaaattactttttatgatctgatttcttaattttctgtatttgaaatcttgcaaattaggaatatctacatctatagataaataagtaaaacttaatggtagaaataagtgtaattcagcaacatgattcaacaatttttatatttaggataagttattgtttattatattaatatcaaatttatatattgccttgtaatgctaaatgctcttaaaagaatatatgggctacttcaattctaccaccttcttccccctcccccaggacgtacaaaagatcttatattaaccaatcctctgtgaattttgccatatcaaacattgtgccttattttaataaaactgttttgttggaatccagttctatattaaagtctctataatgtt

SEQ ID NO: 16754 - DNA, 893 bp, Homo Sapiens
gcaggaattcggcacgaggccctgagccccagagcccagagctgccccctgccctccccagcttctgccctgaggcggccccagcccgttcttctgggtctcctgagccctcgcccgccattgccaaagccaaggagtttgtggctgacatcttccgccgggccaaagaggccaagggcggggtccctgaggaagcccggcctgccctgtgcccaggaccctctggcagccgctgccgtgcgcactctgagcccctagccctgtgtggagagacggcaccccgggacagcccccctgcctcggaggcacctgcctccgagcctggctatgtcaactacaccaagctgtactatgtgctggagtccggagaggggacggagccggaggatgagttggaggacgacaagatctccctgcccttcgtggtgactgatcttcgtggccgcaacctgcggcccatgcgggagcggactgctgtccagggccagtacctgacagtggagcagctcacactagacttcgaatatgttatcaatgaggtcatccgccacgacgctacctggggccatcagttctgttctttcagcgactatgacatcgtcattctggaggtctgcccagaaaccaaccaggtcctcatcaacattggcctgctgctcctggccttcccgtcccccactgaggagggccagctccgaccaaagacctatcacaccagcctcaaggtggcatgggacctcaacacagggatcttcgagacagtcagtgtagcgacctgactgaggtcaaagggcagaccagcggcagtgtctggagctcctaccgcaagagctgcgtggacatggtcatgaagtggctggtgccggagagcagccgccgctacgtcaacagga

SEQ ID NO: 16755 - DNA, 645 bp, Homo Sapiens
tgcatgagccctcatgccaaattttgtgtcctttgaccaacatctcccttatctcccaatccccatgctatcttaattactatatctttatagtaaatcttgaagttcagtagtatcagtcctccaactttgtttttattcttaagtattgtgttgattattctgggtcttttttgtttctatataaactttaacatcagtttgtagatgtccacaaaataacttgctgagattctcattgggattgtgttgaatctatggatcaacttgggaagaattgacgttttaacaatagagtcttcctattcattaccatggaaactattcccatttatttagatcatctttgattcctttcaacagaattttatacttttcctcatatagaccctgtgtatattttctcagatttatacatgttttttgggggggtcagggggagggaacctaatgtaaatggtattgtttttaattttacatttcagttgttcattgctggtctgtaggaaagcagttgacttttgtatatttacattgtattctgcaacctcattataatcatttattagttccaacagttgttttttttctttcgattgagtctttgaaactttttatatagaaaatcgtcttccacaaataaag

SEQ ID NO: 16756 - DNA, 1079 bp, Homo Sapiens
  misc_feature (870)..(892): n is a, c, g, or t
ccacgcgtccgggagactttttattagtcctgctaatgaaaaaaccctattatctgaagatatgagaaaagaacttcagcgccagcaatgggaggaagaagaaagagaggccctgaagaggcccatggggcccgtacattatgaagacattcgggaaaatgaggcccggcaacttggtgttgggtattttgcctttgcccgagacaaagagttgagaaacaagcagatgaaaaccttagagatgctgcgtgaacaggcacagataaatcccaagtgactgtgaggaaagatgtgagcgcttggtttcttgctggaccatactgcagaaaaatctagtaaattagttagaaattaaaattgatattcagaattgcataaaggtagttgccatactatttttgtgtttcaaattttataactgctcacaagtaacctgtgtaactttgatgttttaaatctggtcccaaatgtggtacttttggggtggcttggatgggaaaatagaaagttacttaaaggattaaggtgtaggacggaatgggttggttttcttgagtgttaaggcttgcaagatgctctgtgaactcttatgaaactttgtaagacatcagagggttcataggagagtacttcatagggcttcattgtgaggatctcaaggacagcttcttagaggtggcctgaagatcaattaactagtctatttttagaagaaaatttcatctttttggacaggaatattgcaaatttggcttcaagcaaataattttctgattttctgttcagacaacagatcagagaacaaaacgagaaaacataaaggaaaagcgaaagggctatcttagaggcaagacttgccaaacttcgacnnnnnnnnnnnnnnnnnnnnnnngaaggtggaacagaagaagaaaatagagatggagatgttattgggcctttgccaccggagccagaggctgtgccaaccccacgtcctgctgcccaagtagcaaagtaaaagtcattgtccagagaggaaggacccaagcctggagtgccacacatcccggagtgggaccgcggaaaagattttcctt

SEQ ID NO: 16757 - DNA, 870 bp, Homo Sapiens
gcacgaggcccaagcctggaagaactcgtcatgctctttgtagcgtggtgcttctgttgctcacaggacaacttgcctttgatgattttcaagagagttgtgctatgatgtggcaaaagtatgcaggaagcaggcggtcaatgcctctgggagcaaggatccttttccacggtgtgttctatgccgggggctttgccattgtgtattacctcattcaaaagtttcattccagggctttatattacaagttggcagtggagcagctgcagagccatcccgaggcacaggaagctctgggccctcctctcaacatccattatctcaagctcatcgacagggaaaacttcgtggacattgttgatgccaagttgaagattcctgtctctggatccaaatcagagggccttctctacgtccactcatccagaggtggcccctttcagaggtggcaccttgacgaggtctttttagagctcaaggatggtcagcagattcctgtgttcaagctcagtggggaaaacggtgatgaagtgaaaaaggagtagagacgacccagaagacccagcttgcttctagtccatccttccctcatctctaccatatggccactggggtggtggcccatctcagtgacagacactcctgcaacccagttttccagccaccagtgggatgatggtatgtgccagcacatggtaattttggtgtaattctaacttgggcacaacgaatgctatttgtcatttttaaactgaatccgaaagaaactcctattataaatttaagataatgtaatgtatttgaaagtgctttgtataaaaaagcacatgataaaaggaatcagaattaataaaatgtttgttgatcttt

SEQ ID NO: 16758 - DNA, 709 bp, Homo Sapiens
gcacgagggtgtggttccatttaatagcggacaccaccccaatctcatgttttcctgttaccctaaaacagtggaaggaaactgggtgtttggtagacttctaaatcatggtctctgacaatttgaatctgagattctcacctccatttactaaagaatcgtgacttaattcaaattgcacagtaatcagtaaagtgaatacgtttttaaaatggaattttctcccttcagcaagcactcattaaggagtgaggctgagtattttaagatagagtgagatctgtgagtgattgaaaggtgatatttaaaaacttggatttcattccagtgtcaggtttgggttttaagttcctttggtccagggaagggtccaagcagccacagttgccctaaatctccatcattaagtcttccagcaaggttaagtgcagtatggaaggagaagggggaagaggacggtaacggccccacactccaggctgagaaagagtaattaggaggcctgaggaggggccgaggaaaggctgttggggtgtgctggggttggtacccgagcgccttcccctcacctcaaccagagaagagcatccggttgctttttaaagcttttagcctgccctagcaaggacaaagcatgttagattagagatgcttctgctgatcgcaggggttcttatttgaaaacatctatgatgggggtggggtggga

SEQ ID NO: 16759 - DNA, 1000 bp, Homo Sapiens
aggtccggctggggaacgaaagtgaaccggagcccctcttaggcgacccacctggaagccgagaatgggatattttagagactgaagaggattataagagccgatggagatttattaggattttatattttattatgtttcttagcagtgtagggttttctgtagtgatgatgtccctatgggcctatttgccaaagattgatccgacaggtgatacaagttttttggggtgggttattgcttcatatagtcttggccaatggtagcttcacctatatttggtttatggtctaattatagaccaagaaaagagcctcttattgtctccatcttgatttccgtggcagccaactgcctctatgcatatctccacatcccagcttctcataataaatactacatgctggttgctcgtggattgttgggaattggagcaggaaatgtagcagttgttagatcatatactgctggtgctacttcccttcaggaaagaacaagttccatggcaaacataagcatgtgtcaagcattaggttttattctaggtcctgtttttcagacttgttttacattccttggagaaaaaggtgtgacatgggatgtgattaaactgcagataaacatgtatacaacaccagttttacttagcgccttcctgggaattttaaatattattctgatccttgccatactaagagaacatcgtgtggatgactcaggaagacagtgtaaaagtattaattttgaagaagcaagtacagatgaagctcaggttccccaaggaaatattgaccaggttgctgttgtggccatcaatgttctgttttttgtgactctatttatctttgccctttttgaaaccatcattactccattaacaatggatatgtatgcctggactcaagaacaagctgtgttatataatggcataatacttgctgctcttggggttgaaaccgttgttattttcttaaggagttaagtttgctttccaaaaaga

SEQ ID NO: 16760 - DNA, 1870 bp, Homo Sapiens
  misc_feature (935)..(966): n is a, c, g, or t
  misc_feature (1330)..(1345): n is a, c, g, or t
atcccccgggctgcaggccggtgggagctaggcgccaggctcggagtgcggccagcgggcggaggcggtctcgcatcggcggcgacggagggctcaggcgtcgtcgtttgggtggggggccgctgaactgacaagcgacatttcagctcctttcacccgccggaaccccggagccggggcccgctcagccggcgttaccatgaccaaggccggtagcaagggcgggaacctccgcgacaagctggacggcaacgaactggacctgagcctcagcgacctgaatgaggtcccggtgaaggagctggctgcccttccaaaggccaccatcctggatctgtcttgtaataaactgactactctaccgtcggatttctgtggcctcacacacctggtgaagctagacctgagtaagaacaagctgcagcagctgccagcagactttggccgtctggtcaacctccagcacctggatctcctcaacaacaagctggtcaccttgcctgtcagctttgctcagctcaagaacctgaagtggttggacctgaaggataaccccctggatcctgtcctggccaaggtggcaggtgactgcttggatgagaagcagtgtaagcagtgtgcaaacaaggtgttacagcacatgaaggccgtgcaggcagatcaggagcgggagaggcagcggcggctggaagtagaacgtgaggcagagaagaagcgtgaggctaagcagcgagctaaggaagctcaggagcgggaactgcggaagcgggagaaggcggaagagaaggagcgccggagaaaggagtatgatgccctcaaagcagccaagcgggagcaggagaagaaacctaagaaggaagcaaatcaggccccgaaatctaagtctggctcccgtccccgcaagccaccaccccggaagcacactcgttcctggnnnnnnnnnnnnnnnnnnnnnnnnnnnnnnnnatttggtgtggcgggagggctggttgcttgtcgggtgacagagctgcagcagcagcccctctgcaccagcgtgaacaccatctatgacaatgcggtccagggtctacgccgccatgagatcctccagtgggtcctccagaccgactctcagcagtgagcttgtccccagcacctgctgcctcccagccttggagtttggattcctatggaattgggttctgctggacacaacctctttttagcatcagacctacctgccatcatcaaatggctgcagattggtacatgagacctcctctttgtaggacttcttcattccttagtcagggttccctgaaggaatgaggagaaatgggaggtggcnnnnnnnnnnnnnnnncagttacctgcatgcctaaaggagtaggcttgggggtggggagagagaaaacatagccttttctagttgttatataaagctgtgtaaaggcaaggctcgtttctactaaatggtcagctgtcactacatttatacttttgtatgccacaaaccctttcattcctccctgggaatcagggtagatcaggaggaactgggggggactagaacaccacgctcagtaaatccagtctaaactgggaggtaggggtattcctgttttctttaggacctcagagatgtaagcattttagcagccacacaaaatctctggctatgaaagggacttcatgaccatccagtccaatataacacttgcagacagagaaactgaggtcttccatgacttgcctagtctcccagctagtttgaggcaaaactggattcccactctggtattctttcttccttttacatcattttccctcctttaaaatgtcctgagagaccagaactcacactagaatcgattattcctcaggtgaa

SEQ ID NO: 16761 - DNA, 1010 bp, Homo Sapiens
aaaaaggaacccatgagcaggccagctttcagtctggagccgagtgccttctgtgcatttggatgtttccatttccttccctgagaagattttcttaggctacctagtgagagaacattgaaaatatttttaaaggacatctaagcattgttttggtcatgcatatgctttataattgtgtgttgtttcatagcatatacctctggtacaggtgggcaagtttttctttgaagaaatgggttattgactcatatgtcataaccttgagtgttactctcccggtgtccggaggtcacattcatgttgcggggttggtatgaaattaaatcttggtgatgtgaccctacattctcttctggtccctagaatcggcttctggtctcctgataactgaagtggagacagaagttgagcctgttgcccaggcaaactaaagctgcttttgttcttcggaatctgctttgcctccgtcagcctgcttccttccccacacatgctggccgcactgtccccactccagacctctgctgtgtgtcctgggcagggccgcgttttggcagtaccctttcaactcatcctaagcttcgtgtagattactttagtatatattttttataaaacataaagcctttcctctcgatggaaatcaaagcttaccatgtgagcactcgaacttctaagttgtgacaggaataacaaaactgcaaggagtggaaaagatggaaaagcctgtgggaaatccgaggccttttgaaagaagggagctgatgacttcacgaccagctcctggagcccctcctttctgctgaagccgcggcatttccctccgtggccacacgagggcacccttggcccttttatcaaagcgccttcacttccccgtgggaatggagacaagtctgtccacggtgttttcttgaaatacccagttgctacccagatttgtatttttatgtaaacaaatacattttcacagaaataaaatttgaaaaataaaagtagcctcgtgc

SEQ ID NO: 16762 - DNA, 291 bp, Homo Sapiens
gcggccgctctaaccactataaaggatcccccgggctgcaggaattcggcacgagggggaaaggaggagagataaggctcactagccacagaaaaacaggcagttaatttttaaaggactccagctctttctctttctcacggggaattggattttcttacatgcaactgaatttctgcttacacatttttaaatttcttttaattgcttttccaatgcaatagcatgaattattattctgttgacctatttgccttactatgagctgagggtagttcaatatgctcactc

SEQ ID NO: 16763 - DNA, 648 bp, Homo Sapiens
gcacgaggataaaaacatgctatttgaacaaactttttttataaagaataagttgattgaaaagcagttttaaataacatgaactcacaaatgacttttagaagccaaataaacatttccattttagagaacagtatgtaatacataacttaaaagcatatagaacacatattcatacattcttaaaaataagagattgttattccacagagaatttttcaaaaatctaaagtatgtcctgtttaaccaacaatttgcttccaaataggagtctcttttgagaagctaaatattaattttcaaacaactatttctccatttggtaactggaatcattcatattaaaacaaaggtctttatgtcaatgtatattaatatggctgaaggctccagccctgagttattttttttacttccttaaattcatatttacaacatatatcaatttgaggtatgatgacaaaaacagaaacaaaagacacaatggtagatgagaatctatctccttgtggaagaggcaaaattagtgtggacttcatttttctgacctataaaactaggaagtataatcacattatctgtgacaatttttccttctaaaatgccatgaatttgaagatagacttcatgcctttctccatcatatca

SEQ ID NO: 16764 - DNA, 805 bp, Homo Sapiens
gcacgaggtgggacccccagcacccagagcctaggcagccggaacttcatccgcaacagcaagaagatgcagagctggtacagtatgctgagccccacttataagcagcgtaatgaggacttccggaaactgttcagcaaactccccgaagcagaacgcctcattgtggattactcctgcgccctgcagcgtgagatcctgctccagggccgcctctacctctctgagaactggatctgcttctacagcaacatcttccgctgggagaccacgatctccatccagctgaaggaagtgacatgtctgaagaaggaaaagacggccaagctgatccccaacgccatccagatctgcacggagagcgagaaggtgacggaggacccggtgacgggaccacgcggtcccccgctcagcaggccgcctcccccaaacatgcaaagccccatttgttctgcaccctgagttctctccgagctgtccccttctctctgttctcccggcccaggcgcccatcacccctgacctgatccccgcaccagcctctcctctctttccctgcaacctgttacctcacacagctgctcaggaacagcagaaatagtaaaactcttccatgtatgtggcacctcagccgcccctcccttcgtaagtctccccgatgttgtgtcctgtccctgtcattgtggcctcatgtccgttggttgcaagatggctttctcaccagcggtccaacaagaagggggacaggtgtgggggacacttcccagcagacttctctttgtgttttgttggttaaaagtggatc

SEQ ID NO: 16765 - DNA, 896 bp, Homo Sapiens
gcacgaggctccagcctcccctctaaccttcccagcatctcaccccgtgggtgaacccaaaaaggcaaccaagcctgcttattcagcttaagaggtgggcagggtagggcccattcacagatgagcagcttgaagcccaagaggctgcacagctgttggggctctgagtgcagctgctctgcccccttggtcagcgcctgttgtcaggaaaagtaggaccagtggaactggcaggagcagaaagatgcaggtcttgggcctgactctggtttcacacctgggagaccttggttaagatcaaaggtggtcaccttccctgggaagggccagtgaatgaacatgtggcttcatgagccacacaagggttctgtttgcttctttgggttgttgtgagttttttaactgtttaaaattcagaagcccttcttgggcctccgagtagtttgcagacccctccagcactgacagtgctagcacctctccccgcccgcactgcctgcagttcatgggctctgccttgaagacttggaggccaaggggcaggtgtgcagagctgttggtcagcagaggtgttgggtgaggggtcaatgtgaggacagcaggcaagcaggcagagccactggctggaagggatctccttgcccatgtgacctgtctcccctgcctccttctaggtcccattctatgagtggctggaactcaagtctgaatggcagaaaggcgcctacctcaaggacaagatgcgcaaagcggtggctgaggagctggccaagtgacttgtgccagcagcatggactgcgtgcctctccgccggaggtctagctgtgggcggccaaaaagggtcacccttgaggacaaccctctgtgcaggacctgggccagagtggggagggtgg

SEQ ID NO: 16766 - DNA, 1097 bp, Homo Sapiens
gcacgaggaatgcattgtctttaaatagcagtttaaccatgttataatgtaggctttttgtcttgttccgggctggtatttgggtgccctgattgaattacttggatttaaacagcaaactgtgggctctcgacttacatagtaagggcctttactgtttctttgtaggaaatgggtttctcgcctttgaaacattttttccccttttgtagtgacagtgccactaaatagttcagcttttgtcagtcccccaggaaagtgctatcctatggcctaactagccaagccttttttctttcatttaaaagaaattagctttaatttttacctttaattacttattcaaataagacagatatatattttccttgcaataattaaaacattgcatataggccataaatttccttattttctctgaacgatcctgattccagtcatcttgttgaataccctagttctaataattgactcttgcttttctagagaaatatttccaaatgatgctagttttgtctcttcctttcaaagttgtataccacttctttttcttgtcattttgcattgcctgggacctccagaataatgtttcatgaagtagcatgtatccatatctggttcttgactttttcatcattataattgttttctatgggttacttatcagtttaagaatgcttaattcctagatgaactaagagtgtttattacatgttgagatttatggtatgctttttcttcctcaagataatgcattttttgtattatctgttaatgtgataggttatccatttgtgtattttcaatcattgaacaacccttgatttttttggataaactctatttggtcattatgcatcattctataaaccctgctgaatttttcatttgccaacatcttatttcagattcttttaatctgtgtccaacaatgagatttgttttcttttgcaatttgttttgaatttttggtatcagagctatactaaccttataatggaaaatacatatttctcaaacttttacactgatatattcatagtatttttttataatttgaaaaatcttgtcagaatctgtattaaggcctccatttc

SEQ ID NO: 16767 - DNA, 924 bp, Homo Sapiens
gatgctgcgtccagcgttaccgtggctgtaccttggcctctgcagcctcctggtgggggaggcagaggccccgagccccgtggatccgctggagcggagccggccgtacgcggtgctgcgagggcagaacctggatcaaactcttcattgaagtactcatcaggcgtgatggctgtggggttgtttgcagtagcacattccgtggtgaggtcctgctgagccagaactcaggagagtcagaaatgccaaatgatgttcacaagtgaaggcctgtggcactcagtgtctgaggtggacgtgttaaccagctaaagaccgggaagttctattcactaacttttttgcatggaacaagaaaatctatgaggatatcaccaaactacacaggaagtgtaatggatttcttcattttaaaatatttctctactctcctttacatttttatctcctgattataacaaagaaaaaaagaaagaaatatctgaaagtgcatgagacttggaagacttggagttgaagttctagctgtttccctgtctagctttgatagtggaaaggtaatttcatttttctgacccgcagggacatccactgtaccaagttcatatagttactgtgagcatcaagtaagaaaatatttgttaaggtgctctgttgcaatataaagtcctgaatcctttttaagttccatttctataaagaggcccctcgtttataatggataagagggaaagcacctgatttctataatcactacccctcctctaaaatccttatttattttcaaagagtcactcatctaattctcttccaaaagagtatctcaattccagcttgggggtatctttggcctttacatagagtgggctgttcaggatccagtaaatgccatcccagacacagacaagttgtttcctttcatct

SEQ ID NO: 16768 - DNA, 117 bp, Homo Sapiens
ctttttaaaaggactggaggaaagtagtgtaggctatttttttgcccttgtgccttccaccatgtgaagatatagcattagcccctcctgccatgtaaagactcaggaagaaggccc

SEQ ID NO: 16769 - DNA, 988 bp, Homo Sapiens
  misc_feature (815)..(842): n is a, c, g, or t
gcacgagggcaccatgcacctgcaccacggctcctagagacgctgacctggctctcggaaacgcaggagtccttcctggtagccagctcagaatacccatgtagcagcaacttgaacgaatgtcacaacttgtacgttttttatatacttcaactttctgaaaaagtaaacttcgacaagttcccagcaactgcttgtttgtgcatgagtagggcttactaagtgcatagatgtttctacagtgaggtgtcctttttataaggtgcacttttggagtttttctgatgccaatctcaacattgtctttttaatactgtcaccagatattgccatttttctttttgttaaaagattatatgatcaagataaattggggtggtaaatcaggtgcctggtaatttatctctttgcacatgggcatcattttaaaaagcttgcttccactcttttctgtagaatttgacggaacacagctatttccctatgcaaggtacagccttacaaagatttctgcagtgatttgtgtgaagaagagaacgtttgtctttttcaatgaagctttgcagatcaccatgtggttgaaggttttagttgtggacacagtggtccctccttaatgatgaagatcactgccttgggcttcatggaaaacaggcccagcctggggctgcgtttggatttattgtttttattccacacttcctacttggtctctggaagttttaccacatgtaacagattcctttatatgtagtgaaaatcactatttgtagaaactgtcaggtcaaaatatttaactgactgttgacatgtannnnnnnnnnnnnnnnnnnnnnnnnnnnggggtttctgctttagatatataccactatgtatatccagttacctgagagaatttgactctcttaataaacctgcattaagtttgattttgtaaaattaccttttgtctaggcaactagtggttatactctgcaatattggtatg

SEQ ID NO: 16770 - DNA, 1365 bp, Homo Sapiens
  misc_feature (248)..(272): n is a, c, g, or t
cttcacagtgccttcccagaccttccaccttaggttctgctgcaaaaagcaccaggtaagcacaacctaaggacatatataaataaatatttcaatacattaatgttgtccctgtgaggtttttgtggttgtgtattcaaaggcaatctgctactgcttccccaaaatgtattttgttattttatgctaccatcttagtggaaagtctgtaagttgttaaagcaactgtttacatttctgggtaatgnnnnnnnnnnnnnnnnnnnnnnnnnattaagacaagaaaatgatgagtagattgctgcagtaattgaactacatccaaatctttttgtattttttccccaaatatagaagtgttaatattaagaaaggacaattacacagttttcaagatttaggaaatcacttgtttagaaacttcaacagccttcacaatctgttttatatgatggacagaaaatttctttgccctccaaaattataatttctttatttttttcttattcttaaactataataattcagtaaggatattatgggttagaattttattatgatttttttcttagacaaaagttatatgctgaagaaggaaaaagttataaggcagtatgttttgataaaaggcatgtgcatcagtgaaatgttaactgtatagcaaataacctttcataatctgtagcaatcagtatttttctgatttaataatattttaataactgacgctgcatttaatttttttgccagtttaaaatgtttgtgtgtttttatagatgattttaactggtacatattttgagttaagttgaatgtatgaaagcagcatcttatcagttttgtttattcgatttctaaaatgtgctgatccttttaaaactcctgcttatctctgcaacaaagaaaaatattcaaaaatactgccttcattttcacacacagtgctgaagatgctgcaagcaccaaatcatagctcataaaatcaggtcctgagatagttacccataaagaggaatcctttgagtgtatgccattggtgagccgatgagcatggaccatagaagggctcaatgtagaaggtaaaattggcaaatcataattgagaaatatgaaatgtattcccatacataatatggtatagggtgtaatgtacctgcttttgatcacttttcattttaaagtgctattcacttgatcttaaatgttccatgaactgttaaatttcttaagttacatagttactacaccacatttatgtgtatgttatgtttaatagtcaatgataggtatgtacaattgataatataaaggggctcattgaaacttgagagcctgttgagtttggtagtgtagattgcattttat

SEQ ID NO: 16771 - DNA, 1002 bp, Homo Sapiens
gcacgaggcccgacaacccttcctctgccctggggcttgcacgtctgcagagcagggagcacaaacctgctctctcagcagccacttggcaagggctggttgtggatcccagccctcaccctctcctggcctttcctctgctctcctctgctcaagtccacttctaacctggtcttcggagctgggttggccccttctttgggctcaggaagcagccttagcacacgggcctctcctccctcactactgggtgctgccctgcgtggctgaccagctggcccaggatttcacagtcgaaaaggaagccaccactgatgcctcccactgtgacaggccctgtcaccaccaatatcttatttcaacctcacagttgacctgagaaatcgagattatcactccactttttcagacaaggaaactgaggctcagggaagccaagtgacaagtccaaggtcacgaagactttcttggagcccgaaacaccaccctctgctcctccttctcctgtcctggcccaggcatcctaggggctgaaatcctggaaaccgtgggctggtgtgagaaggtttgcatgctcagagcagagaagggctctccccactgcttcgtgattccagggccagagccatgcagtcccagaaaccccaacctagctggggcaggtccagagtccaagccctggtgggtagaggccaagcagaagcctgaagtggactcttgcttcccctagtagtgttttcagtgccaagaagctgaaactgtgagctggagttggggagaggtctggaagaggaccatctgggatttctacagcctgggtacccatagccacaccaaggcttctgggagattctgcagggtcagctttccaggctgttcccaaatagctctctgcctctccactgcctctaaagccacagcagaagagccattcatctcataaacaaaaaggaagaggaaagaatgaggaaggactctgtgcaaggttatttgcaggcaggg

SEQ ID NO: 16772 - DNA, 1051 bp, Homo Sapiens
gcacgaggcactgagtgaagagtggagataaaaatagaatttagattttcctttactttttaaataggttgttgcctcttatatatttattctatgatgcaaatgtcactatcctaattcctcagtttatgtttaacagcacacagtggcacttctatgattcaaatacatttgataccctttgaaatcaatcagaatactgcaaaattaatttttctaaaacaatgcttttatcgttatttctcctgttgaatcatcagtacaatttccaaatgaaaacacttaaaataatctcatattacaatctttctctaacagaaccatgatgtaaggacagtgataacaaatatctgacaatgatatgattatttcctcatccatggaaattttccttaataaactaaagggctattttctaaaaagccaaagcattgcttacaagaacttttcatcatgacatggatagacactcagattcatacattcaaagggaagtgtcatgtattccctttcaatccaccctattctattgtgttatcttcctaaattattttctatctacattcttcattctctttcccattgaccctatgttctgtgtgataaaaattgcgtcattggaggctttttaaggttaagtattatgccccatttcaccattaatcaacatacaacccttctccatattttgtaattcctttcatatacagaaaaaaagatactataatttcttcaaaatgcttgatattaatgatatatgggaaaacaattattttgtgcagcaatcttcagataactgggaaaggccggggaaaaagagagatactggtggttatcaatgacccatgtataaattgtttttattatgtaagctgtcttcacaaatgtcttcttatgtatgatcattagaactgttttatatatatatgtaaaatttccacattatcgagacattactttcagcagtgaagtaatccttttttaactgccacttaatgaattcaataaaatataatttattgtattttgctataataaactattgatgact

SEQ ID NO: 16773 - DNA, 1049 bp, Homo Sapiens
atattaaaatttttaaaagtgtataaactgtaaagtatattttactggtgttttcttccttattcctacttgtcagatgcaaatacacatttttgtgtgtttgtgtttagtaattataagtatacatatttcattcttctatttcatatatttctatgacattatatcttagatgtgtaatttatgaactactactggattattttaatccattagaaattactattcacgcattctgtattcaattcatgtgatagctaatatatttggttttaaatgcatcttattttgtggttttcttctaggctgttttttgtgctttcttttaaaaatatataggttttaataatcttaattttcttttagtttgaaatgtatatactcattttattcattagtctaagataagaattgtaacacttctctaacctattatagaattgttaatacctttacccttctcttgaacacatcaaaggatgtcattgagtgttggtattggagtatagcatatctattattctgctcaattagaagatattgttcatgttgtatagagataataagtaattgtattgatctgcagatgcatccatctcttggattctcattccttctaccactgcagaactttcacctgtaatcactttcctttggccttaaggataacttttagggttacttttctactaaatttccaatttttgaccagatataatcttatattgtgctcttcctgaaaaatactattgttgtggatagaaatctgggttggtagttatttcttcagcaatttgaccatgtcattccactgtgtccctggcctcctgtatactggatgtgaatggatacaattatatattgtgtttatagttttcctgtgctataggaacagtattcgaatctgatgcaaaggacaacacaccctagagattgtaacagtgagatgaaccaagtgattggatggggttttgagttgctggaataatggagttacagtgtacaatgcataagcaacataataaattatatatctggtgaacaaatgg

SEQ ID NO: 16774 - DNA, 1087 bp, Homo Sapiens
  misc_feature (697)..(705): n is a, c, g, or t
gcctagggattagccacaaggacatggacttggaggcaaattctgcaggtgtatgtgattctcaggcctagagagctaagacacaaagacctccacatctgtcgctgagagtcaagaacctgaacagagtttccatgaaggttctccaagcactagaagggagagtgtctaaacaatggttgaaaagcaaaggaaatataaaacagacacctctttccatttcctaaggtttctctctttattaagggtggactagtaataaaatataatattcttgctgcttatgcagctgacattgttgccctccctaaagcaaccaagtagcctttatttcccacagtgaaagaaaacgctggcctatcagttacattacaaaaggcagatttcaagaggattgagtaagtagttggatggctttcataaaaacaagaattcaagaagaggattcatgctttaagaaacatttgttatacattcctcacaaattatacctgggataaaaactatgtagcaggcagtgtgttttccttccatgtctctctgcactacctgcagtgtgtcctctgaggctgcaagtctgtcctatctgaattcccagcagaagcactaagaagctccaacctatcacctagcagataaaactatggggaaaacttaaatctgtgcatacatttctggatgcatttacttatctttnnnnnnnnnggaatcctatgacctgatttggccacaaaaataatcttgctgtacaatacaatctcttggaaattaagagatcctatggatttgatgactggtattagaggtgacaatgtaaccgattaacaacagacagcaataacttcgttttagaaacattcaagcaatagctttatagcttcaacatatggtacgttttaaccttgaaagttttgcaatgatgaaagcagtatttgtacaaatgaaaagcagaattctcttttatatggtttatactgttgatcagaaatgttgattgtgcattgagtattaaaaaattagatgtatattattcattgttctttactcatgagtaccttataataataataataatgtattctttgtt

SEQ ID NO: 16775 - DNA, 862 bp, Homo Sapiens
gcacgagggtctgcttttttacaggtttatttcacagagcagtgtacattcttgtcttccaggggaacttcaacatggagttacttttgatccctcagttttaattcagtgtctaaaggtttacaagttcaacttactctattttattcagctctttcacttactctgccatcacttcctacttgaatctgagttttagctactgtagaggtctcagacctttcctttttagtactattagccaggtaaaactttggttcttgtgagtggtagggatgagtttttaggacagtattcaaagcctttttaaaggaaccaactactcaaatgctctacaatgccaaaaatacaatactcctgcaggttttcccaagcaaggccaaaacaatcaaaatctgacagaaaaacacagctgttcagctctggaatctgatgataggctactttttaatgtcaggacatccttctaaacttccacttacagtgtcacatgtaagcatgaaggctggctcgttggtgagccattgctttgtttttaggaagacagttatgaatgccatggacaatctcagtacatgttgtttgttatgattttattcacgctaaaggaatgggtattaaaattaagtgcatataatatagaattcagtttcaagtctgaagttagcgtaaatttatattcttcagactaacataaaacatgattttgagaagttaaataggaagatgccttttttataagtttagcatatttattttatctccccaaatcttgcttaaaatcaaatgtatataagagaagttagttacagagctaaattgattaacctacttcttaatgaagattggctatggatttgtt

SEQ ID NO: 16776 - DNA, 857 bp, Homo Sapiens
aacagaagggtatcagagtggaggacctagattacgctacctgtgtttgaaaatattgcgctttgcctaaccttcggtggaatgtattgtttcagcatattctatgtataaaaaagtttaaagatgtcttcaaagaagactagagtctttaagtcacttatagctatattttactacaaaatttgtgtataaagatatatttaagtgttttagataaatttaagttactccatatgaaatgtttaatttcagctactgtgaattctttcgatcagtcctttgcttttttaaaaaatcttttccatcgtgttaaaaagaaaattagctattaggagatattaaaagattgatgtcttagaaggacagggttaaaaccttctgtaatatatttaaatatatatttttaagagagatgctacattgccaatgattttataaataatttaaaattaatttacaaatttatagatgcaaaccaaaagatctttttaaaagagagagagaggaaaaaaatcaccttttatttgtttgggtctcattgtcagaattattattcagatcaagaaatctgtgtcgataaaacctaatctcatattggagagtgaatgtcgttaagtatttctgaaatgtttctaaaaatgaacatgaaaaaataaggtattttctccctagcttctcatttacagtatttctaattgcttcacactttacagttttaatacaaagtacaagctctacttttataacgtgtactacaagtttctttaaaagaatgttgtattttcagctgacctcttgtatcttgcattctttgttattttctgcaggctacccccttaattttgataggccatttt

SEQ ID NO: 16777 - DNA, 415 bp, Homo Sapiens
  misc_feature (43)..(59): n is a, c, g, or t
  misc_feature (86)..(97): n is a, c, g, or t
ccccgggctgcaggaattcggcacgaggcaagactccatctcnnnnnnnnnnnnnnnnntgctttgctacataatgaggccaggcnnnnnnnnnnnngtcctgtggaaatcatatagacaaacatttgcaaagctgctactgccattgtaccagtgttaaactgtgttctaccttgcatcttttactgatttttatgacagattttatattgtaaccattcgagaactctgtaagtgctatggcttccttaaactacgatttatcatatgctcccagtgtttactttgagactgaatggcaaccagagaatgtaaacaaccaaggtgcatctggttatgttttaaaataaagattaataaaagttttggtttttctctttctaaccttctttttaaactagaaatataataccta

SEQ ID NO: 16778 - DNA, 1166 bp, Homo Sapiens
gcacgaggtttggcatttccagtaatagtttattgatttccaaatgcacaggggcaccaagtccgaacatcctgggatagcagtaaatctctcttacaaaataatttacagtatgaaaatgatatactgaaacattaacccaaacgtgtaattcccttgaaagattcagtgttcccttgtttaatgtaaagggtggaaggggaagattcctaaggagggaatgtgactgtgcacaggaaaataggcagaggacaatggattcattggttctccccattcatgcagtgtggcctgtcactgtagaaagactggtcaggtttaaccctcattaagtattaatctgctgtcccctcaaagtcatatcaagcccagtatgggctccgtggctttttttgcaccaatgtatccataagtgtctccacttattttcatttttctgctctggccctcgttctgctgtttctggtatgttctcagttccaaattatactatcttatcttaccaggcaggcctccagaatcaagaactgcctgagtcttatggtttctggaatgggacagggtagggggcttcataagcactgctggataaaggcaataataatgagactgaagtctcccatatgggccttctttttctcttagagctgggctggactcaatccataatgagatttttttaaacataaaaatctgatgtgatcagcacacagtaaacatgcagttaattttcttattgagaagcatgtattgcacagccattatatgaatgtggaatttcaggaatggcaagagaatattttctacttggggagagaggacttcctagaccctgccacaactacaaggtcatgaattctgcatttgtgcccttaggtctaactggagtagttagactctcaggtcaccaaaatggctgggcatccaagtttcccatcttattagacatcctggaggagggctggagtgcaatttccttcagggctgtcactttgactcagtgccttaggagctaatgacctttgctagggaattgctcttcctgtaagcaagtacctaagccccaactatatggtgacacttgtaattagggctgacagaaatctttgaagtagtacgcaagataatgaaggggctgctttgagttttccttagctctcaaatat

SEQ ID NO: 16779 - DNA, 928 bp, Homo Sapiens
  misc_feature (129)..(183): n is a, c, g, or t
ccccgggctgcaggaattcggcacgaggggttcttgttcttagaatacagcatgaagaatttgctttcttctttcttcctaacattttcatgtgagatccagaaaggacacattgtctctggccattcnnnnnnnnnnnnnnnnnnnnnnnnnnnnnnnnnnnnnnnnnnnnnnnnnnnnnnngctgaaatgggttcgctgggttctaaaaatccgcaaaccaaacaagcccaagttcttcttttgggacttgactcagctgggaagtctactctcctttataaattaaagcttgctaaggatattaccaccatccctacaataggtttcaatgtggaaatgatcgagttggaaaggaatctttcactcacagtctgggatgttggaggacaggaaaaaatgagaactgtttggggctgttactgtgagaacaccgatgggctggtgtatgttgtggacagtacagacaaacagcgactggaagagtctcagagacagtttgagcacattttgaagaatgaacacattaaaaatgtgcctgttgttctattagccaacaaacaagacatgcctggagctctgactgctgaggacatcaccagaatgttcaaagtgaagaagctttgcagtgaccggaactggtatgtgcaaccctgctgtgccctcacagggggaggggctggcccaggggttcaggaaattaactggatttgtgaagagccacatgaaatcaagaggagacactttggcgttcttcaagcagaactgatgctgcgaaaaatccaagtctctacagagacactgatgaaagttgaaaggttattgtttttccatgccaatgaggaattcaaattaatgagttgacaaacttttctgagatgttatttcatctacttttagttaaacaactaaaatgatatctaaaaaa

SEQ ID NO: 16780 - DNA, 786 bp, Homo Sapiens
  misc_feature (134)..(417): n is a, c, g, or t
gatggcagctatataaatgataaaattaattacattctctttcacatgcatgaggtgcaaactctgtcacaaagtattttaattaccttttaccttgtttcatagatctttatgtgacataaaaacagtttctnnnnnnnnnnnnnnnnnnnnnnnnnnnnnnnnnnnnnnnnnnnnnnnnnnnnnnnnnnnnnnnnnnnnnnnnnnnnnnnnnnnnnnnnnnnnnnnnnnnnnnnnnnnnnnnnnnnnnnnnnnnnnnnnnnnnnnnnnnnnnnnnnnnnnnnnnnnnnnnnnnnnnnnnnnnnnnnnnnnnnnnnnnnnnnnnnnnnnnnnnnnnnnnnnnnnnnnnnnnnnnnnnnnnnnnnnnnnnnnnnnnnnnnnnnnnnnnnnnnnnnnnnnnnnnnnnnnnnnnnnnnngtttctggcacctgaacaggaactggtttccatcatcaactcagaaagcactaaaatctaggtggtgattcagggaggagcaggggaagacagcctcctatggtggcatgaataagatgcttccagaactagtagggaaataactaacctcttcaggctttatcaagcctggaggggaacttgctcatgttagcaagaaaagtatcctagagaagccacttcaaaggctccctaatccagcctgtctccacatacatactgaaaattcttccctactctgaggcaggttgtagtgggttaggggtttctccagactggaatcctacctatctgtaccgacaattgagcaaacacagttgaaaagagtcc

SEQ ID NO: 16781 - DNA, 1375 bp, Homo Sapiens
ccccgggctgcaggaattcggcacgagggcccatcaaagcacacaactttattgatgatacacacagatgcggacttgggtggaagaggttaagtcggtacaatagacagaagagcagtgcacttttttgatgaataggttcactatccatcaggcgcgtgtagaagaaagagcaaacgaaaaataattcaacctaagctgcaacaaatgcattttcagctcaagccgcgatatgcctctggtctctgcaaagcggtcccgcttggacagggagaccaccacaggcaacaatagcactcgtgatgctgtaatttgatgttctttgtccacagcaggcagctgaagtgatcccctcaccacatgaaggaggctgcaagggaggaatttacaatgccaacattgcctgcagactgcacaaccaagaagttactcaaagctctgtgggagcccctgcctggccaataagagtgtggtcctggattgagccctggaactttcacccaatgaggtggtgattggctaaggctggatcttcagtagcaccctctgcagattctttgacatctgcaaaccaagcgcgttgtgggtggattccgtcccattgtgttcgagagggccgtttatggggcaggggtttccaggagaatctctctgtttccatttctgataaagagggacatgaatgagaagagcatctgggcaccgactaactcccccgccaagactggcttttcagacaaacccatcagcggtttcaaaacctgaaccttagcacatccacttccctctgatatcaaaggaaacttcaagtctgaagcggacttggcaagcatgttattaataactgtcatgcttattaacaaatttaatccggcctgctgcagaaatgagttgcagcaacgtgacacagtctcccgacacacttcattgatgtacatcttaatctggccctgactttcaatactcgcatttaagttatccggggcacacaaagcctctctaacagtggggtctggagtggggctcgtgtttctagccattgagaggctggccaaatggctattgatatcctggctaaatggaaagcccgcatccttgggctcggcaaacaacagttttccctgaatgaaaagacacttggagaggtccagaacacaactgccatttttacaattttgagcactccaagtatttttatgttcataggggaatggccgctgttttattgggtgtgctcggttggccttgcctccccctgagggcctgtcctcagtgccacctggggccccaggttcagtccaatccccatcctcagtccagggccgagccatagtttcaaaatcaaaccaaatatcaggctcctcctccctcgtgc

SEQ ID NO: 16782 - DNA, 809 bp, Homo Sapiens
gcacgaggcctgctgttactgctttagctgctgttctgcttaatctcagacagctggaaggtagtattccgccctcgcccagccacccgagtaaatgagaatgatgactgactgagaccctgatggtggtggcttaggcttaatctcagacagctggaaggtagtattccgccctcacccagccacccgagtaaatgagaatgatgactgactgagaccctgatggtggtggcttaggcaagatgaacgtctgaaatggaggcccagggctgccacgatggctctgtagtcatcagggagggagctccttttatcttgttacctactcccctcttgtgcccctttcttcccttgatctaagaaggttgctccggatctcgccatctggcctgcgttcaatcagcagaagcttcctggaggagcaggaggaggcactgtgctcgcatcacataccagtggccagaagttggcttcagggaagctcaggaaataggatgcgagaagccatgagacctccccaaactctgcagtaacagagtcaacaagacaatggcttaaagatggagagaccagttgatcggtcacacaagctgttccacgataattcttgtgtcagaaggggaggctgactaccaggaccactggccccacttccagcccctccattctgagtacacttcagagggctctggcagggtgagggggtcttggtggtgccacagagagtaaaggtctagcacacccattgtggagatatttcatggggacaacccagtgacttcacttgaagtaaagtgggattttccaac

SEQ ID NO: 16783 - DNA, 348 bp, Homo Sapiens
cgggctgcaggaattcggcacgaggctcgaaggtccatgtgttttgcaaattcaaaaaattcgcaatgttgctgcaccaaaggataatgaagaatctcaggctgcaccaaggatgctgcgattacagatgactgatggtcatataagttgcacagcagtagaatttagttatatgtcaaaaataaggtgattggcactttattttgtgtatttgttacagaatgttgaaggtgctattcaattggaataacttaagaattttgaaaagtaggaatggacccttaattgtgtgttacagtttttcagatgaaattatagagcttttctgcatttctgcttcacctgtat

SEQ ID NO: 16784 - DNA, 673 bp, Homo Sapiens
aaagtattgattaccttccttctgtcccagtgatagatcacaacaagagattatgaagagggcatggccgccatgtcattctggagagagacagagtaaaacaaagaagcctctctacaagtctcctaacttaacctgatgggaaaacacttcctaccactaacagcatctacttgattactgatactttgatcatggagtttgggcatgccacttgatagaaatttgaagagcaattatatttttcaaaaagagttttgaataatgttaagatagattgcaacatgactatcaattcttcccttcccatcaaaggagagagtccgtttatccagcctttgaatcttgattattcatgtgacttgcttcacccaatgtaacattaataagcacaatacaagcagaggcttgccaagaacttggtttgtttctaatgcttagaagaagaatggtgtatgccatatttctgcatttagaactcacgtggagacatgtgtggcccaattgctcctctttcatctcagcaataaccagacacgggactgaggccatccatgaccagccagccctagccaacacacaacacacaagctgatcacagatgcatgagtaagcctgagacagtcagaccagcctagaatagaactgctcgcagcaataaaactaaataaat

SEQ ID NO: 16785 - DNA, 725 bp, Homo Sapiens
gcacgaggtgcaactcaacagatctccctgccgtactgccttttccaggaactttacttcagggctgtccagattgcagttgtgccccgtgtatgtggatctagttcacagagtctttggaagccagcagtcgtgccctccgtatactgtccactcattttatgtagatttggtatcctcagcagccagtgttaacaccactgtcacgtagtgtacagattcatcttttatgtatttaaagtaatccatactatgatttggtttttccctgcaccattaattctggcatcagatcagtttttgtgttgtgaagttctactgtggtttgacccaagaccacaaccatgagaccctgaagtaaagataaggtacacatacattatttgagtaactgtttccttgggggccaatctgtgtatgcttttagaagtttacagaatgcttttatttttgtctataacaaacagtctgtcatttatttctgttgataaaccatttggacagagtgaggacgtttgccctgttatctcctagtgctaacaatacactccagtcatgagccgggctttacaaataaagcacttttgatgactcacaagatgaatccttttttcctctgtcccattgtgtgtctctgttccaaacacattttaaatactcggtcctgacagtgtctttagctaatccttgaagaaataaaagtggaattgaatctttttagtttc

SEQ ID NO: 16786 - DNA, 1046 bp, Homo Sapiens
tacatacatacatacaataaaaccgaatgagctggttctttccatcctcttgtggtacccgtagtgcccagcatccagacctttgtgcccctgtgcacatttggaagctaaaatgtacatcgttgtctgaaaaaacccaaccccaaaaccttcatctgattggtgagctgaagtctgtccttgcaccatgttatcatctgtttctcgtgtccgcctggttgaggaggacccacgagtgctgccgaggtgtggagggctggtattgagttgtggacatcactgttgaccctacctcacgtgccgagactctcatgtcacaggcgtgccttgctgcccccctgcagcactgtgcaggacgtggaccagctggagctgctgcccagcacagaggagagtcgccgcagatgacctagctgcggtgtgagagagcatggcccagacaagcagctgggttggcttctgagaacaggacttaccctgggcttcaggaacatctgatggctgaggttagtgtgcttggaggctgcaggacgaactgtcgatgcttcttagcagagatggtcacagagggcagcagggacaggactggaagggacctgcagcctgcagaccccgcctggcccccgctggcttctggctggtccagtgatgggcagtgacagacctttcccaggctctgcttcagaactctaatgggaaactgggcctgtctacctttagaagtcttcgattctcagagagcatttgtctaatacataaaaactggcattaatacaaacctcaaaaacgtgagcgtatcttcaggcttcatggaatcttgacttgtattgttttgttcaaaaagttttagaattcccataattctgtataactaatggagatccccgtacttttttgttttgaaattaaaggttctagggattgtcaataataatcaaatattatcctttggacaaggctttccaaaattgtgggttttttccttcgtgataccattgagtccgctgcgggaatgccaaaaacaaactatattggtctttcctcgg

SEQ ID NO: 16787 - DNA, 857 bp, Homo Sapiens
gtggctcctggcccagagaatgcctgttcctgttgccagccctatggcatatagagtcctgaaagaataagcagcgtgcactctctcgtggggaaagtgaacacttgagaggttgaatgtgcttctcaccaactcccttggggacttttaaagatgtaaggggtaatttttggcacaacctaaaatactgttctcttcctgttcagggcttacctttttttaaacagggtattcagagttgttaatagctagggttgttaagaattatcctcaggctcctaaagaaactggcaagttgaattcagttatttggtatctgagccaggtaactgcatcaagtggcctgtggcttacagcttttctaccaggggaacaatggtgaatttataataaaaacagaagtgtctcaggctgagaagaggtatggagaaaagagtagactcatgaatgatttctgcactctcaaagtaatggttaaagaccctttgcatagtgtaaacttgtcttgcccatgacatctgtgtaaatggaactagaactaacttttggattctactcatttttaaagaatgttgcagaagaaaatacaagggtactctattccttatatggagttgttgaacacagtggtactatgaggtcggggcattacactgcctatgccaaggcaagaaccgcaaatagtcatctctctaatcttgttcttcacggtgatattccacaaggtaagatgtcttgaaaattcggcactcatcagattacggcaaaaccaaaaaagtaatcaacttgaatctttccttttatgtttgattttcattttctcatgacagatttttgaaatgggaatcaaaagggca

SEQ ID NO: 16788 - DNA, 645 bp, Homo Sapiens
cgcacgaggccttctggtctacatgcaatttactcagagatcattttttccatagcggtatagcctactaatgtagttgatactgtaagggctccaagaaacatacctaaaaagttaactaaattcctatgcgagaggtgaaaaggttttgctactattttgccgacagacatggatggtgttccttcctctctatcttgaattacttggcctcacagtacttgagaacattccatttcagtaaaaagttattgcatacctaaataatccaggcaacatgctaggtcaatgtgacttactaagttttgacctttgtatattttcttcctatttcttgtatgtaatttctgcatgaaatttcccacttgttttctttaatatattattcattggatgaataaaagttcccaccaagataaaacaaatactctttccttatgtaaaaatatgtaagagaatgatgtcaaagtttagtctttttattaaaatatagtctccatgagtagactttgtattcttcatcatatatttcctagcacaggcagcattcaataagtatttgctgatgaacaaaaaatggggccgggggtagatggcaaatggaaacctactctggaagcaacattcattctaattcttttcctg

SEQ ID NO: 16789 - DNA, 1344 bp, Homo Sapiens
tcagccactgctctcggccctcttacaccattttgtttgattgtctagtccctgtttctttttctttctaatccttattcatttaagcaaaaccatacattatcttttccagtcctttcttgtattcttactgtttttttaaaataactttttgccttaatagctcattgtcactaataacttctgtgttctcccaggcagtgttataacagaagggcaatgaaaacattggacatgaccatgagtgcttcctttccttaactctaggtttgtagtctgttttaaattaggattagttcctgcattctgaaatacattggcctagaacattttatcccaggcatttttgaatagaaaacagttgcgtgcttttattgaagattgttaaaataatcaccatagtaacttgatatgttagtatttttctttttccttttagtatgtttcaagtgcagtaatcgtacttgtctatccagtttctatgtatgatacgagggttgcttacacgatgcatggctaacttgttaatttagttttctccttagagactttgagacccttaagagacaagattgagaaagagccatgtggcttggctctagaaacgtcattatcattaggaccatcagattttagattaagctgctattgaattaataaaatcccaatgaagcagagttatagggatagatttatagctggcagagtggtatcaaaggagaaaaacagtgaaaaagccaatttcactggttcgttcaatccagcttgttgctaatattagttacccttgttttaatgacagagagtggctggaatctgtagctaggggaggggcaacactgttagatgtgaggaaaggaagtgccaaaaatgcctggacagatggcttgtcccaaggccaggacacacactttaaaatccaacattcacctaagcaagtaattcttaaagatcttacagaaacgcagagtcaatcaggtttataaaggaaggctgaggggagagaggaggcctgggggcctggacgaagaggcctaggacctgaagagactccagcgagtctcgggaagcccaggggacctgtcaccatctgggcacttcccaggctcaatgctcagccagagtttgctggtggacctcaggattcgaagtgtgcaacagacggagtgcgcttgctgttcaggggcggccccgtgcaggagcaccagctcaccctcaggcatctcggactggagggccagcagaaagtcagaaacttactctttaaaacgattgttttcggatcatattggatctctttcctttttccttttgtcctttcactgtatgacttgaatcagtttt

SEQ ID NO: 16790 - DNA, 503 bp, Homo Sapiens
gcacgaggcgctcatgtcggctaacggaggcggtgtggggccgcgtgcgaagccgcctccgcgccttccccgagcggctggccgcctgcggggccgaggccgcggcgtacggcaggtgcgtgcaggcctccacggccccgggcggccgcctgagtaaggacttctgcgcgcgggagttcgaggccctgcggagctgcttcgccgctgcggccaagaagacgctggagggaggctgttaggagggactctgagcttcacacctgtctgctgccatgggtgcagagccctagtcctgatggcccctggtggcacatatcgaatgcctagggcagaaaggaagtgggaatggcgaagatgtgacattcctcggtgttagatcctgttttttcttaacaagttgaggcgtgggtagagcaggaattggttttccagcattgtgtccgtaaacctgagttagaataagatgtaacggaagccacgataaagactcggtcaaatcctgc

SEQ ID NO: 16791 - DNA, 846 bp, Homo Sapiens
gcacgagggacaggttcaggggagttagtatcaccttcaagtcatacagtggctaagaatctgtggtctcgctgaatgctgggcgcctgctctgctaagtctatttctacaaaacattgcactgccttcctgttgcctgccaagctcagggcccatttatcatgcatcttcccatccttgtctcccccaactgtcccttacctgagtcacaatttcgccaaagccaaagggattgtcctaagccaatgttgatttatcactcttcctgctcaaaagcccccaagatcacctatcaatcacctacttgagtgcaagctttgactctgtcacctgacattcaagtccccctctgcccccatgccagtcttatcccctcccctacatatgccctatcctgcagccaaattggactctgttcttcctgacaagacctggtattggcatctctatgcctcagtttgccttccctccactttaaaaagcctcttcagtctcgatacaaaaaacatcccacacatgttctaaaaccatgctttccttgatttctcctcatgtcaagacatttcttacttctctagtctcctagcattttgtgcctcacaaccctcaggacaggccagctagtgtatggctgtgggtttttatctcacctcccctgcctgaccctgagcccttgtggggagtatactcaccctactcctacagtgccttgcattccgtagctgctcagtacattaacccattcaatgtctttaagatttttacaagttagttttcctgtaattactaatcatttatctttaattctgagtaaaattcacacaacaaataaaaggaaatagtagt

SEQ ID NO: 16792 - DNA, 894 bp, Homo Sapiens
gcacgaggctttggcctttgctggctgtgtggcggctccgcggttcgcaggtcgttcgctgagcgtctctgcttagccgcggtcatgagccggcacagccggctgcagaggcaggttctgagcctgtaccgcgatctgctgcgcgccgggcgtgggaagccgggcgccgaggcgcgagtgcgggcagagttccggcagcatgcgggcctgccgcggtccgacgtgctgcgcatcgagtacctgtaccgccgcgggcggcgccagctgcagctgctacgctcgggccacgccaccgccatgggcgccttcgtacgcccgcgggccccgaccggggagcctggcggcgtgggttcccagcctgacgacggcgacagtccaaggaacccccacgacagcacgggggcaccggagacccgccccgacggacggtgacaggcgaagagccgaactcgctcgatggcgtggtggagccaggaggctcgcctgactgcatggggggactggggaacccgcctaaggtgagaggtcttaagagactagcttgacgaattggggatgtcagagactcctccttggcgacgcagggggcctagagagccccgtgatggacggcaagggaggcccgccttttccgatgcttggagacaggtcggtgctcctcccccatgagggcttggggcggcctgggacgctggcgggctggacagtgtcaagccagagctacttgcccgaaggtacggggagccaggacgacccccggtggacgggagagccctgaacgcccttctcttgacccctgagaacatacccacttctggctcctcagggagtctcccctctcctgtaatttactctgaaaattgcagactttttgctgaaaacgttttgggaagg

SEQ ID NO: 16793 - DNA, 2080 bp, Homo Sapiens
  misc_feature (1710)..(1721): n is a, c, g, or t
gcacgaggcataagcctcctcagccagatgtcatgggtggaactggagctgtgtcggggccagcacagctgaactgtgacaatggcaggaggtggcatgtgcccagcacttccattaatctgagcctaggagttgaattctttggcaaggttggattctgaggtccttattatgttaatgatggtgcaatactctcacctgcagtagaactgagttctgctgcagcttgtgtaaaagtgggcagtacacaagtacgtcccactgctcacctagagcatcgctgagcgttagacaaagtgttacacagaatgattaaaactttcagacttctacctatgctctttagtcctgtaaattgggttgtattgatgtcaactctggtgccttagaagttagtagtttgggaacctatctgtaaaatcagatgttttttctttgtagagaaggatttctggtgcttttgcttactaagagaccgatattcttaagttgttttcttgttttaacagccttgagaaatgtttggttttggccagcagaattcttgtctacttttttctttcccaaaaagtgttttttaatttctctaccaaagaaaaaatgagcaggtttaggtttttacatgacttatatacattagataaaaggagctgtataatttagcaggaagggactatgggagaatactttactgtgagtggaaaatgttagcacatttgactgggttgccctggaatccactgcacctttacactgcaccatgaaacctacactccctgggtatcataccgcgtcatcacctcaacaagtcagtcgtctccattgatatttgtacaaaaggtatacatggggaacacgtgttcattcattaagtccatcttgcgtgcagctatatccctgattggttatttttcctttccttctgaggttctcatgtcattttcttcatcggatgtgactaaaatttttctggtgtcttctgccctctctttaattttgcctcttgaggggtagcagatgtgtcagtgcattttattacttgctgaaacattcaggcttacatttcttattagtttagtattttaaaagatttaattttctgaatgaggcatttgaattgtaccagcaatggacttttaaaaaattggatgtaaaaccattcagggtgatttttcttgtcagtggacagtgacgaacagagatttgaaatcccttacctccaataataagccattcagcctaaattcatttttatgaataaatctcttctttctcatggtaaatgtggcttgtgccactcaaacactagtgaaagggtatgtacaaccgcaacatcaggccaggacaccatttatttaaccaagtaatggaggagagtgaaacattttccaaggccttatttctttttcagaatgctttaagtgttgattatatgtgctgggtctctagagaagtttttatttgttacaatactgctgctttgagcaattttgtttctcttcattgtctgttagggaaatcaccagctttggcatcttaacaacaaacagtggatgggtaatttttatttctgatacgcatctttagagtcaaatatatcttttccctgtactcctcatgtacaaccaaagaacatacattatgaaaattgtattataatatctggaaacacaacattttcctctggcaggtgacttttgtacgaaatgnnnnnnnnnnnncctgtattttttttgttgttcttttgtgattaaggatatacatttagtagtctttgttattaaaggaacctgctgataagtacaagtgtgaccatctcattcaaatgtttgttgttatgatgcaaatggatattggtttcaatagaagctggatccttaatactgcattttctgaattctgttttaatatttgtgttaaagtaacatagctgaatcacatggaatccctggaagttttgttatcagcagctttgcagtttgggaaaccaagaaacaaagctgagtgttttaaaaaatgaaataatctggaatcccttgctctcaaaacaaaacatataatctatcaaggtgttttactc

SEQ ID NO: 16794 - DNA, 1453 bp, Homo Sapiens
gcacgagggtgctcccctcagggatgggtttactactagctgtcagaaagctattgggtatcctaatgtgttaatagctgaaactcagctgtaatttctcctaaatacttcagcattttgcattctgtacattgtggtgctttttccaccttgtattgttgtaactgtaagctcctagggggcagcaatttggtcttaggcgtgtaccctgtttagtgcctggcaatgccatgtttatatcaaggtcttaatattacttttgagttatttctcccactcttcatggaagtgatgctccagccttgctaaaacactgagggtcctcccgataagccaggcattgtgattccttggcttcaagtgccttctgtcttccccgaaggtccactgagatctacaatcccccctttcctctgatctcttgccatgtaagtaattttttaaaagatcagtacaagagctatattttttcctaagaaaaaatttcaacaggaatggggagtagccccgttttggggctgatctgtccagaatttggagtgaggaacaaatccattctcatctactttccacattttccctcttgtttgaggtcctgttccaaccttcatttctgaaactgttctagagcactttgtctttctcatagttcataacttacctcttcagtctagaattagaattacattatctgttttactactttactagactgtaagctcctagaagataaggactaggggagttcatctctgtattccaccagaaggtacagtgactcataactagagtctttagatgaaacttactgagttgaataacttaatatatttctgttttcattcccaagggaggccatgtctggagatagaccttgaatttaataaattttaggcactataccatttcagggagaaaattgttgggaaatttggggggatggatatataagggggaggaagtcactggccagtttgaggtgcttccattggtttgggtaactagccattttttcctgattgtgcctagtatatcccagacagtttgtttttatgcagaagaattttatatgaaattttcatttctttgcaaaaacttgttccttttttcagttcatgacatcatccatggtaaagtttgagtcatttgcttccatttttgttattccccacatccagttttcaggtaagtcctgtcagttttacctcaagtttttcccgtcttttttcctcacctatgtaatttcagtagtttttcagcttcacttaacctcttactccagcctactttatacacaatgttagattcattttaatgaaacatagttttgaccatgtattccaagtatgtgttctctttcccctattagactgtaagctccttatgggcaggatctgggtttgagtcatctttgtatcttgcctagcacctatcaataaatactttttgaatg

SEQ ID NO: 16795 - DNA, 1492 bp, Homo Sapiens
  misc_feature (1036)..(1075): n is a, c, g, or t
  misc_feature (1137)..(1187): n is a, c, g, or t
  misc_feature (1203)..(1212): n is a, c, g, or t
gcacgaggattattccaagcctccctaggtttgctctcaaatgtcatttacagattgggctaacgacctaaaatctatatataaagactttctgaagaactctgtattatagcaataccaaacgagtgctgtgtgtgcaaacagtctggcgttgctttttatgttgatatttatcctagaacactgaaagagaatatgccagtgataactcactttacttcagtcatttcaacacagaaaatgcttctctagcatttttcttttgtagtgttaacattttgaaattcatgtttcagaggcttcatcatcacagaatttactcttgctccatgaaaaaaaattaaataccttcagaggaatatttaagttgtaaactatgaaacttgagaaatcctcttgagataaaaggctgccaaatccagtattataaagtccatggtcatatgtgcctgtgcattaaaggaataccagatctatgcagtatacatttttcaggctgaaattcaaggggaatcattctgattattcttactacaaatggagatggctattatgaaacagcatgagcatgagccttttatcttttatacttagtgatatactttgcttgaaaatcactcagcaaagtagttcacatgatgtgtatcatatttgaagtgtggtttttctcaaaatcattgactttaaggagctcatttctgaacaaaaaggtttgctctgtggaaaaatcaatcactgccaggattctttcatttctgtactattttgtataattgaatttgttcacttctctcacaccagcaagtgttttacaggtgccttggattaaaacaaaattgattttaaaatttttatgtaagtcattgtgtctatgatgccacttttaaaaggaaaatgcaattgcgtaatggcttatatccttatttaatgtacctatttgtgttctaataattgtttgaatgttttattcagcttaaaactttaccatgaagtcataaacagtaaacaatgttttgttatgtattaaggggatatnnnnnnnnnnnnnnnnnnnnnnnnnnnnnnnnnnnnnnnntggcgcctggtttcagacaacctgaatcaaatcttaggggtggggctttgggatgtcattgnnnnnnnnnnnnnnnnnnnnnnnnnnnnnnnnnnnnnnnnnnnnnnnnnnnaaaatgaggagtgggnnnnnnnnnntaggtgttttgttaatttagagctgagctgagaagataatatatttttattgtcaatgacattaacagatatgcactgattcttttatacctacaatttacttaatgttccttttattaaaacgcgtggttcatgagcaactacagactgaatccagattattacctgttgctttcagtattttcgtgatggcttttaatcttatgaaatcatcttgagatcattcatggtcaagccatgaaaactctcatcttcaagcctgcctgctaaagcttctttg

SEQ ID NO: 16796 - DNA, 202 bp, Homo Sapiens
ccgcggtggcggccgctctagaattctatttaaaatgcccccgggctgcaggaattcggcacgaggccagctccccaagtagcaattcctgtcccttttaagggctcacaaccctaagggggtccgcgtaagcgggtcgtgatcatgagagtcgtgatcgattgaccaagaagggagtacgtgactgggggctgcattcagc

SEQ ID NO: 16797 - DNA, 949 bp, Homo Sapiens
  misc_feature (744)..(753): n is a, c, g, or t
gattagtgaagctgttaataagagtataaagatatttgtgacaaactttatagtattttttaatctcttacagtaatagaagcaccttgcatcttttaaaattatactagaggcacaagtactgatttgatcataagtttttgagttttttaccttttctgtttgccaaattatatgagttatctcattaaaaccacacaaaaacttaatatgaagaatgataaaaataattacataaaaatagtgaaattaggtgagaaaatcttgccctcaagttggaagatgttatctctgagtaccttgaaaaagtgcattttcttttgcttactgataacaggcaaataatccagttaaataaagcactgtaaaactagtgtgtgcaatttctggcctaaatacagaaaaaatagtaacaggaggcagatacgtaaacagagtaaatagccataggcctatataaacatccttcttgaaccaaaaactaaggtaaaatgagctgcaacaaatggctaccaaaagatattatgtgaagtctattccataggctatttttcttcccttctttcccctccccacagctttttaaaaaaccatcatgctgattgaataattgtagagactggaaaatctcaaattgatatccttatataaaatcctgcctcagctcattagttcagaaagaaatccaaaagttcagttctctgagttgcttcaacacataagtatattagttttatgaaagannnnnnnnnnatttcataaaactttaatacttctgccagaatcagaaagtgcattgtgctctggtacaatttacatgaacttttggttcccaccacctgttagctgcgcagcgttttgccaattaagctctttgagactcagctcttaaattcaattataagaccagatcttgctgttttttctatacatcccatctgttgtttat

SEQ ID NO: 16798 - DNA, 972 bp, Homo Sapiens
cccgggctgcaggaattcggcacgaggtttctctcattttacgacaaataggaacttactgtatatactgttctgcactttgcttttattaaagatcttttgataaagaactatattgataagcagtaaagatgtcatgctcctggcccaataaaatattgttagcattgtcataaatatgtcttttccaccggcgatggttgggtagttaagtgaataagctagaaagacatgtttataaagctatttgatgacaatctcaggcatatttatacagagatgttcttaactgtttgctacaaaaacatgaagatcaaaaactttcttgaagcttacgcttaacttatttggggaaacaaaactccagcccttcttgtgtatgttctgatatccctttgctctacttttagaggagtgaaccctaataggatggtagcagcattcttgtttctttatatctctcctctgtgattgtataccgttttttcaacttaaagcaacttcagctggaaatatgtagaggttggccaaggtgaactaaatagtctgtaacattgattagatatcaagcaacgtgagcatggtagcaaaagcactaactgaagccagtgatttaatttttaattctgattctgataattgatgatatagctcctcgaactttgtttttttgttaaaacttggaaaatatatttgtattattttggacaaattatttgaactctctgggaccttgattcaatttatatataaggtaaaggcattatactggattatcctgcaatttctttgagttgttagaatataatgtagcttattaataaccatattagcagtgtagtagattctgactgcaaaacctagccttttctattgattcattagtggtagtaaaggtattatctgatttatcctttttaatagcagtgctttgatcaagtgggaatagtaatggacaaataaaatcaatga

SEQ ID NO: 16799 - DNA, 1079 bp, Homo Sapiens
  misc_feature (221)..(332): n is a, c, g, or t
gcacgaggctccacttctcaagtccttgcactctgctggacccccgctccttgctgttactgcagctcttagagtggtaagaggtgagggcaggaagggagcaggggccaggtcatgacttgcatttttatcctgcatgaaatggagggctcacagaaagttgtgagtagagaattgacaggaagacttatgttatacagatactgtaggggcttggtgtnnnnnnnnnnnnnnnnnnnnnnnnnnnnnnnnnnnnnnnnnnnnnnnnnnnnnnnnnnnnnnnnnnnnnnnnnnnnnnnnnnnnnnnnnnnnnnnnnnnnnnnnnnnnnnnnttttaaaatagtgtgtgtatataaactgcagggctaagattggaagctgggagcccatttggaagcttatgtgataatccaggtgagagatgatggtggcttgggaaagagtgaagttctgaaaagttcagtgatttgctcacaggccctcagctgctttgtggcagaacaggccttcttaagggattgcctgacccttactactaaattgtgatggtgttccagcttgcttccttctcccacatgtcagatcaaagatctgcgagaccacaagctggacaaccgcatggagtcgttcttcctggccgagactgtgaaatacctctacctcctgtttgacccaccacttctccacaacaatgggtccaccttcgacacggtgatcaccccctatggggagtgcatccctgggggctggggggtacatcttcaacacagaagctcaccccatcgaccctgccgccctgcactgctgccagaggctgaaggaagagcagtgggaggtggaggacttgatgagggaattctactctcttaaagcggagtaggttgaaatttcgaaaaacactgttagttcggggctctgggaatcttcagcaggcaggaacactcttctcaccagaaaacatgaccaggcagggagaggagtctgccaacgagggtccacttctcggtggccagtcagccttcacctccaggtgggcttagggggacggttttcctagactcctctaaccagtgggataa

SEQ ID NO: 16800 - DNA, 880 bp, Homo Sapiens
gcacgaggaaccagtcctagtggctcataactgggttttcctatcatacttgtcctcagtccgtaggtgaaacaacaaatgtagggatgctgaaagttgctgagtatgtgtctattccaaccacagggtgggttcagggacacattggatccactgtgaaacagacatgagctcacactccatccaccagctaacctccataagtccctactctggtggaccacagtgatgtttttggtctctgggaattcctgtcaaatcagagccagtgtccagaattccccaaatatctgagaattttcttttctctaagtcacagtcatcctggtagaaggctgtaggtccctttggggaagactgggaaaaagattaactatgtaagtttttggcaatgtagcagcgtacttccccaagatcacccagcctccccttcacttaggggttgtgggcctgtgaactggctcaagtctgggaattgattgagggtttagatctgtgtttcattaatttgagttagtcttttattcagttgacctagaattcttcattttttaaaaaacaactaagactttggtacagcccattagctctccctgtggataccatggactacacaatgccatgggtttctgtgagtcaaaccattctgactgctgctttgacactgctttccactgtagtgaccacacccacctcatctttggtgattaaggacagcccatgttccctgccaccccaggattcaattatcctcattttatttaaagatcccagtccagtggctgcagtttctgctgtaacattttgcctactgagagcacgagctcaaagctcttccaggatactgggctcctctcacaatattctttctcatgatcgt

SEQ ID NO: 16801 - DNA, 1356 bp, Homo Sapiens
gcacgaggtataggttatgattgatcaaatttacgttttactaatggtaagggtgagggtcatagggcaggttttgggttttctagtactgttgaaaactgcaagtattggctatttgtatacttagccataacttggtgaaaaaaaacctgagcagtgtctatgtattaatgcgttggaaagaaagctgcttgtgtttgctttgttaattgcctcaggatatttcttttaaaataagctgttttaagaggaacagaagggaaatctgctacctagtctatacacagcgtgaacctcacagggggcttctgataccctcaaacatggagaacagtaagggagcagagtggttaaggactttcaggaacttaactattctggaataaggaatgaatcaactgaccttgggccagcaggtttttaactaaattgttacttgcctttctcacccagttaatcagtctctgtacttgtttccctttttgaaacaagtgtcttggttaactaattctgttttatggttgtgctaaattcatagcaggtgccttattctttgcttttagtcaaaccattccatatcagaattttccttggtttactatagatatttggctttaagttgttgtttgtgttttttaatgtacaatgttctgataaatttgactgttaaattgctatagctagcaatcattttacatatgtaaaattgcattccctttgtatttcatgtgtaattcaccaattaagtgcagtttatattcaggttggattatgcatgtttaggtaaacgaaagctgtgtcttacttgatttattctttaaaaataaagttccctgaatatttgatgcttttcttctaaacggaaatgattttacagttatctgagtgtaccttttatagttagtagaaaatgattttaaagaatgtttagtattgtacttaaatggtatgcagaggcacagatgtaaggtttataactggaaataggtggtaagaaaaatatatagaaagcacaatgatttgaatatttttccacttaggatttcctaatctccttgtcatccaattcaagctcaagatgaagcacaattctttgatctccctttgccagttgaattttatagatcatctaatgttgagcacagtatgagaataaatattggggttgtcaacattactcagttactctttgtggtttagctctaacatttcaacaagttgtcaattaattgtatctgttgggttgtatataatgttgctcaaaataattaagtggacttccaaaaataagatttccattgtaacaggatgcattgtgatgggctttgacttacattaaaagaaatgtggatagtc

SEQ ID NO: 16802 - DNA, 1048 bp, Homo Sapiens
tgttgaaccaattgtgaattacttatgtattattcatttctcatggggagagtaatgctgttgaagaacattacattgtaaactgccttcatttttggctctttgtttatgttcaggtttagtttacaaacccatttaagtatggaatgatttatatggggtcaggtgctccacaaaatagacctatgagaccaaaaatgacctaggctatttagacgacagcatgaaacttccacgttagttctcagtctataaaggcacttaccggtctctggtgtggtatgaccaatagaaacaccttatagtttgctttggacccctttttggaaaaataatctgcctttctaattgttctgcataggttaaaatgataaatttacattctttgaacctataccagattgtggtgtccgagtgaccggcacactgtctgacacacagtcagtgtgcacgtatttgtctgagtgaatgaggagacctgagaaaccggtgacgtggcacagggaagccagctggcccaggattccgtacatggccgcaagcagactaacgcgttgacgctaatttaatgtattttacctcacactaaggtcatgcttgataaagacgttaaactcaacttgtaaaatggtagcccagtgctatgcacagagtgggtgctcattagtgttgaatgaacacatttgtaatactacatgtaattccatctgactgctttgttaaattttcagttagaacgtagatactgtaaagtccacacacacattaaatcttgttttcctgaaagtatggcatcaaaaatacttgtagaaaaaccttgtcacaactgatttgaatgttcctattttctttgactttgatattggcttgtaatgtctcttttcatcatatgtaatatcagtggaacaggcagcgctactcaagtcctaaggattcctcagtgatcagtgatccagggccgttcatgaaccactgggctggatttgactgttgagtgtggcagttaatgcccctcaagaaatcaaaggatgtcttataagtgtcttcc

SEQ ID NO: 16803 - DNA, 203 bp, Homo Sapiens
gcacgaggaactgatcttcctgccttagccctccgagtagctgggactaggtgagcaccaccacacccggctaatttttaaaattttttgtagagacagggtcttgcagtgtttcccaggctggtgcctgggctcaagcaatcctcccctctgaacctcctgagtatctgggactacagctgtgtaccaccacgtgcagctaa

SEQ ID NO: 16804 - DNA, 888 bp, Homo Sapiens
gcacgaggcatcaacacaaatacaaatggaaatcattaaactttctggaggggccatttgaataacaatgtcaaggcctgggtttttcccagcgggattttggtcttcttatctggataagcacaggcagagatgggctgggtagtggccggtttctggatgcagctgcacgctggctggacttagcactgcagctcctcctccttggtccgccgggagcctcctgccaagctctgggcactggcatgggccgtggagctgaggacctcctcaaaactgcctccattagggttcgtaccgcctactttcgtctgaaatgagcagatccacaaaaatgcagttagttgttactatcatttttgtaatgtttttataagaataccaaaagctggattactttcaaattcagaaatactttctatctttagagacaaaagaatgcacagaagtttgtttcctttagtagagtgctagaatattattcatacttgggttctcggataggattccaaactttaattttgcacacttttagcaaccctctctttatctctcctgtatctaagattttaatcccttcaggagcataatcggatccatggacttggaacagctatctccactcacccagagaactgatctaatcaaaatggaattagattttttattaattcctccaattgtacaaatgtataaacatccttacatgacctaaacttagatttttctacttgggagttagcagggcaaactggatttctgacaaatgtcttttgaaaagtcagagtggctcaatggaaaatgatttctggtttctgctttgaaaattgaagatggatcaagtcttaatcactggtgatttcacatcatcttaggcaactgcctttt

SEQ ID NO: 16805 - DNA, 710 bp, Homo Sapiens
  misc_feature (598)..(616): n is a, c, g, or t
tttatacctcattttctttatccattcatccacagatggacacttaggttgatcccatattttgactattgtgaatagtgctgcaataagcatgggagtgcagatttaaatatatacccaacagagggattgctggatcatatggtggttctacgtttagttttttgaggaacctccatagtgttctctaccatggctgtgaaaattcacattcctgccaatggtgaacaagggtttcccctttctccacattctcaccagcatctgttattggctgtcttttggagaaaaaacattctgactgaggtgaagtgatacttcactctggttttgacttacatttctctgatgattagtgatgttgaacatttttttcctatacctgttgaccatgtgtatgtattctgtcaagaaatgtctgttcagatcttttggccattttaaaatcagattatttgtttttttgctatttgagctccttatatattttgcttattaatcccttgtcagataaagaatttgcaaatattttctgctattctgtaggttgtatcttcatcttcactttgttgattgttttgtttactgtgtagaaacnnnnnnnnnnnnnnnnnnngatgggggagacagtctcatgatgttgccctgcctggtcttgaactcatggcctcaagtgattctcctaccttgggcctcctaaagctctggga

SEQ ID NO: 16806 - DNA, 1938 bp, Homo Sapiens
gcacgaggaactgactgatgcttctgcttgtaagaacatactgcgctttattcaatttgagccagaagaagatataaaaagaaaattcatgagaaagaaggacaaaaagttatcagacatgcatcaaatagtaaatatagatcttatgctggaaatgtcaacctccctggcagctgtaacgcccatcattgaaagggaaagcggaggacaccattatgttaatatgactttacctgtcgatgcagttatatctgttgctccagaagaaacatggggaaaagttcgtaaactcctggttgatgcaattcataatcaactaactgacatggaaaaatgtattttgaaatatatgaaaggaacatctattgtggtccctgaaccactgcactttttattaccagggaaaaaaaatcttgtaacaatttcatatccttcaggaataccagatggccagctgcaggcctataggaaggagttacatgatcttttcaatctgcctcacgacagaccctatttcaaaaggtctaatgcttatcactttccagatgagccatacaaagatggttacattagaaatccacatacttaccttaatccacctaacatggagactggtatgatttatgtggtccagggcatatatggctatcatcattatatgcaggatcgcatagatgacaatggctggggctgtgcttatcgatctctgcagactatctgctcttggttcaaacatcagggatacacagagaggtccattccaacacacagagaaattcagcaggctctagtcgatgccggggacaaaccagcaacatttgtcggatcgcggcaatggattggatctattgaggtgcagctggtactaaaccaattgatcggtataacgtcaaaaatcctgtttgtcagccaaggttcagaaattgcctctcaaggacgggaactggctaatcatttccaaagtgaaggaactccagttatgatcgggggaggagttttggcccacacaatactaggagttgcatggaatgagattacagggcagataaagtttctgattctagatccacattataccggtgctgaagacctgcaagttattttggaaaagggctggtgcggatggaagggcccagatttttggaacaaggatgcatactataacttatgtcttcctcagcgaccaaatatgatttaaaatatcttggagtcaaagactgcagtagagtggtattataaatttgtgaataaagaatcagtttaatttttcacattaaatcctggttctagtttgaccatttaaattatgacctttttcaaaggttgtaaatactgcacggagaatgtattttttagacgttcctttaataacttaaaagacaaagcatacacaaccagcatattataggcatgtaaatacatgtgttcttaaatggatcttcacttggaagaaagtttttcgtccttctcagaaggagattagacacaacatatggtaaagccaaaagcaggagcttatagatttgcatgaaatgaaggcgttcttcagacttcttcataacccacgtgacatctgtttttaaaaacacgttaacattaaaaacttttttttaaaaagagttttatccccaaacttccaccatgcagtcccatttttggtctctagactctggtaaatataaccagtactaaaatgttaatgagaatgaaacaatactactagaaatacgagtgtcagtattaaatggaataataaatgctatgcaaacaagagatcactgcggggaggaaaaaagcagcagctctgagttacttaccagcacttccttttcccactggtattttctacacttccgagactccgtttctgtctgagcacggcaacacaatcattcctgtcagggtgttcacttgcttttattgtctgcatacatttaa

SEQ ID NO: 16807 - DNA, 1359 bp, Homo Sapiens
cactagggagaaccgagggccaacgatggcggaagcggaggagtctccaggagacccggggacagcatcgcccaggcccctgtttgcaggcctttcagatatatccatctcacaagacatccccgtagaaggagaaatcaccattcctatgagatctcgcatccgggagtttgacagctccacattaaatgaatctgttcgcaataccatcatgcgtgatctaaaagctgttgggaaaaaattcatgcatgttttgtacccaaggaaaagtaatactcttttgagagattgggatttgtggggccctttgatcctttgtgtgacactcgcattaatgctgcaaagagactctgcagatagtgaaaaagatggagggccccaatttgcagaggtgtttgtcattgtctggtttggtgcagttaccatcaccctcaactcaaaacttcttggagggaacatatctttttttcagagcctctgtgtgctgggttactgtatacttcccttgacagtagcaatgctgatttgccggctggtacttttggctgatccaggacctgtaaacttcatggttcggctttttgtggtgattgtgatgtttgcctggtctatagttgcctccacagctttccttgctgatagccagcctccaaaccgcagagccctagctgtttatcctgttttcctgttttactttgtcatcagttggatgattctcacctttactcctcagtaaatcaggaatgggaaattaaaaaccagtgaattgaaagcacatctgaaagatgcaattcaccatggagctttgtctctggcccttatttgtctaattttggaggtatttgataactgagtaggtgaggagattaaaagggagccatatagcactgtcaccccttatttgaggaactgatgtttgaaaggctgttcttttctctcttaatgtcatttctttaaaaatacatgtgcatactacacacagtatataatgcctccttaaggcatgatggagtcaccgtggtccatttgggtgacaaccagtgacttgggaagcacatagatacatcttacaagttgaatagagttgataactattttcagttttgagaataccagttcaggtgcagctcttaaacacattgccttatgactattagaatatgcctctcttttcataaataaaaatacatggtctatatccattttcttttatttctctctcttaagcttaaaaggcaatgagagaggttaggagtgggttcatacacggagaatgaaaaaacatgcattacccaatattcagattttgatcaggggaaattctacacttgttgcaaaaaaagggggcccgggtaccca

SEQ ID NO: 16808 - DNA, 768 bp, Homo Sapiens
  misc_feature (232)..(265): n is a, c, g, or t
gcacgaggcaggtagctctaggagcaccatcctgccctagcagagcccaggccttgccctcatgaagcatcattgaaatagcaggagcatgttgatttcttggttaggttgcattataataacaagagtcagaacattaattcgaaacaacttgcagtatgcatttcttcacaccagtacattcttaagtgtacttgtttataaggaataacataaactaatctgtaccttnnnnnnnnnnnnnnnnnnnnnnnnnnnnnnnnnnaactgtatagtgtacatggtaatgatttattgctatgccccagatccttaatgtagttctcatcctccgcatgccctcagccacaagcgggtgactgactgttccctgatgatttggcccacctcctgtgtttggacctctagggaggagggttttggtcatactctccttatcctcgtgcacagaaatgctcagggtccccatgtgcctgttgttcagccctctctcttgttccctttctgagcatgtggtccttccccaggctgtgggacagctgccttcccacgaaagtgtaaagcagtattaagatcattactgcatgtgccctaaaaacccaagttttctattcccttaggacagaaaattgcatgtgaggtgggataatcgagtttcagtgacccacgtcagttacacattaaagccagaccccatgataaaattccacaaaatggaaataaaactcaaatttctttagcattgtgtaaataaatctgaatgtgttt

SEQ ID NO: 16809 - DNA, 1353 bp, Homo Sapiens
  misc_feature (918)..(988): n is a, c, g, or t
gcacgaggcatgtctctactactttaataatttgtgcaaatttatgttttagtaagtagagaaaatttttaaatttgataactaccatcttcattaataaataattactggagtagtttcttttgcaactctctactagtatttcctcccattacccaaacagagacgaagcaaaacaaacaaaaatccagcctacagtatgtttcttcatttttacagaattgcagagtttaccttagaaaactaagaaaagatagaagactgactaaaaactaaagttttgaaagatgttttacatatgaacattaggatgtttgcacactatttcacaaaactgacatggaataatactgatggggggaatgctttttctgcaaaaaaagctatattgcaattcagggagaatctcatgttattagttactgatcacaaatatgcaagagaataataatgctaagttgagcccaatggtctgaatattcctttactgtagcacaatctggcatgactgcctttaaatgaaatctgtatttcacatcaatttgaaatcagcacatcatacatttttaaaaggaaatttagctatttacccctctacagaatcactgatttgacaataaatatttttgagaaaatataagaaaataaactttctaaataagcaatttacattgatattctatatttaaattatgttttataaaagcatgcgctttggagtcagatctggatttgaatcctgattctaccactcaatatgtaatatatataaagagcttagcagcgttcaaggcacacagtaaatcctcaaatgttagctgttattatttctaatcaaagcagtggtggctgctatttataaacactactatgcatgctttatgtacattattgcatttgttcctcctaattattcannnnnnnnnnnnnnnnnnnnnnnnnnnnnnnnnnnnnnnnnnnnnnnnnnnnnnnnnnnnnnnnnnnnnnntgagtgtgtcagaagccaaagcgccaatgctactgaccactaaattgttgcttcttaaactggggtccatgcaaaatccttgtggagtatatatgtgttgggtgtaggaaagtgcccatgaacttactatgagaattatgcattattcatgttgatgaaacattttaaaataatattcatgctctgaattatttggataattgtattaaaaccaaatattggcagaaccatctcagtgcttaggtttgtatttgtattgacttccctgttaaggcccagttctacattagtggtggaaggcttatggagaacagaggctgttttaataggggaatgatggattcaggctagatgaggcctcgtgc

SEQ ID NO: 16810 - DNA, 711 bp, Homo Sapiens
gcacgagggcattttcctactgaaaaatagggtgacatgtcagtcaaattctgatcaactggaacttgagtttccagttaaattccatacactaggagggagttttctatcaaaatcctgcagattgaagaagctggtttattagaaccagcctgtcgcttttcaaagctgcttaaaaataagatactgacctcacccctagagatgattcagttggcctgggtggggccaagaaatccgtggtgttttgtaagcactgctggcgatttctcatggcagtaaagaccacactgagactgcactgattttgattaaagtacataggcttggctgtttttacacagctaactaaatttggactcttaaaattgtgtttgtaatcacagtgtgttacacctttcccagctctcagcagttgtactgcatgatggagcagcgggcccctgggacctgttccctgtgctccctgcctctgagagcccagcttgctctgaagttggactaaaccacttagatgctggggttgccacagcctgctcctggaagcctgcattccagtcaggttgcatccttctggtgctgacagaacccagtggtgaagccaaagcacaggaatgctttaaaaatgaacagtttatgcagaataagggtcaggagtcatgccagaccagaacttgatgctactgtgtcttgtgttaagaatcatttcct

SEQ ID NO: 16811 - DNA, 900 bp, Homo Sapiens
gcacgaggctgtgatacagtataagtaaagtgggttgtctcatttaatattcagaataaccacatgaagtatgaactgccattatctttcccctttgtacaaatgaggaaagtgaggctcacagaagttaattggcccagggtcccacaactagtcagtgcagaggtgggaaacataaccagatttgttcggcatgaacttgtgccaaatttcctccaaagttctcaaaaggcaaggcatgttattttatcccaatttagcataccaacaactataatactagatatgtaggaaagtgcttaataatcgttttttactgatgattcagtgtctaaattttgaacaaatttgggtaagatacaagtcacacataaattgacagaaaatgtagttcttcattcaatggttagcagtcattaaaaggtactttccctttgtttgtggtgataatcagtattagtagttttcatattatttggcttccatattaatcatttttatattttcttctccttcttaccatgtttacttatatcatccatcttttagaatcccagggagctaatttctggtccctgtgttgctatcaaatctgtatcttgcagaaagaataatttatttcaaacaagggacatacaatagaaagataagacctactgaggtctttttcccatcattttattatgaaaaatgttcaaacatacagtaaaattgaaagaattttatagtaaatactgaccacggggattctacatcttactctacttgttttattattttcctatccagcgtactttttgatggatttcaaaataaattgcagttgctgatatacttccccctagtacttcacctgcagattattaactagagtttagattattatttttaaattttttt

SEQ ID NO: 16812 - DNA, 827 bp, Homo Sapiens
  misc_feature (683)..(699): n is a, c, g, or t
tgcacgagggaaaactttaaattggaatcctaaccttatatagacttgttaataaccaattcataaacaaataaatggcttcaaaattgtatgcttttttccatatctcttcttgtaatataataaaaggtgatttctaatgttattaggcagaaaagcttgttagaatatattttgactatttttttgacccacacccgtttaaggatttcacatcatacaaagcgcttgcttagatggcttctatcctaggcatatgctggccgggtgctctacatataaattctcattgtatcctcccatctgtccactgaggaagattatcaaatggatcttcatccaatggatgcataaactttcctacttacttgtagtggcaaagctggctttcaagtacaagtttgttggctccattacctatgctcctattatccgcttctgtcccgcaacaaagtagctcacttaggcgtatgaccacatgcattatgatagtttcccaccgccatattgaataataaaagctttggccaaagcttttttaaagtaggagaaacattggatgtatatgttttgcattgccatttgatttcaaattaatcaggaagaattagtgattttaatgagcagtaaagtggtgcaataaagcagaaagaaaaatgttcagccgaagtgaaagactagtnnnnnnnnnnnnnnnnntatttgtacatatgatctaatttagaaagtccagaattggcttcctacagaaaagtgattaccttcattttacaaatactttaaaattttggtaaagtttctgttagggcttctggtctaccggtgag

SEQ ID NO: 16813 - DNA, 920 bp, Homo Sapiens
gcacgaggtcctttaagaagagagccatgggacgggcagtcaaggttttacagctctttaaaacactgcacaggaccagacaacaagtttttaaaaatgatgccagagcattagaagcagccagaataaagataaatgaagaattcaaaaataataaaagtgaaacttcttctaagaaaatagaagagctaatgaaaataggttctgatgttgaattattactcagaacatctgttatacaaggtattcacacagaccacaatacactgaaactggtccctaggaaagaccttcttgtagaaaatgtgccatattgtgatgcaccaactcagaagcaatgagttttctagaatacaacaagtctttgtactttttaactttaaaatctacaactctggcaaaagtcctggaaatgcagacattttccctgaactggcatattgaaaatgaatgaattacagaatagcttcatatttaaatttcatgttaaaaggtcattactgagaactaaagaacataattaagtatttctaaaggaaattagataagaaaacatttcattttcattgaaaatcaaatttcataaagcaaagtaaatgcttagggagatatattcaatctttgaccttgatgagtatttgatcttaccatagctatttgagaatgtggtgcttttacaaattggtgagttttcctgccatgtgaaatgcaattattacattttaaattgttagattaaaatgatatttagtcctgaaaaatattaaattggtcaagaaaatcagtgtatgcgagctctctacagaaagtggcctttgttttctaaagcactggggattatttctgtagctaatatatagttgtacagtttctttttagagatagagagtatctctgtgttctgatgaagacatttttta

SEQ ID NO: 16814 - DNA, 936 bp, Homo Sapiens
gcacgaggacacttgttttgtagctatatttagctgagaatagtttctttattgatgttttctgttagcatccaaaagtgggcagtggctaaatgggatagatgctctgtggtggaccaaggtcatcctatgttagactggcattctgctgatgtctgtagaaagatcaaagaggtgccatgtaagccagctgctcttaactatataaaccctgcaaaactgaagtttgaactgcttaaataaaaggattgtttggtttaagacagagtgataaataggctaccagattcttgaagtcagcacttagtagaagagaaccccagttcttgctctttgctgtcaggagcaacctgtttgtggtatttgcccagagtccctccagcaccacccctccaattgagatcagctcctctcgtctgaccaagttgacccgccgaaccaccgacaggaagagtgagttcctgaaaactctgaaggatgaccggaatggagacttctcagagaatagagactgtgacaagctggaagatttggaggacaacagcacacctgaaccaaaggaaaatggggaggaaggctgtcatcaaaatggtcttgccctccctgtagtggaagaaggggaggttctctcacactctctagaagcagagcacaggttattgaaagctatgggttggcaggaatatcctgaaaatgatgagaattgccttcccctcacagaggatgagctcaaagagttccacatgaagacagagcagctgagaagaaatggctttggaaagaatggcttcttgcagagccgcagttccagtctgttctccccttggagaagcacttgcaaagcagagtttggaggactcagacaccgaaaccagtagcagtgaaacatcagatgacgatgcctggaagtaggcatataaatgctcacagttaaat

SEQ ID NO: 16815 - DNA, 596 bp, Homo Sapiens
gcacgaggcagaccgcaatgggtattgaagttgaaggggtacatttgataagagagtcggtattgagaagtttaaatttgtgaatttgaaggctgcgtgggtgtggcaggtaagggaaatgaggtatctgggaaggcttgagtgtaggcaaatttattcatcccaagtcaaactcttgatctctctcacgaaaactatgaccccccctggttgcccctgacctctcaatgttggaacaagccacaaccgtggagttatccttgatgactccccattcattatcccttctgtcccaccaccacagctgtcatctgttcaccagaacgttcttttggttacactccatgtgacatcctgaggctgttgcttctctccagcttttctgttaccatcctggtcctggctactgtcacctagtgggccactataatatggcttcctaatggatcttcctgcttcctctgttgcctcattacttttctatatagcagaatgatcttttgaaaatgtgaaccagatcacattattccctagttaaaaccccccaaggcttcccatcacacttggaataaaatccaaaagaatttttctaaacc

SEQ ID NO: 16816 - DNA, 314 bp, Homo Sapiens
atcccccgggctgcaggtgaaaacacagtaattgaacaatttaaaacttagtaagtcacatgtagcacagaaatacaatgacaggaaataagttagacaggtgaagaaatgtggaggatagtgtgtgaagttttagttgtgtatatgtaactggagttccaggagaagaggaaggatagaacagaggaaatatttgaagagttactagctgaaaattttccagaactgatgaaaaactaattcatagattcatgaattctgacatatccaaagtagagtaaattttaaaagaggacacatcctagtgaaactgc

SEQ ID NO: 16817 - DNA, 541 bp, Homo Sapiens
agtcggcgctgctggacgggtggctgcagcggggcgtgggccggggggccggcggcggggaggccggggcctgcaggcccccggtacgacaagatccggactccggcccggactacgaggcgctgccggctggagccactgtcaccacgcacatggtggcaggcgccgtggcagggatcctggagcactgcgtgatgtaccccatcgactgcgtcaaggtgagacctgcacccggcttcgaaccctacctggggctgacccgacccctgggtcttgtccggagccaggatcccggctgagagccggagccgacatgggttccttcctggctcctgccactaccacatgattcgaaccgacactccattcaagcaaggtcccagctgggagttgatcccagtcaggaaccaggacctatttctaaccgtcagtgaaatctgaatcgggactcaggatcgaaaatctgtcagccaaagccctggaccccacctgggactaaacaggaatagggtgggatgggggtatcccgaagctcaggtaa

SEQ ID NO: 16818 - DNA, 1157 bp, Homo Sapiens
  misc_feature (243)..(267): n is a, c, g, or t
gcacgaggattgttttaacacagtacctaagactaatgctttctgtggacaccactgagctctgcctcaactccaccctctgcgaccggaggactatgcccctagtaactgctgtcggtgtggacgctgtgctggttctgttttctaaaggagcagaaggacaggtctctgagacaggatcgttgtccctacaggaggaacagtggccttgcttcttagacggtcttcactgtgtgttttaannnnnnnnnnnnnnnnnnnnnnnnntaaaactcttttgacctgtaacttaaagatcataaacttcaggcaataatattttctgtgtaagcttttaaaattatttttggggatcatagcttgttttattttgtgctataaaattaacagtattaaatgacttatattcttagaatacatcgagtgtcttttcttaacagattagtgcctttttatttttgtattccgttttacgttactggtcccagcatcaaaacccttgtttccatggcctgtttgtatattgtctcaataaaacttgcatcagccggtggtggcggcagcttcggtgtttcagtgtctcctcagtccgcccccactagcctcctggcagttcatcagtggtgaaatctctgatgcttctcagagacccttagtgctgctgctgaccaagagctagaatgaagtcttggcatccgcccattccaacactcgggcacccagaggagagcacctggggtctccctccaaaagagaaatctgcctcccagagtgtctgtcttgtaggtattgtatgggagcctagtgcttggccttctgagcatgaggcaatagttcccacaggttgcaccaccacagagaacttggatctttttccttctaggcacccatatctgaggcttctagtaaatatttcttcagcatgagctaaccagggttgaatggtatcaagcagaagtcatgggaagtgagcagcctcattgcaggtcagggcatgatatctgtgcggctttcttgaatccttttctgttcttggctgtaggtggttctcctgatgaactttgggagacctccaagtggattggcttgaggtgttgggaggcccactgacaccccctcagccagggccttgtctctcctactcccagccctcgtgc

SEQ ID NO: 16819 - DNA, 1519 bp, Homo Sapiens
  misc_feature (354)..(404): n is a, c, g, or t
gcacgaggaaaaacttggccaacgatgtgctctaaatatagtgcttgtgttgggttaacttttccattaatttctcaacatcaattattcaggcccctacagttgtggtattgaggcccctaaaggcttctgcctttcaccaattagtgctgccagttactgaggcttctcccaaaaggtatcagtccagtcttaaagatatttcattgtgaaagaagaaactaaactatcaggcctcttttacaaaatgagagattgaatttaagcttgtcaagcacgtactggaaggtatgaattacactaccatgtgttttgtatcttccctttcaagtgatgatgttaaatgaaggtaannnnnnnnnnnnnnnnnnnnnnnnnnnnnnnnnnnnnnnnnnnnnnnnnnnctggtttatagaggtgtcttatttctaatgcaacagacccccaactttaacagatttgatatggatgcatttattcacaagcaaccccaaaagtccaaaaatgtaataattttgacaaggcccaaagttgagatgctatgaagcttgtgtgtgtgaaaagtcagttatgattgtctggagagaagctgtggtgtgtatgctgtagagtttccacatttcacatgcagtgtactccaaaaagcgggtttgggtcaaccatttcccatctctttttaagaagtgactgctgttggggccaggggacatcatgggaggggggctgtccagttagctgtgccctgcaccttcagcccaggaaagatttgaacagagcaaaggcttcaagagagggcagaatgtattcggcagaaaagggactcaggtaagcccagcctgggatgagagcagaaaagcattcaagatttgcaggccttgctatggatgcgcttaatcaccatggaggccagcaatacccatctcagcatggctttgatattctctacttcctggcctttaaaaatgacctataatttttcagtttgctttactatattttataaagaaaattctatcttatggttgattgagcattgagacttatgaaggcattaggatagatagctcaggaatgtaaaggttcagaaaaggtctgttttctcagattaacaaatatgatggattccatggctgaccttggtgcttaaaccaggaggtttcaatctagtcctagagttgtgtccctctgaaaggcccaatgccatgtaactaactttaaactggatatatactttgagccttacttaattcacagataagttgacttaactcagtatttttatttcaattaatgaaaacagtcctcttttcaaccccaggttgcttacattttgctggtctccccaagtgaccattggtggagaccaattaatgaaggaatgaaattcactttattgggactgtggtattcaacagagccacacttaaccactttttccatgaagaatctccagaatgataatgcccaaatatggatggccaagaaaaattgtatctacggtgtggctttatgtgttttt

SEQ ID NO: 16820 - DNA, 740 bp, Homo Sapiens
  misc_feature (507)..(552): n is a, c, g, or t
ccttttgaatgactttattgagaacattttgcaaattagattttacaatttaacattttacaattagaaattttatctgctattacataagctgcaaacttttcaaaaacactacagaaaatcttttatttctttggatttttctgttccatgttgagctcctgagatatattttttctttcagcttcattttcatcttccttggaagatgaagaatcacattcctgacatatccatccgtagcctgtctgtttaggagactttttcaaaggaggatccaaacagccaaaatggtagcagagtctgcattcatcacacctgcagggtaaacagatttataggtaggtgtatctaaataatataaaaaccatctacttcatgaaaagacaaaaagacaaactattgtatatttcaacttcaacactgttaattttatccttggctcacaagatcattaaattaatgatgatgataaaggcaaactaaacctgaaataaatgttttagnnnnnnnnnnnnnnnnnnnnnnnnnnnnnnnnnnnnnnnnnnnnnntttagaacactgacagtagaaatattaagagcatatgaatgaacgtatatgtataatcatgtgttcaaaacaaccacaacaatttcaattgtgaacttaaagaattaatcatttgcccattaaatcattttaaagtatttaataagatacatatataattccaggatatgaattcaataacctcttgc

SEQ ID NO: 16821 - DNA, 1001 bp, Homo Sapiens
gcacgagggcatgcccgggagggctgccttgtagagaggatgtgagcagcttagtcgctcatctggccctgtgattcaggcttatggagcgttaagaataacagctgtcaaatggcctagacatggttaatgcaatttgttgctagtggaaatcctgaattgcttcctttctgtgatcactgctacttcttaagatgcttttgatgaatgtcatctgccttacaagttgacacctgataacttctccctgatgggtttccgaactggctgacttaaccaaaaagccagctcttgccatctatcttgcattaaaaggaattcctgaggctcctaaggggtcagctgccccactcctgacttttttatttttaatggtctataccttctgcaacatttttgtttatggccatttgaatagttggactttgactcctcacttgtgaataataggaatatattttgcagaatctaacataatacccttaaaattcatactggacaaccatcagtgtgatgtatagtatctggtgtaaacaaattttattcagcatattaaattattctgtgttttgcttttccttgatatgtaggaggtgcaccagtaccagtttttctcttgtggtggcttaaaacgctgattgccatttgcattgtctactgaaaagctgtggcagcgagtggtattattgaccatgtgttctcatgtctttttgcagatttaaaggttttattgtagtgtccatttaatatctgcatgtgtgtttaatctctgaataccatgtaattaaactgattaacttgtgatggtgatggtgattagcacacactaaaaacccaatgaagcaattgtctccctcttcttaactggaaatcacacttgtgaggtatggtatccattatcaacagtggattcatgattgacttcatattttgtgtatctggttataaattttgtatagcatttaatttggcacttaatataaatccatttgatttgaata

SEQ ID NO: 16822 - DNA, 612 bp, Homo Sapiens
  misc_feature (49)..(58): n is a, c, g, or t
cacccacgcgtccgctccatcttgtctaatgcatggagaattcaaggannnnnnnnnncctcttttcatagcaccttccagttgccagttgtaccctggcccttctttggaagtcataatgatgaatatccattaataagagattgatgctctttcaactctcatgtcatctataccatctcagtggagaggatgactttggatgaggttggaatagaaaggaaacatttggaagtccactgcagtgtattatatgctgtgtggaagtctgggggttaggaaatacctggagggagaacttcctaagaaatgatttttggttcttttaggccttaacagcacaataaaagtatcccatgagaccattatgagcaggacacgacattgtttcacaccttgggctgtgactatttacttctcggtacagattactctggttaaatcactcagtaaagaaatcttttcatgctcacaatctgaacctgaaggctattactgaagagaattgcatctgacaacaaaatttaatttacttccagagaaaggaccagaagaaagtaaattttcatttatgtttttaagtctattgtcttaaaaagattcttttccctt

SEQ ID NO: 16823 - DNA, 156 bp, Homo Sapiens
ccacgcgtccgaattatccaaagtccattgattttaatacgtgttttggtttgtaaacaaattatagtaatttcttgcacatttttggaaattaattgtataagaatttatgtatctgcttctagatacagtgtgtaaataaaaaatttcgttcac

SEQ ID NO: 16824 - DNA, 1243 bp, Homo Sapiens
  misc_feature (164)..(472): n is a, c, g, or t
  misc_feature (486)..(580): n is a, c, g, or t
gcacgaggatcactccaaagaagactttaaaaagggagcagtgaaaaggtcttaataatttattgattgaattaagaaatactagctaattaagaatctgagtctaaacagcacagattttttctttctgcttttaaattgtgttttaaaaaaagagacagggnnnnnnnnnnnnnnnnnnnnnnnnnnnnnnnnnnnnnnnnnnnnnnnnnnnnnnnnnnnnnnnnnnnnnnnnnnnnnnnnnnnnnnnnnnnnnnnnnnnnnnnnnnnnnnnnnnnnnnnnnnnnnnnnnnnnnnnnnnnnnnnnnnnnnnnnnnnnnnnnnnnnnnnnnnnnnnnnnnnnnnnnnnnnnnnnnnnnnnnnnnnnnnnnnnnnnnnnnnnnnnnnnnnnnnnnnnnnnnnnnnnnnnnnnnnnnnnnnnnnnnnnnnnnnnnnnnnnnnnnnnnnnnnnnnnnnnnnnnnnnnnnnnnnngaagtagagacagnnnnnnnnnnnnnnnnnnnnnnnnnnnnnnnnnnnnnnnnnnnnnnnnnnnnnnnnnnnnnnnnnnnnnnnnnnnnnnnnnnnnnnnnnnnnnnngtgtgagacagtgcacctggccgaaatagctcaagtttctgaaaaacaaatctgaatctatttgttattcttagcgtcactggtctggctttcagaattaacatacaaggttgccacacctagttctgcccagctttatgtcttttattccagtattccaccaaagtttgttttcctgcattccagttctcaagtcttaagataaagattgtacttgacagtttagtatatccataaaactatttgaggtggttaaggttcttgggttcattttccttaatactttgctgaatattgtagattgtaggcaatgaaaaagtctactaaattaggaaaaccttgaataattaggtatcctaggtaagagcccctaaacatcaagcaatctgtgagtctgtaaagaaataaatattttttggattattcttatctaattccacccctgttggaagatgatttctttgttctttgcaactatggaagctgtgaaaatcatcacaagtgcctctgaaagcgagtgttaggttggttagagggtttaatattttctgcaatggtttgtaggaattttaataaatgtagtatattttctgagatgattttgtaaaagtactattttaaatatcaaatcaacccataaattcacatttgtgttaggaacag

SEQ ID NO: 16825 - DNA, 1147 bp, Homo Sapiens
  misc_feature (1079)..(1088): n is a, c, g, or t
gcacgagggtgaaaactttatttgtccacaccaggattaccgaacagaaaaacaaaggtggtgagaagttggtatacatagcaccttatttacatgatggacttgaggaggcagttaatcctatggttgtgtatcacaacctttattagcaatgccatcttctcttcctcctcctacttgaatatcccttacggtcaacagcccacgggcttggcacacaccagcactaatgtgctccagagtctttcccctacttgttacatgacagtgccttacatgtctgaaagtgctcatacattcatctgttcctttgatcctcacaacacccctgtgaggtaggtaggacaattatgagtttcccactttataaatgaggaacctgagttatggaatgctggaaaagcttttctaagggggttcaagtagtaatggttgggtctaccacataggcagattcctggcttgctttcttgcacactgtctccctgtattccaatttccctccccttaatatttttagcctatttttctgtgtacttattcaagacctttcccttgacttttattcccacattagggttactttacccattgaatttcacaataccacatccaaatattaattccaatgctcttcttcagcactcctttcatctcaaagaaatccctgtcttatgcactttgctaccattaatagatttatagaatacaggcctaactctccgtcaagtacttctgtgtttccagaaaatctacctacctacctacctacctataattgacacatatctttccatataatagcctaagacaattgagaatgaatatagctgtatccatttcaatgccttaaatatatgctcttttaaagtaaagagtctatatgtctggtgtggcacttagaagttcatgagcatattaataaatattaataccacagaatgctaccttaaaattgttaccagtatttcaaatatacatatgctgctgtgacagaaaatattacaattaaaatttcgttttcattttgtcttttattatgctatttcaaatttttttagagctggaaggtactaggnnnnnnnnnntctaatacaaatccctcaatccggagataaagaaattgaggcatgaattggcctcgtgc

SEQ ID NO: 16826 - DNA, 663 bp, Homo Sapiens
gcacgagggccttaaactacagatttctggtgactcttaaaactggtttacaaagattgagaaaacaattagattgaagagttttgcttcaagtagacctgcattcatagctagagtgcatgagattttcagcactgtagaatttcacacaggcacaagcataacaccagtactttagcagccgccaacagttgcatctattaaacgttttgagaaatgacattgacttatgcacatttaagcaatcaacaatgttttagaagtccaggtaacatataaaatatattcagacctagttttactttccatattgttgctccaaagtaaggtaaataggagttttagttgtactggcctgtaagattttttaaattacacagtgcatgacaacaactaaagccaactcagtccttctcttggcattgtgagttgaggacctttagccaactgttagctcatctgactatctgtctagaccaagggtcggcaaagttttcagtaaagacccacagagtacatattttggagtttgtgttgtctgtaccaacagacagacatggtgtctgtcccaactacccaactctgccattgtagcactaaagcagccatagacaagatgtaaacagaagagcatggctgtgttccagtaaaactttatttaca

SEQ ID NO: 16827 - DNA, 1002 bp, Homo Sapiens
  misc_feature (163)..(172): n is a, c, g, or t
gcacgaggaagccagcaattttattttcctcaaatgtagcaataattttaatctgtacatacataaaacaaacagtgcaattataaaaccttgaaggtgacatgcatattttaaggtgcagttgggatgggggaggatgttagcatctccaattttccttacnnnnnnnnnnctagttccttatgcaaaagcactgagtcaggaaacttcatctggaatgctgaagttaaaggtgaacttcctgaagtctgcgcgtctaaatatcacaaacaaaatggaaatgaccttctagagcagtttggtagggactagagtaatatggctggctttcaagctggaaatgaatgaaatcagggatgcattttctgaaaaactaaaggagataatgtttgtaactgagtgtcctatttctgtttcatagttgctaaccacatgagcccttccaccaatctttttattcggcatagtttctgaatagatgctgttcaatggagttatttgtaactaggggtggtgagatgcagaaggaaggacctggggaaatggcttcttccttgaagtctgagtccatgctcctcttccactgttcttatggccttttctctgccatggaggcagaggtagctggtgcagaatgtcaggtgctgtcatcattcacaggcccagggatgcagacaaaggtgagtgatgggggtctacctttgcttcttccacaatacctttctcaagctttcctggccttgcagcggaacttctagaactagaaagtcagttcactgggttcttgactcagaggccaggatgagatgggatgtggcagagtcacaagacacaaagggaaaatatggtaccaattagcctcagagcaggatagagaaatttatatttgcactgatgaaaattcaaattcccaaagtcaatctaaaaaatgaagatttcctttgagtattaattttttctctgtacaagtagcctgtgcacttctgttcagatgcctcgtgc

SEQ ID NO: 16828 - DNA, 99 bp, Homo Sapiens
gcacgagagcatctttattgtggggaggggcccggcccccaaagttctgacaccaaagacagacaccagacaggcagctgcagacagtcggacgcgtgg

SEQ ID NO: 16829 - DNA, 1392 bp, Homo Sapiens
cgggctgcaggaattcggcacgagggttcagcttgcttagattgtgttaacagttcatttaacaaagatccgttttaactctgaacaaaagcaacccagagcggccattctctattcccatgctggtcaatacgctttcattaccaattggcccttaccaaacttttcttatatatatatttgtattttactatgatagttgagaaatttagcctcttagtcatttttagctgttattgtggaagacctcaaatacaagattagatgcccttgaacatgttttaatgatgtgtgtcatgttactatcaatggtgatttcaatcgcaatattttaaattgatgagaatgatttgtaaacatgaagttactattacgtaaattctgtttgttatagagtttcttcagttgttacccaagtgtcatcctagagaagtcagaagaatcagaatccatcgtattttagagttatgtgaatctacatcataaatgggcattaacattctaaattgcttggtttggagaatgtgttagcagcatagctatattcaactagggagatgctaaatacacagaagtttcaagagccttggaacagaattacaggggaactatatatgtatatgtatattttattaaacacccatctgcactatcagtattgcactaatgtggaatttgaaagactattttgctgatactgtatatatgcgcatcattcctgattagattgttgtaaagacaatctgaaagatctaaggttttaaaataatttggtttgaaaatatacagttgtcttgaaggaattgctgtcatacatgaagttgctccgagctgtctttattctcttcttggtcaaggttaacaattgctaaatgatcgcaaattcacctaaacaatacatttacaaagccatctttacatgcattaaacgagggctacaacaatattgttttacaaatactagcacttttttttctgttatgtacttagtgttagagggtcaaaataatctttctgcttagcatctcttaaaccatacctgcaaatatagcaggattattacatttacagtactttaatacttgtataaactatgcagaaatttttaataaagtgtaatatattttataagctaataagactgaatgggtaaaggtttttagcatgcgttagtatacttgcagatactgaaacattttggtaatctttcttactaaagatgtgaatgtttaatgtaccttctctgtttctactctgtagtccaatgggaattcagtaatgacattttgtcatgtcaaactgtgaacataaatttgtactgtacagtcctcatatactatatacagtatgcaatatatattatatacttgttaataaaaccatcagaatatt

SEQ ID NO: 16830 - DNA, 639 bp, Homo Sapiens
ccccgggctgctggaattcggcacgaggtttttaaaagtcattatgaatttattatttaccctattgttaaagtacacatatacagtggcgatacaaacgcacaactcggagactggccgtcagtgcacagctgacacaacgtcctacctacgtctcctgcacggggcgacggggactatatactgggcaaggactgtcacaagcactcctaaaacgcgacccggcgaggctcgggctggaacccgggcgcagagctgcctcgcacaaacgttctgggcactacatcgggaccacagatatttacaaagcaagcttgcgccacttcaggccacagcgcgacgtctctccgggtgggggacgtctaccttcaagaaggggtccagcaacaaagaaaatctcttaactcggctctgacccaccccaacctccctctgtacttcaacacacagctcccacccgctcaaggccccgtactccaaaacgcttacacagtaaccagcctaggattgagaaagcatcgatgggctcaggcagacggccagccagctggtgggggggtgaacaactgtgttctgggacgccagccagttatggcatccggggaactctggggaggataagcgagaaccaaggtgcac

SEQ ID NO: 16831 - DNA, 906 bp, Homo Sapiens
aaatgctaatttttatttactgctaactgtgcaaaagacaccaattcaatacagtgcagtaaaacacttacatacatccagtattaaacaatagcatatgggataaatctaaagcagagaaccatgtgccttcaaaactgatatcacagaatgcaactggcttcagataattctcaagaaacgtgaagagctctttaatttaatattaagtgagttatccagaagcaaaggctcttggttttactttctagaaaaaagtggaagttactccaattctgcatggtttaatatgatgtgtgatttttgaaccaatgaaatactttatattcattttatcaattggtaccatcagctaatataaagctgacaaatggctgacaggaaaacagctgaatacaatgaagtatgctcaatatggggctagttgtacatccatctcaatttccttagtcacagcccaaaataataccccttaattttaaagtactattttaaatcaaaagataaaataattttaaagacaaatacaatagtaaacactaatcacctaaatcatttaaccactaacataaaatactttttaaaaacaaaaacagcaagaaaatggcagtgcaagaatacttcatactgctggatcttacataccctgaggtacataatgagaagctgggggagatggagcaatacagccaattggcccaggatttatagcaccatgaatttgagaagaaccaccatatgctgtaccaactggatgccaggggggaacacaggaataatctggcacaccggaaggcaggagtcaaaacctggcaaagtggctgcccatagggatctgacattactggatatagactgctccatgagggacagatgaagattcagcattcggaaaagtatcatttg

SEQ ID NO: 16832 - DNA, 1231 bp, Homo Sapiens
  misc_feature (147)..(170): n is a, c, g, or t
  misc_feature (1090)..(1105): n is a, c, g, or t
gtgcacaatgtaggttaacagtagagggcttaagtaacacccctctaagcatttgttttcagtacttcctaggagtggttgcatttgggaatggaattgttaaaacttgatgcttaggagcgaatgcagactattcattgggtgttnnnnnnnnnnnnnnnnnnnnnnnncagaggaggtatgcagggagaggggttctgtgctcctgagattagttcagatggtctaaccattgttctatatgtgcattttagttaatattgtgtattaaaggataagtcttaatgctcaaagtatgttaaaaatagatgtagtaaatcagtccctttgtgaatgtccttttgttagtttttaggaaggcctgtcctctgggagtgacctttattagtccaccccttggagctagacatcctgtacttagtcacggggatggtggaagagggagaagaggaagggtgaagggaagggctctttgctagtatctccatatctagacgatggttttagatgataaccacaggtctacaagagcgtttttagtaaagtgcctgtgttcattgtggacaaagttattattttgcaacatctaagctttacgaatggggtgacaacttatgataaaaactagagctagtgaattagcctatttgtaaatacctttgttataattgataggatacatcttggacatggaattgttaagccacctctgagcagtgtatgtcaggacttgttcattaggttggcagcagaggggcagaaggaattatacaggtagagatgtatgcagatgtgtccatatatgtccatatttacattttgatagccattgatgtatgcatctcttggctgtactataagaacacattaattcaatggaaatacactttgctaatattttaatggtatagatctgctaatgaattctcttaaaaacatactgtattctgttgctgtgtgtttcattttaaattgagcattaagggaatgcagcatttaaatcagaactctgccaatgcttttatctagaggcgtgttgccatttttgtcttaatgaaatttctgtcccaagaaaggcaggattacatcnnnnnnnnnnnnnnnnagcagtttggagttggtgtagtgtattcttgggtatcagaatactcatatagctttgggattttgaattggtaaatattcatgatgttgtgaaaaatcatgatacatactgtacagtctcagtccc

SEQ ID NO: 16833 - DNA, 2056 bp, Homo Sapiens
  misc_feature (74)..(90): n is a, c, g, or t
  misc_feature (822)..(838): n is a, c, g, or t
gcacgaggctgaaggctccccttcaaaatcgccatccaagaaaaagaagaaattccgcactccttcttttctgnnnnnnnnnnnnnnnnnggagaaagttgaggcctaaataaagtctttttataattattattataacaatgtgacattgcacatctaaataccacatttaagttgatcattaatatgcaatggtagatcagattgggggatgtagcaaactggactttaagaactggaaagaggttttacaaaagaaaaactttcagattcatctctcattttatatgtccagaaatggctttgaattttaagcaattactagttttaattagctctgccctcatgaagtattattataattcaccataaacagctatctgtctgaattacttcaggccttctccataatatctgttagaaagaaattgccagtgagcaagtgagaatttttatttctcaatacctgcttcacttgataatcatattataattttttatcatgattattgactatatttttggagtcccattgtttcagtgggcattaacagaatgctttaaaaacttctaagacaagaatctatagcattagtatacactggcacataattttttaaaaagttttaagaaaagattcatttggaattttattcacagtataaaatttcctcacctgaagtaactttgtttgccaaaaaagttgttttaataaactataatttttgaaaacttccttttttattagtttagaaagccccttatttttcaacaaaggggattttgtacacataacatgggttatttagtttaactctggcnnnnnnnnnnnnnnnnnttttgtatgttgatgtttgtataccgttcagtataaaagtgtcctaagcatattagccaatcttttcacagtagagcatacttaaggctgcttggtactgagtatacttaaatataactccagaatccagggacttggtgttaaaacaggattagagcatgtaaaggtacatctagattcatatttgaatcttaaactgtatttttctcttagtattgctaatgagtaaagaaaagtctcataaggtagccaaatgaaaaagaatgaaagggaaagtgaaaaattaaggggacaaaagatgggatgtgaaaagaagaattctagtttgatggtgactcatattcacgataggatacaaagtgtgatttgttggaaacatgtcccaaatttctaaaattctgcttctctgccaaaagcaatgtctttcttggttgatatttgagttttaaaagggtcaaatctttctaattttttgtatctttagagggcagcactagaagaaatcagcaggtctaatcccaccagtaagaaaactaccacttcttgatttttacagatttaaaaaaatcttttcagtgacctttctttttaatgtaaatacaaatttaaacctaggcttaatataggcgtttcccctttcacccaagtgatgtcacagttcgatgcaaaatcaatgatccagaatgatcgtgggtaaaaataactcaaagtgtttcttaagggtgagttggcatgcaaaaaattacattgattacagtgtgttttggagctggctctgtttgtgtgcatatgataatgcagagttgagccagagcctggaaatgtcattctagatctcactaactactggaatcagtgttttaatctcttggtggaaactttcagttgcttaactctctattggaagatttttttaatgttctacatcatttatgttgtattacaatgtatgtagaaatagtaaccctgtgaactatgcttttccataactttttaaaaatatatatatctaaatgaatgcaatgtgcataaatattttttaaacataacagtgaactattgcaccttttgctaatgcctctatttacttgctttggcataaagaatgagccaatgaacctctgtgtcctgtggaaaaatgtataaatgttatctgatattgctcttagatgtaatgctaattaatgttaaatcacaaataaacagtattttaaatat

SEQ ID NO: 16834 - DNA, 1962 bp, Homo Sapiens
  misc_feature (1859)..(1868): n is a, c, g, or t
gcacgagggaggaaaggagcctggcggcaggggtctctgcaatggcaagaaagtgagtgaatccagcgctgccacctggttatccccttctcgttgaaaatagcagcgcgggtgcaaattcctaaacacaggctgcctgcactcggtgttacctcgggctgaggcatgataatattttattttttaaagctgtgaggaaatgaaagtgaggctttggttggggcgaggcagttgtgaaagaaattaaaataaaagaccctttgtaaatgcagacttagaagaaatactgaatttgtgtcagaagttctccagtgtttgtgttaatcgtgtggtgataatcctgtcctccttttaaagcgaattctctactgaaaggtctgctctgcttaaggagctacaaactgctctcaaaagaatgaaatactgagttccaattcagtgaggcacagtgttggactatggcacatttagttggagtcggggggaggtcaggaatatgatcagataatggattttataccttagagcaaaatctattagtctctctcagtttatcaatttaaatggctttaggcttatagggggtgtaaactttaagaatataattctcccattcaagtttacagcaaacatctagccaccttcaaaacaaagaatatacagaccatcatttagcaatactaatacatgattttccttggggatggcaggtttgagaatcctttagcaacaggacataattcccctaaattacagtgaattatttataacgagataaagctttcaggtacaagctgaaggtggggtgtctaacaactaaaaactatcactaaatctcaaagagaaagttcttgcaaaatatgtaaagttcacaaggtgcagacattttccttctttaggcttttatctaaggaagggctatgaaactgggcccatctgtatacaggctcaaatttacgtttttaaaggaagaatctatgcagctgaggcttattgcaggaaatacttcatttgtatgtaaatattattgtaaataaataggaggctgtatatttttgaagttgttgatccgcactgaaatagaagtctctaggatctgcatataaacaataaatgtttcctagaaattagtggttttgtttgggaattagaaaaatttacattctctcccaggtaacatagttctctcaatgtaaacttggaacctgaaaccctacttaatttagagaaagaaatgtctgagaaatagttcccttgatttcttatgctggcattaagatcaattatttaacagatagtcctctgagatacaagtaaggaatatttagacacaaatccttgtcctatagaaacagatatacccaaatgacaaattgtttcttcataatgatcttccatttttaacactgataccactacacagtacatatgaaaacagaagctggggagaagaatgtttttttcacaattgaattgctgcatttctcaaactttgggatctatgaaagcggggagagggaacctgaatattaattatgagcacaaatttgaaggaaagaaaacaaagaaccattatctaatcaagctttgaaagtcctgcatgtttgccttttattttagtgttgacgccaacatagactgtctaaggtatttttttccccaaacacttgaatcttggtcgttggtatgtaatccactctctagagtccagtgtactttagacttcatctgagtccaatacatgtaccacactactgttttattaatgtaaaaacttgtaaatgaatttcagatgggtgatttaagtgagtcacaagtcacaaactttgctattcatagttaatcaaataaaactgggnnnnnnnnnncagatgtggtgtaataaagaaatataagaatttctgttctataactgctctgttaacatagtttttaaactttaaaaatgggactaaaagattt

SEQ ID NO: 16835 - DNA, 871 bp, Homo Sapiens
  misc_feature (375)..(422): n is a, c, g, or t
acccaaaacgtccgttgtctgcaggcactcagaatggtccagcgtttgacataccgacgtaggctttcctacaatacagcctctaacaaaactaggctgtcccgaacccctggtaatagaattgtttacctttataccaagaaggttgggaaagcaccaaaatctgcatgtggtgtgtgcccaggcagacttcgaggggttcgtgctgtaagacctaaagttcttatgagattgtccaaaacaaagaaacatgtcagcagggcctatggtggttccatgtgtgctaaatgtgttcgtgacaggatcaagcgtgctttccttatcgaggagcagaaaatcgttgtgaaagtgttgaaggcacaagcacagagtcannnnnnnnnnnnnnnnnnnnnnnnnnnnnnnnnnnnnnnnnnnnnnnngacgctgtccaatagaaaaagttggtgtgctggagctacctcacctcagcttgagagagccagttgtgtgcatctctttccagttttgcatccagtgacgtctgcttggcatcttgagattgttatggtgagagtatttacacctcagcaaatgctgcaaaatcctgttttcccccagagagctggaggttaaatactaccagcacatccctagatactactcaagttacagtatatgatcactaatatagtatgctcttggtaccaggagctctgatatatatctggtacatgtttgataatgacttgattgttattataagtacttattaatacttcgattctgtaaagagtttagggtttgattttataaaatccaaaatgagccttttattgaatccagttctctatgtgaccagttctctgtatgaatggaagggaaaagaatt

SEQ ID NO: 16836 - DNA, 1277 bp, Homo Sapiens
  misc_feature (375)..(389): n is a, c, g, or t
  misc_feature (854)..(866): n is a, c, g, or t
ggctgcaggaattcggcacgagggttcccttataaaataatttttttccatttttatttgatgtttccaaatataaaaaagtcaggattcttacatcaattatctcaaatgagaccatgcaaagcaattcagtgtatacaacaatcatttttccccttcagttctgctgctttatacaacagtgtgattgacagaaaattggatggcatgtgcctggtcagaaaatgtcatctgtttacaaaataacatcatgcagcacagtttctactttgtctgcaagtcaattcacaaaaactacttattttctgttttttatttgggaggcacatggaactgaaaaatttagctgcccaattttattcaactaccccaccnnnnnnnnnnnnnnntcacaaatgacagtcccaacactctgcaaattttggagggttgagatagtagacactatttgtcatactcagcagagttaactatttaacagaaataaatctccctagggcctttcctctcattttgctagactgggttccaggagaatcgtgaagaacccctcatgtaaaatttgaagtgtgaaaactgtgttgttgcattatgcagatttttgctagttgcatagactaaagacgttttgctaaatggcactgaaaatccttaccgagtgtcactattcagtccaagtgtttctgaccaaagaaaattatacaacaatatttataggctaactttaaagagatggttgacattaatactgtacatattttacatgtcaaatacatagtccaagagtttataaaataaattcatgcatcattaccttattacctctaagaatatcatgtacaagatgggcactnnnnnnnnnnnnnagtacttatgacagcatttcaggtggaagcagtcttatatacaaaaacaatccagtttctctgctatgttaagtatataatttaaggaaatttcagagattactgaccaaaaaaatcttagtccattgaagatagaaagtgtcaatttgtgggatttaaaatgtttcctttataaaagaacacccagaatatgtaacctctgtacaaagaaaaaaatataaaaattctggatgatcatgtttgatcacactacgtacttgaaatgttgctggttaaaagtttttctgctttactcattcctttgacagcattaatttgtgaacatttatattcagttcagctgtatttatggcacaagatctcatttccaaaatggcactaattttccttaagtgtaacagcactctattt

SEQ ID NO: 16837 - DNA, 1052 bp, Homo Sapiens
  misc_feature (122)..(141): n is a, c, g, or t
  misc_feature (309)..(326): n is a, c, g, or t
  misc_feature (624)..(646): n is a, c, g, or t
acatctataacgttattattttcagtggtgtgcagcatttttgcttcatgagtatgacttaggtatagagatttgataacttgaattcagaatattaagaaaatgaagtaattgattttctnnnnnnnnnnnnnnnnnnnntttttacattataactcacagcattgtttcattgcaggttttgcaatgtttgggggtaaagacagtaaaaatattattcagtaaacaataatgtgtgaacttgtaagatggataatagggcatggactgagtgctgctatcttgaaatgtgcacaggtacacttaccnnnnnnnnnnnnnnnnnnaagtttttcccattcaggaaaacaacattgtgatctgtactacaggaaccaaatgtcatgcgtcatacatgtgggtataaagtacataaaatatatctaactattcataatgtggggtgggtaatactgtctgtgaaataatgtaagaagcttttcacttaaaaaaaatgcattactttcacttaacactagacaccaggtcgaaaattttcaaggttatagtacttatttcaacaattcttagagatgctagctagtgttgaagctaaaaatagctttatttatgctgaattgtgannnnnnnnnnnnnnnnnnnnnnnagttctaatcattgatgatagcttggaaataaataattatgccatggcatttgacagttcattattcctataagaattaaattgagtttagagagaatggtggtgttgagctgattattaacagttactgaaatcaaatatttatttgttacattattccatttgtattttaggtttccttttacattctttttatatgcattctgacattacatattttttaagactatggaaataatttaaagatttaagctctggtggatgattatctgctaagtaagtctgaaaatgtaatattttgataatactgtaatatacctgtcacacaaatgcttttctaatgtgttaaccttgagtattgcagttgctgcttttgtacagaaggttactgcaataaaggaagtgg

SEQ ID NO: 16838 - DNA, 1998 bp, Homo Sapiens
  misc_feature (96)..(146): n is a, c, g, or t
  misc_feature (654)..(677): n is a, c, g, or t
  misc_feature (1010)..(1040): n is a, c, g, or t
  misc_feature (1063)..(1077): n is a, c, g, or t
gcacgaggcggagacgctgcagacccgcgacccggagcagctcggaggcggtgaataatagctcttcaagtctgcaataaaaaatggcctccaacnnnnnnnnnnnnnnnnnnnnnnnnnnnnnnnnnnnnnnnnnnnnnnnnnnngttgaagaggcagagcctgaagaatttgtcgtggaaaaagtactagatcgacgtgtagtgaatgggaaagtggaatatttcctgaagtggaagggatttacagatgctgacaatacttgggaacctgaagaaaatttagattgtccagaattgattgaagcgtttcttaactctcagaaagctggcaaagaaaaagatggtacaaaaagaaaatctttatctgacagtgaatctgatgacagcaaatcaaagaagaaaagagatgctgctgacaaaccaagaggatttgccagaggtcttgatcctgaaagaataattggtgccacagacagcagtggagaattgatgtttctcatgaaatggaaagattcagatgaggcagacttggtgctggcgaaagaggcaaatatgaagtgtcctcaaattgtaattgctttttatgaagagagactaacttggcattcttgtccagaagatgaagctcaataattgttcacattgttctttnnnnnnnnnnnnnnnnnnnnnnnnaaaattgggtcttagattttgatttactagtgtgacaaaataactacatcctaatgaaaatcaagtttgatatgtttgttttgaaagtagcgttggaagagttgttgggggttttttgcatccatagcactggttactttgaacaaataaataaaagctttctgtagttgcttcctttatcagaaaagaacatttgataccatggtatatcatttcctcttcattaaagaacagcttttctaaatgttgggggaaatgtccatagtcattactcagtcaaaacttgtgttctcatgagcctaaggaccattctagatttattacgtgtttttnnnnnnnnnnnnnnnnnnnnnnnnnnnnnnnatccataaaatgcatatgtaaannnnnnnnnnnnnnnaagcattcacccaaacaaaaaaatcacaggtaaacccatgtttctgagatgccattattccaagcaaaataagagataatcccttcaagttaaattgaaaattttcctgaaaccatacatttcaagtgaaataagtaattctagataggacaatttaaattggataattttaaagtgtctataattgcagtggtttatttgcaaaattcctaaaaggaaaaattttatcactgccatcacagcaggtttcctcatccagatgaggaaactagacaaatgctagtgtgttttaactagctaaacaaaactaagttaaatgaacatttaaaagtttccctagcgggccattccttagcaaaatgttggaatccctgttgctacattgactaaaaggtcatgatgaatggaatatgtaagacttggctcatagaaacctaatcagatggttagaggtgttggcagtttaggacctgctgtcataaatgtgtgaacaaccttttgtaacctaacctattgacctgcatgttttttctttaccccaattcattacatggaggctcaatcttgagtttgctttactggttcagcaaaagccaggaagaacaactttgtagtaatcaaaatgttatccaactgtatattgtttactttattgtaaatactggtgaacagtggttaataaatagttttatattcctttatgcaattattagacttttttctttatttgatatgcctttacagtagaaatagaaatgcccacactcattggattatctttgtttataagttagatgataccagtaaggcattacagtacatatcctagatcttttgagcttacgagttttaaacttgaatatgtatttccacaggaatgtttccacagttgggaaataaaagtttcatgtgatgcctagg

SEQ ID NO: 16839 - DNA, 923 bp, Homo Sapiens
gcacgagggtacagtgggagctattctgacatgtccactggaagttgtaaaaacacgactgcagtcatcttctgtgacgctttatatttctgaagttcagctgaacaccatggctggagccagtgtcaaccgagtagtgtctcccggacctcttcattgcctaaaggtgatcttggaaaaagaagggcctcgttccttgtttagaggactaggccccaatttagtgggggtagccccttccagagcaatatactttgctgcttattcaaactgcaaggaaaagttgaatgatgtatttgatcctgattctacccaagtacatatgatttcagctgcaatggcagaacacaagaaattaaatacaaaataatgcaaaatatttcataagtatggatgtgcaatattactggccatagtgcaaaaggttttactgcaatcacagcaaccaaccccatttggcttataaagactcggttacagcttgatgcaaggaaccgcggggaaaggcgaatgggtgcttttgaatgtgttcgtaaagtgtatcagacagatggactaaaaggattttataggggcatgtctgcttcatatgctggtatatcagagactgttatccattttgttatttatgaaagtataaaacaaaaactactggaatataagactgcttctacaatggaaaatgatgaagagtctgtgaaagaagcatcagattttgtgggaatgatgctagctgctgccacctcaaaaacttgtgccacaactatagcatatccacatgaagttgtaagaacaagactacgtgaagagggaacaaaatacagatctttttttcagactctatctttgcttgttcaagaagaaagttatgggtctctttatcgtggtctgacaactcatctagtgagacagattccaaacac

SEQ ID NO: 16840 - DNA, 2294 bp, Homo Sapiens
  misc_feature (375)..(408): n is a, c, g, or t
  misc_feature (1030)..(1055): n is a, c, g, or t
  misc_feature (1114)..(1128): n is a, c, g, or t
  misc_feature (1333)..(1345): n is a, c, g, or t
  misc_feature (1356)..(1368): n is a, c, g, or t
  misc_feature (2114)..(2131): n is a, c, g, or t
gcacgaggcgtagttccatgaagtatggattaccatttgtatttttcactaacagtaaatgtatttttcttattaattgtttgccttaggaatgatgaattacattttttgttccttcttaccataaacatctgcattcctcagctcagccttccttgtatgttgtttctttataaatggttgagctgctgatgcaggtattgccaagctaacagtacaaatcattttaaagaggaagctggcgcgtatggcagccgaggagcacactctgcaggacactggacaagacagtaaatattcaacttttaatgctgattaaaggagtataggtaaagaatacgtaggtatacataattggtgagacaaatattcacnnnnnnnnnnnnnnnnnnnnnnnnnnnnnnnnnnggtaaatactatccagttttgtagttgtccttgttgatttgtgtgatattaaagtattagtaataattgccaggaaactatcattagggagggtttagttggttgctgtttggactgggagggatgatttaaatttagtgctagaaaccaattttagtgactgcacagtttatcatttgtcagacagaaggtagctataaagctaccctgtaagtcatatcaaaaaagttcagaggaagattagtaaatatttatcaataaaaaataaacattttgtttttctaatatcttaacatatcctcccctttaggaggaagaacgtgcaaaacgtgaggagctagagcgaatactggaagagaataaccgaaaaattgcagaagcacaagccaaactggccgaagaacagttgagaattgttgagaacaaagaaagatttctgaggaaaggatgaaactagaacaagaacgacaacgtcaacaaaagaagaacaaaaattatcctgggcaaggggaagtcaggccaaactgtcttctcattaaaaacccaggattaaattgcaaactctgaactttttacaagaaaaatggaaaaactttgtatggtagcttcatgttgaagtggnnnnnnnnnnnnnnnnnnnnnnnnnnaatttgtaaaatctggaaagttagcttgttctaataggggctatgctctgcaattcccnnnnnnnnnnnnnnnccttccactaagtcaaatccttatcagatcattgttgtattctaaggagtgacgtatttttcacctgtttggattctatattagtggtctgaggaagagcagatcacattgtaaaactatggatggtctgataaggcttttactgaccccactgacttcagagttatactctgtttgctacatcataatgctggttttgctgacnnnnnnnnnnnnnatatatttatnnnnnnnnnnnnngttggtgattgcattgggaaattcccagggtattactggacctatgtggtgtattgttaaaccagtgtccttgtgatactgttgctcttgatgttcctgatacaggtaaggaaacagttggtcaactctgatacaaagtatatatacagttcagtattgtctctgttcattttgtttttatttcattgacaaaatcaaaccagcattccccattgtgtaaataaatgattttgctgaataaagtaaagtcttaaattcatatgttgaagcaattttttttaatgttatgttaagtcttaaagagggtggttcactttttgatggtcaaccatttagaagtcttagaactatatttcctcttgtttatacttttaacatagggtttatatgtacattaaatatacttgtgaattagtatttaatggctatttttacaaatatcaactttatgctgatagagcaaatggcatcagtgttacctttaagaaagactaacaacatccagaagatttaaattctcaaacctgtgcctctgttttaggatataagtattatcacaaagtatacttaataaaggctagaaaaatgcttttaaattatggaatctgagatcgttttcagagtgggccatcagaaagaacttagctttatactgtcaaaaaaaggctaagatggtcgagtcattttcattgtgtagtgtacttgcacgtttatttttaggacaaacacatttgaactttatgaannnnnnnnnnnnnnnnnngcatgtgaaattctatgaatggctttcattttatacctaaaatctgcctcatttactctaaacatatgttaagtatactgggtattaaaacattcagaaaaggatatgatctaaaatgcacctgagatgcataacttgtcatcagtagaaaaatattttattt

SEQ ID NO: 16841 - DNA, 911 bp, Homo Sapiens
  misc_feature (441)..(467): n is a, c, g, or t
  misc_feature (486)..(546): n is a, c, g, or t
  misc_feature (603)..(612): n is a, c, g, or t
  misc_feature (614)..(614): n is a, c, g, or t
  misc_feature (625)..(663): n is a, c, g, or t
ccccgggctgcaggaattcggcacgagggccacatctgccagagcctggagtctgcgaaggccgggacccggttccccggcccacagtgggggtgtgcaaacccgagagaactgggttgcaaattcgtgaagaatcagcatcatgtttggcagctgagtattggagccaggagcctgccatgaggttttgagaacagagtgctgttttagagctggcagcagcatctcagcccaagagaaggttatattcccagaggatgtcagtcccaaggaccagtagctgccatcagtttggattctgaaaactaactggcatcaacactgggtgtagaaacatgcttgccttatgtatcagaggacatgctcagcagatccaagagatatatttggcaactttttctagaaaaggcacattgggtatcattcattacattcttgagnnnnnnnnnnnnnnnnnnnnnnnnnnngagacagtcttgctgtatnnnnnnnnnnnnnnnnnnnnnnnnnnnnnnnnnnnnnnnnnnnnnnnnnnnnnnnnnnnnnaagcaatcctcccaccttgtagctgggactacagctcacagcacacctggctaaaannnnnnnnnngntttgagactannnnnnnnnnnnnnnnnnnnnnnnnnnnnnnnnnnnnnngggctcatatggtctcctgcctcaactaaggaggcaccaagttgtagctttgtcccttgccatcatgcccaacaagaggttctataccttttaatgaattgactttcataaattggttatgttggtgggcaagttctttaagctggaaattgtaaattcctcctgaaatgttttttcatgcagttaccatgaactaatactacaataaaggatggtcttgggtgtcaattctaaaaaaagaacctcgt

SEQ ID NO: 16842 - DNA, 1107 bp, Homo Sapiens
  misc_feature (202)..(223): n is a, c, g, or t
  misc_feature (281)..(289): n is a, c, g, or t
  misc_feature (760)..(800): n is a, c, g, or t
gcacgagggtttaatcaggtgtccaaaatgtgagttaaacattaccttatatttacactgttagtttttattgttttagatttattatgcttcttctggaagtattagtgatgctacttttaaaagatcccaaacttgtaactaaattctgacatatctgttactgctgactcacattcattctccgccattcaaatactannnnnnnnnnnnnnnnnnnnnngttcccaaactgtaatgtacaaggatatgtgtgataatgctttggatttgagtaatannnnnnnnncttccaagaaaactgctttggatatttttagataatttaaacataatttaggataatgatattgctcaatctgaccacaattttaggtaaaacattaaatgtgtcaagaaatcttggcaacagagactctgcagcttgcagtggacatagataaaatgttacagagatactatttttttggttggaattactatattaaatttagaagcagaaactggtaaaatgttaaatacatgtacaattgcttttagttagcaattgattgtagcatgggttcctccaaggtttcaagcaatgggcagagtttaaaattatatcagattcgtttacttcgtttattattttacagtaaatttgaataaatcttaggggtcattatcacttaaataatactgtacctaggtctttcaaattaaaattatacctgaatgaagttgtttgtatacataaaggatatttgtgtacaattannnnnnnnnnnnnnnnnnnnnnnnnnnnnnnnnnnnnnnnnatggcaactggaaagtatttactatgggattcatttatgtctgtctttctatcataaagaattgatcaatatgtaaatatgtgatttgaaccatggttgacttacaagtgtcactacagctttttagaaaacatagccctaatatatgttaagcaggacccgggtgagccagtgggcttgcgctttatgtagagctggaagaaaggccgtccatcctgtctcttggggcggacagtgtactttcctaatagggaaaggaagcacaatggaaatacccctgaaccgttttattgcattaatttttttc

SEQ ID NO: 16843 - DNA, 1994 bp, Homo Sapiens
  misc_feature (903)..(980): n is a, c, g, or t
  misc_feature (1574)..(1583): n is a, c, g, or t
  misc_feature (1768)..(1792): n is a, c, g, or t
  misc_feature (1966)..(1975): n is a, c, g, or t
gcacgaggagttccatgagcagctaagatccaatctgtctaatacagtgaccccctagccatccgggcctggcaatatacaattttttttcccctccaagtttgtaacactccccttccagaaaggcattgtgcaacacaggattatttttaaatgattctgaatttgaattaactttttggagaattctgtgatgcccttagaagaaattggacacgtattgagtgtcacaaagctggggctgggaattgctggtctaatgtttcattagacttaagaacctaaaatttttctcagttgggtggataaaaccactaacgcttagaaactgttttctcatgcagctatgtttctcttatttatgccttgaggactaatttctggttttctagctgttaatgcactgttgaccttcataatggtgccttacgcaagcgatcccttctgtgggggtctcatacaggggtgtgggcgatgcatgctttattaaggctcttgtttcacctggcagtgtactgtatcaacgtataatacagaaaaaaaatctctttaaggtcctccttcacaaagacatagagtgaaactccctttacatgtcagtatttgttcaacactttaggcaacttgactgtcagtgttaaaatggaaaacaggaaaatggaaaaatctgaccaattctgccaccttgagactttcatatagaccttgcacaacaattgtatagatcacacaccggctgtatttaatatgtaacattttcacacatattaaagatacagaagtattaaaaaacccccaatgttaatgtatttgcttaaaaggcacaagtttcacatatctgtctagctatctgttggtaatacagaaagtatactacttttttaaaaagtgggcagaattccnnnnnnnnnnnnnnnnnnnnnnnnnnnnnnnnnnnnnnnnnnnnnnnnnnnnnnnnnnnnnnnnnnnnnnnnnnnnnntttttttaaggagaaactagaatgtttagctagaaaattccacagcctgtgaagaaatatttcaaaagggccataaaggaggtaaaaatgaaaaccataacctaacttttatagaggctttatcttaatttaacgatgtgcggaggactttcttgcttgaatctgttccgggctgtctgctctgtccatcaaatgggcaggtctggaatggggcaccttcggccgttcagaagtggcctgaacagaatgctggaacccaggctggactcggacacactaaggttttgattttgaatttcagccttattagaagatctaacctaagagtaagctaaccacagggattcttttgtagaacactttttatgcagatgaagctattttttccagcaagtagattcttccagtttttccaaggagtaatttccccgaattggcataccacggcgtggacagctgatatttcacccagctgctggcttgtgggtgtggctctttgctttatatatatatacacacatgtgagtctggctgggctggtattttgtttgatcttcctggaaatgagcagtgactaacgctcacataactggnnnnnnnnnnatctgggctgatgaatacatttacctaagaaactcatttcgttttacttaagaggggaagtgcagttttcttttggcagttcagaatccaagcacttgatttgctgggtttggaaaactccttttttggccttctatgtgcttagccataacaattccattaagcaagaaggtaagcaaaagacnnnnnnnnnnnnnnnnnnnnnnnnncttgcactggcttgtctcacttacgaaacatgtcggagctgtttgcctgggtggggctgggtaccgtacctgtcaatgcctgtgattttcataattagcacgtacataaagaagtacattctgttcaggtgataactgagcctcaatcaagcaaaaactttttgcttgaaattnnnnnnnnnntttctattagtgaaatttc

SEQ ID NO: 16844 - DNA, 1408 bp, Homo Sapiens
  misc_feature (1257)..(1266): n is a, c, g, or t
gcacgagggtttctcttctgttcccacgagatatttttgggcaaaaaattgacaaaagtacatgtgtttttccccgcctatcccttagaaaacctaatgtgtactgctatttttaaaaccaaaaagagacagcgtgacgatgcgtaaagcatttttcttagcctttcctttgtcttgatctgttaatgagaacaaaactgccagactcaaaatactctactattgtgctgaaagaaatacaatttagattgcacaaaatttgaaaatataactcagctgtcttttaaaagagttgtgttgttatctacaagactattagcagtcttttttcagagcaaattttaacagctagttgtgagtggtttaaaatatagaaaattattaaaatcttagtttgaggggttttatagtgggagaaaaaacaggaccaaagtttatgtgccttcttcagtagtcttaattgaccttttcttcctatttgagactaaagtagtatcagtattctggttttcaggaaatatgtactatatagttttaaaagaatgttgtcccaccaactattcatccaagcaaagaattgtaactataaataaagtctcagttacacttttgcctttatcacataatattcattgtagagcattgtgcaggtccaagaatagagctgctcaaaatctttgtggtagtttccttagtttttgtaacctgaggcatatgttccagagaacagggatatttgtctggtccagtgaccttggtgatcatagtcataattgaaagatgcctatggcatgcttaaatcagcattgtcaactgatttgttgttgtattattttcacttcttggatctatgtagtagttgtaataacaaatatttaaatagctatttttttgatgccattaaaaaaatcatactctggccttttttcccccttactgttgtttcccagatcttttaaaaattcatcccatatccagaaagtaccagttataaagattgctgaccaagcaaagttttgcatcaaagtgtcacctcattgctctgaccaaagactgactgttgtggttttaactcctctctgtaaagcattttgcattttccccaagctcctttctgaaagaagacccagtgcagagcggcctttactttcaatttctactgctgaatagactacttagagaaaatgtgagtttcagtgtgaacagaatggattaggatgacgagtttgatgggcattttcagtactgtatctaagnnnnnnnnnntagcacagctaggagcctctgacattgtctggtgttttacgtggtctgttcatcaaaattccccttttcagtttttaagaatgttcgtctaacagaagaaaatgctgtaaatatttgtaacaacattttttttaacaaggcc

SEQ ID NO: 16845 - DNA, 957 bp, Homo Sapiens
  misc_feature (305)..(365): n is a, c, g, or t
  misc_feature (456)..(489): n is a, c, g, or t
  misc_feature (657)..(718): n is a, c, g, or t
ggatcccccgggctgcaggaattcggcacgaggggacatctctacaactgtagtatatagaatggaaagtctgggagagaaaagctaaagaaatgggttctagtttcagaatgtttcttcatttaatctttcaaacatctttagcttttttttgcaagttataaatatttatttgaggtattttttgttctcaatcttgggtgctggagccataaagcttttttttccttttaatctttgtataaaggcagtagattaagaagtgcatttgttggtctttaaaaagtatttacaagtacataaannnnnnnnnnnnnnnnnnnnnnnnnnnnnnnnnnnnnnnnnnnnnnnnnnnnnnnnnnnnntgttaactatgtggtcagataatcccattttacaatagtaacagaaaattgtaattcttagttctaaaattcacaaattaaactcataagnnnnnnnnnnnnnnnnnnnnnnnnnnnnnnnnnnaaaactaatgtgatgtctttagtggcaatagaaggtacttctatgctaaatacaaaactaaaaaggcaaaataatgaaccccaaattattttatttaaaatagcagtggattataaaattagcttgtgtttacatttatgccatttttggtgatagattggctttacnnnnnnnnnnnnnnnnnnnnnnnnnnnnnnnnnnnnnnnnnnnnnnnnnnnnnnnnnnnnnnttttgcaactcctctgttctgtcagagttgttatatacaggagtgtcttatgttactaaaacatttcagccaaagaatttcagatgtgagataatgatgtttcatcaataacaagctataatggttagttactcaaaaggagaacagtgagtgtcttcagtgaattgttcacctaaacattttatttcctataatccataactttttctatgtataatttaaatatgatgggcaaattt

SEQ ID NO: 16846 - DNA, 1417 bp, Homo Sapiens
  misc_feature (688)..(717): n is a, c, g, or t
cccaggagaagctggagctggcagagaaaaaggccaccgatgctgaagccgacgtagcttctctgaacagacgcatccagctggttgaggaagagttggatcgtgcccaggagcgtctggcaacagctttgcagaagctggaggaagctgagaaggcagcagatgagagtgagagaggcatgaaagtcattgagagtcgagcccaaaaagatgaagaaaaaatggaaattcaggagatccaactgaaagaggcaaagcacattgctgaagatgccgaccgcaaatatgaagaggtggcccgtaagctggtcatcattgagagtgacctggaacgtgcagaggagcgggctgagctctcagaaggccaagtccgacagctggaagaacaattaagaataatggatcagaccttgaaagcattaatggctgcagaggataagtactcgcagaaggaagacagatatgaggaagagatcaaggtcctttccgacaagctgaaggaggctgagactcgggctgagtttgcggagaggtcagtaactaaattggagaaaagcattgatgacttagaagagaaagtggctcatgccaaagaagaaaaccttagtatgcatcagatgctggatcagactttactggagttaaacaacatgtgaaaacctccttagctgcgaccacattctttcannnnnnnnnnnnnnnnnnnnnnnnnnnnnnaaacacctgcttaccccttaaatgcaatttatttacttttaccactgtcacagaaacatccacaagataccagctaggtcagggggtggggaaaacacatacaaaaaggcaagcccatgtcagggcgatcctggttcaaatgtgccatttcccgggttgatgctgccacactttgtagagagtttagcaacacagtgtgcttagtcagcgtaggaatcctcactaaagcagaagaagttccattcaaagtgccaatgatagagtcaacaggaaggttaatgttggaaacacaatcaggtgtggattggtgctactttgaacaaaaggtccccctgtggtcttttgttcaacattgtacaatgtagaactctgtccaacactaatttattttgtcttgagttttactacaagatgagactatggatcccgcatgcctgaattcactaaagccaagggtctgtaagccacgctgctcttccgagacttccattcctttctgattggcacacgtgcagctcatgacaatctgtaggataacaatcagtgtggatttccactcttttcagtccttcatgttaaagatttagacaccacatacaactggtaaaggacgttttcttgagagttttaactatatgtaaacattgtataatgatatggaataaaatgcacattgtaggacattttctaaacctcgtgc

SEQ ID NO: 16847 - DNA, 1432 bp, Homo Sapiens
gcacgaggcttgtctctgcaccatttatcacaccaggacagggtctctcaacctgggcgctactgtcatttggggccaggtgattcttccttgcaggggctgtcctgtaccttgtaggacagcagccctgtcctagaaggtatgtttagcagcattcctggcctctagctacccgatgccagagcatgctccccccgcagtcatgacaatcaaaaaatgtctccagacattgtcaaatgcctcctggggggcagtatttctcaagcacttttaagcaaaggtaagtattcatacaagaaatttagggggaaaaaacattgtttaaataaaagctatgtgttcctattcaacaatatttttgctttaaaagtaagtagagggcataaaagatgtcatattcaaatttccatttcataaatggtgtacagacaaggtctatagaatgtggtaaaaacttgactgcaacacaaggcttataaaatagtaagatagtaaaatagcttatgaagaaactacagagatttaaaattgtgcatgactcatttcagcagcaaaataagaactcctaactgaacagaaatttttctacctagcaatgttattcttgtaaaatagttacctattaaaactgtgaagagtaaaactaaagccaatttattatagtcacacaagtgattatactaaaaattattataaaggttataattttataatgtatttacctgtcctgatatatagctataacccaatatatgaaaatctcaaaaattaagacatcatcatacagaaggcaggattccttaaactgagatccctgatccatctttaatatttcaatttgcacacataaaacaatgcccttttgtgtacattcaggcatacccattttaatcaatttgaaaggttaatttaaacctctagaggtgaatgagaaacatgggggaaaagtatgaaataggtgaaaatcttaactatttctttgaactctaaagactgaaactgtagccattatgtaaataaagtttcatatgtacctgtttattttggcagattaagtcaaaatatgaatgtatatattgcataactatgttagaattgtatatattttaaagaaattgtcttggatattttcctttatacataatagataagtcttttttcaaatgtggtgtttgatgtttttgattaaatgtgttttgcctctttccacaaaaactgtaaaaataaatgcatgtttgtacaaaaagttgcagaattcatttgatttatgagaaacaaaaattaaattgtagtcaacagttagtagtttttctcatatccaagtataacaaacagaaagtttcattattgtaacccacttttttcatacaccattattgaatattgttacaattgtttgaaaataaagccaattttctttgggcctttaaaa

SEQ ID NO: 16848 - DNA, 1228 bp, Homo Sapiens
  misc_feature (494)..(512): n is a, c, g, or t
  misc_feature (881)..(894): n is a, c, g, or t
  misc_feature (1050)..(1058): n is a, c, g, or t
atcccccgggctgcaggttcagggataactcggccatgagaaaacatctgcacacccacggtcccagagtccacgtctgtgcagaatgtggcaaagcttttgttgagagttcaaaactaaaacgacaccaactggttcatactggagagaagccctttcagtgcacgttcgaaggctgtgggaaacgcttttcactggacttcaatttgcgcacacatgtgcgaatccataccggagacaggccctatgtgtgccccttcgatggttgtaataagaagtttgctcagtcaactaacctgaaatctcacatcttaacacatgctaaggccaaaaacaaccagtgaaaagaagagagaagacccttctcgaccacgggaagcatcttccagaagtgtgattgggaataaatatgcctctcctttgtatattatttctaggaagaattttaaaaatgaatcctacacacctaagggacatgttttgataaagtagtnnnnnnnnnnnnnnnnnnnctttactaagatgacattgctaagatgctctatcttgctctgtaatctcgtttcaaaaacacagtgtttttgtaaagtgtggtcccaacaggaggacaattcatgaacttcgcatcaaaagacaattctttatacaacagtgctaaaaatgggacttcttttcacattctttataaatatgaagctcacctgttgcttacaatttttttaattttgtattttccaagtgtgcatattgtacacttttttggggatatgctttagtaatgctacgtgtgatttttctggaggttgataactttgcttgcagtagattttctttaaaagaatggggcagttacatgcatacttcaaaagtattttccggtnnnnnnnnnnnnnngttatataggttttgtttgctatcttaattttggttgtattcttggatgttaacacattttatataattgtatcgtatagctgtattgaatcatgtagtatcaaatattagatgtgatttaatagtgttaatcaatttaaacccattttagtcacnnnnnnnnnccaaaaaaatactgccagatgctgatgttcagtgtaatttttttgcctgttcagttacagaaaggggggttcagttgtcgaatgtattgtaccttttaacccctgatgtgtacatcccatgtaacagaaagggcaacaataaaatagcaatcttaaagcaagaatatggc

SEQ ID NO: 16849 - DNA, 1688 bp, Homo Sapiens
  misc_feature (556)..(578): n is a, c, g, or t
  misc_feature (981)..(1009): n is a, c, g, or t
  misc_feature (1085)..(1101): n is a, c, g, or t
gcacgaggcgaggagactttaatcatgaacgaggagagcgaaaggtctgcagattcaagcttgaatggctgggaaattgctctggattaaatgatgaaacttatggctacaaagagggcaaaccgtgcattattataaagctcaaccgagttctaggcttcaaacctaagcctcccaagaatgagtccttggagacttacccagtgatgaagtataacccaaatgtccttcccgttcagtgcactggcaagcgagatgaagataaggataaagttggaaatgtggagtattttggactgggcaactcccctggttttcctctgcagtattatccgtactatggcaaactcctgcagcccaaatacctgcagcccctgctggccgtacagttcaccaatcttaccatggacactgaaattcgcatagagtgtaaggcgtacggtgagaacattgggtacagtgagaaagaccgttttcagggacgttttgatgtaaaaattgaagttaagagctgatcacaagcacaaatctttcccactagccatttaataagttnnnnnnnnnnnnnnnnnnnnnnncctactagtcttgaacaaactgtcatacgtatgggacctacacttaatctatatgctttacactagctttctgcatttaataggttagaatgtaaattaaagtgtagcaatagcaacaaaatatttattctactgtaaatgacaaaagaaaaagaaaaattgagccttgggacgtgcccatttttactgtaaattatgattccgtaactgacttgtagtaagcagtgtttctggcccctaagtattgctgccttgtgtattttatttagtgtacagtactacaggtgcatactctggtcatttttcaagccatgttttattgtatctgttttctactttatgtgagcaaggtttgctgtccaaggtgtaaatattcaaacgggaataaaactggcatggtaannnnnnnnnnnnnnnnnnnnnnnnnnnnnggctctttcaaaggtaatggcccatcgatgagcatttttaacatactccatagtcttttcctgtggtgttaggtcnnnnnnnnnnnnnnnnncctgggggctggggtgggggtttgtcatgggggaactgccctttaaattttaagtgacactacagaaaaacacaaaaaggtgatgggttgtgttatgcttgtattgaatgctgtcttgacatctcttgccttgtcctccggtatgttctaaagctgtgtctgagatctggatctgcccatcactttggctagtgacagggctaattaatttgctttatacattttcttttactttccttttttcctttctggaggcatcacatgctggtgctgtgtctttatgaatgttttaaccattttcatggtggaagaattttatatttatgcagttgtacaattttatttttttctgcaagaaaaagtgtaatgtatgaaataaaccaaagtcacttgtttgaaaataaatctttattttgaactttataaaaagcaatgcagtaccccatagactggtgttaaatgttgtctacagtgcaaaatccatgttctaacatatgtaataattgccaggagtacagtgctcttgttgatcttgtattcagtcaggttaaaacaacggacaataaaagaatgaacacacctcgtgc

SEQ ID NO: 16850 - DNA, 1194 bp, Homo Sapiens
  misc_feature (199)..(214): n is a, c, g, or t
  misc_feature (232)..(245): n is a, c, g, or t
  misc_feature (308)..(317): n is a, c, g, or t
  misc_feature (760)..(773): n is a, c, g, or t
gcacgagggtccagtcccggcaagcgggaaaaggacaaagagaaagacaaagagaagcggttcagcctttttggcaaaaagaaatgaactcctttccttcacctcctgcccttctcttaccttttcagtgaaattccagcatgcaagctcagaaccaacacattactctctgtgcctaatgttcctcaatgtggttgannnnnnnnnnnnnnnnaatttatagagcatttcnnnnnnnnnnnnnnaaacacacctaaacactttatctccaagttacaaaagtttgaggtgcagagggaaggccagannnnnnnnnnaatgaaattatatagattaaatctcagtatttaaactgttcctcaattttgtgaggctgtgttggaaataacccgcctctagtgctgttggtatgcaaggcagcggtgcttaatcaatatttcctgtgctcaccagaggcaaaatgtaccaatatcctgacaccattctctctccatttacttctggtggttaccctgactcttgactcttagaagtgcccgagatggggctaacctttattaaacagatcgcatattatgatcttgctgcagccacagtgcagctccacattaactctacagaccaaaccatttgtatctggcatcacttactaacacacgacatgcggcttttctgcatcaactgctatgacggttaagaatgtcagtatacaagaaggaatagaaaactgatactgttttaaataatctgtaatttcaannnnnnnnnnnnnngctgaaatacattatattgtacgtttgagataattctagtacaaagtataataaaactagatgtataataaaccctttaaatcattggtaagtgtacaagtggtggaactgaagcatttactggacaaagtaatgttactctaatggttacttgctcgtgcgttgccacactgtgttataatttgcttcatttccttgctatttgatacatagtgtgcatttctctgtcactgtaactattgtaatgacaaattttcatcttactgcacaatcaaaatgacattgataggaatgaactccagaggctgggcctgaacagggaggtggtcgctcaggcctggtgctcagtcgtacgacctgtacctctcaacttttgccctatctgttaaatatatgctatgtcattaaatgcttttaaatc

SEQ ID NO: 16851 - DNA, 1114 bp, Homo Sapiens
  misc_feature (326)..(340): n is a, c, g, or t
  misc_feature (431)..(462): n is a, c, g, or t
  misc_feature (666)..(692): n is a, c, g, or t
  misc_feature (857)..(866): n is a, c, g, or t
cttgagccttaaaacggcgctgctgggaaacatttgcactcttttagtgcatttcctcctgcctttgcttgttcactgcagtcttaagaaagaggtaaaaggcaagcaaaggagatgaaatctgttctgggaatgtttcagcagccaataagtgcccgagcacactgcccccggttgcctgcctgggccccatgtggaaggcagatgcctgctcgctctgtcacctgtgcctctcagaacaccagcagttaaccttcaagacattccacttgctaaaattatttattttgtaaggagaggttttaattaaaacaaaaaaaaattcnnnnnnnnnnnnnnnccaattttaccttctttaaaataggttgttggagctttcctcaaagggtatggtcatctgttgttaaattatgttcttaactgtaaccagnnnnnnnnnnnnnnnnnnnnnnnnnnnnnnnnattattaaaagcaagtttctttgtattcctcaccctagatttgtataaatgcctttttgtccatcccttttttctttgttgtttttgttgaaaacaaactggaaacttgtttctttttttgtataaatgagagattgcaaatgtagtgtatcactgagtcatttgcagtgttttctgccacagacctttgggctgccttatatnnnnnnnnnnnnnnnnnnnnnnnnnnntttgacacaaaaacaatgcaagcatgtgtcatccatatttctctgcatcttctcttggagtgagggaggctacctggaggggatctgtccactgacagaccttaatcttaattactgctgtggctagagagtttgaggattgctttttaaaaaagacagcaaacnnnnnnnnnnatttaaaaaaagatatattaacagttttagaagtcagtagaataaaatcttaaagcactcataatatggcatccttcaatttctgtataaaagcagatctttttaaaaagatacttctgtaacttaagaaacctggcatttaaatcatattttgtctttaggtaaaagctttggtttgtgttcgtgttttgtttgtttcacttgtttccctcccagccccaacccttttgttctctccgtgaaactta

SEQ ID NO: 16852 - DNA, 871 bp, Homo Sapiens
  misc_feature (400)..(517): n is a, c, g, or t
  misc_feature (676)..(688): n is a, c, g, or t
  misc_feature (716)..(724): n is a, c, g, or t
ggaattcggcacgaggcccctattcccaaatgcctttttccccctcatcttgaaatgagatgagtttttatgtgtaagcaatatttatttaactattctataaaattattgagtgcctactgaggcctttaagcaccgctaacattcctttccatcattcttttaaatgacataaaataattgtgcaatgttcctgatgatgtaccccacaagctgcattcaaactcaaatctgtgggaatgagtgactcgacaaaatgtaattcggatcagatcctcatcccctgactgtgtgaaaaaagtactctccttctagtgaaggattgtcacagagtttcactggatgaaactatgacccagtattcttactgtattttacatatgcctgtaaattatttgcnnnnnnnnnnnnnnnnnnnnnnnnnnnnnnnnnnnnnnnnnnnnnnnnnnnnnnnnnnnnnnnnnnnnnnnnnnnnnnnnnnnnnnnnnnnnnnnnnnnnnnnnnnnnnnnnnnnnnntgataacatggcaaccaccaaactcccttaaaaacaaacattggtgacatggccaattaagtatcagtgagcctcctatctgggacttatctgttcctattgtttcaaaaccatttcatgtacactactgaggtaagtttataacttgaaatgtgaacnnnnnnnnnnnnnagtgttaagaacaaactatataaatgtnnnnnnnnngttttagagttctgttttcaaacattgctagtggtttagttaactttagctgctttatatttgaaaagcttttatttagatcttgctccatttacagtacattcttaggatgtatgtagtaaataaagccttctttaaagcaatcgc

SEQ ID NO: 16853 - DNA, 1542 bp, Homo Sapiens
  misc_feature (266)..(291): n is a, c, g, or t
ggtcattcttgaaatcaaagagaaacctttattttcaacaaaactgcccagaaaaaatggttcattgatccactaggaacaagtctcttaccacacacagcaccaaaatatatatttaaaaaattaaaaaacacatagccccctcacacgcatcccccaaaagccacacaacccagaccaaagggaaaacaaatcaaactcaatgccctcacacacgagccatctttgaattaggatttacaaatttatatattctttcctatggnnnnnnnnnnnnnnnnnnnnnnnnnnccacaggggtaaggaaaaacttgtaggtgaaggcccaatgtctgcctaagctaacagaaagcaaaatcatgattcgtgcttttcctgtattttgagtgggatgcagcctaacagcacagccctccgtggtaaaccgaatccttcagcagccagaggcccccgaacactggaagaacaaaccgcaaccttccagattcttcagcgagtgccagaatgcaggctctgcatcagactgccaaagagacggcagctttccttgcaagttttccactgcctacaaaggccatttttccctataaaaagatgccaggtcaaaaaaaagtacaagggagaaaaagagttctctactgcagtaagaatcttgcagtcgcaggctgatctgaggcaagtcccacgacgcagggctggtgttggatccaccacgcaagcgcaggcgctacttgggctcctcaatcacacccttgctgaggtctgtcattttgggatattttactttcttctggtccagctcgttctgagcccaaagtagtagtttcagtaattttgccagtttgggtgttgactcgcgattttcataatctagcacagcttggttaacttcactccacaccttctgcctctgcatggtgtggaggaggtctccgaagggcgactcctcgggactgtcaaaggccagcagtgccagggtacgctccatctctgtgaggcactctcggctctcctcgccctgctccgccagctgagtctgtgcaaactccagcgccgcctctgtctcccgctggcggatcagctcgatcaaatgctgttgctgcaaatggaagtaaagataccggtttgtgtccaagagctctgggtggaggctgttgatcaaggcgatggcctcctgaatctgacctttcagtatcatctcccggatcttgattcgttcatcaagtgtttccagatccacactaggttcgattccagattccattcgaaacttctccgctgcttccttaaagccctctgtgaccaggtagttcatgatgaggcggttcatgtctgctctctggacatgcaagttattgagcttttccatccactcatctttcgtgatttcatcgggtttttctgcataactcattctgatttatttcgtgcggaacctgcctcccgcgctgcgcggtctgggcggctgcggctccgcagcctctcctgggctggggagaggtggcggccgccggggcgcccgagtagaaggaggcctcgtgc

SEQ ID NO: 16854 - DNA, 764 bp, Homo Sapiens
gcacgagggtcattagcgcaaggttgtagagtaagcggcaaagccaagacacaaagctgggtggtttggtttcagagccagtgcttttcccctctactgtactgcctctcaaccaacacagggttgcacaggcccattctctgatttttttcctcttgtcctctgcctctccctctagctcccacttcctctctgctctagttcattttctttagagcagcccgagtgatcatgaagtgcaaatcttgccatgtcagtcccctgcttagaaccctccaatggctcactttctctttaggcaaaagtctttaccccatgccttctcccatctcatctcaaccccctcatttgttggctgtctgctgtcagccactcttctttcaggtcctcagatgcactgcaccctctcctgcctgggggtctttgctcctgctactacctctgcttgaacagctcctcaccttccttcctccaaccctacccttgtataggtgacttttgttcatccttcagaattcaactcacatgtctcttgcatggagaaccctcacctactgtgttgagaccctgtccagcccccaggtgggatcctctctcgacttcccatacatttctttcacagcatttacatagtccatgatagtttacttgtgggattatttggttaatctttgcctttaacaccagggttccttgggtgaaggagcttctttatcttggtaacagcattatttcaagcataacttgtaatatagttatattac

SEQ ID NO: 16855 - DNA, 214 bp, Homo Sapiens
gcacgaggacagcttgacaaatgcccactgtggccggcactgagatgatctaaagcactgtctcttgattttagcaaaacctctgcagctacattgcacattttcatatgaggaaactgaggcattgaaagattcagttattattcatatggctagtgagcaggaatgctaagtttagccccatagttgtttaactgaagctcattgtcttgtc

SEQ ID NO: 16856 - DNA, 658 bp, Homo Sapiens
gcacgaggctcaaacacaaggacccctccccggcccacccagcccagccccaactgacctccatgcctagggaaaaactccccccaccactgccccctcccccgacccaggccaaagccagggcaggtctccgggtctcacctgctcctagcctcacccccctgcccccgaaaaccagactctcctcccaaactagcctcaggagcttggcgaacccgctcgctcctaaagagaaagacccaggaccctcccccatcacccccaagagaggttcgccatcctctggcctcgagcccttggtccctccgtccgtctgtcctcggggcccgctcccccggtggcccttggggatcaaagcgtgggccgctctccgggagggcgggcgggggagggggtggtcgggttgtgccattggggtgtccggaagcttctcagccagggtgggggtcgtggagtgggggagggaggccagccgggctccagaggggtcagggcgcgacgagaaccaactctttacctaactttgcatggtgcttagtcaaggactcctgcgacctggctcccgaggtcagctggcggcgctgacacacatgcatggcagactatccctggctctatctccctgttcctcgccccctccaccccccacttcctcttt

SEQ ID NO: 16857 - DNA, 965 bp, Homo Sapiens
  misc_feature (213)..(227): n is a, c, g, or t
  misc_feature (432)..(452): n is a, c, g, or t
  misc_feature (848)..(865): n is a, c, g, or t
gcacgaggggacttaatgctatttatgttgtgcctctgcaggcaaagcccttaataaatattttacatcctttctaatgacaatgaatggaattaatcactcaacaggtatagtattacgactcatggttactttttaaaatgatttagaccgattttcagattttatttcgttatgattaaagatgtctcatgtacttggaaaagtgagcannnnnnnnnnnnnnnggatttcactttcataccaggcttaatggcaatgacatttttatttttgaagtactctgacacctccaccctctactttattagaattggaagggaaatttttgtccaaaaacctacagacaagtactttgagagaatttccaatataatattagacataatgataattttttccatactcagaatgaaaaactggatattacgnnnnnnnnnnnnnnnnnnnnngtacaaatttagctaatagctacaggctgagagaattgtaacatagcatgacaaattttgtggtgacttgaaaggaatcacaccattattccttagaagtaattacatgggttctaacacatttgagacagggttggactcccatttctcatccgagaaattacttaacccttcctggcgctgtacagtcatcttttattctatttcctctttgctgtttgtagtagagacattttgaatgaaacttggcactgcttgattcaaaactggggaaaccagatctgtttagtctcctggtttgtatgcgtttgctaatggtagctaaataaccagtttttgttggaaatgcaccaattctgaaggcactttatgtactacatggaggtcatatctggnnnnnnnnnnnnnnnnnnatcatgaacattaagtgtgatgatgatttcttttccctgcacacatcttttcggtggaatatctatcatttgggaatctgggtgctggtgtataaaaacc

SEQ ID NO: 16858 - DNA, 937 bp, Homo Sapiens
  misc_feature (779)..(801): n is a, c, g, or t
gcacgaggtaataatctaaacttgcctccttgtattataaatggaaataatcctgtttatttaaacgggttttcatgtacctgtagggattaggaaactcaaatggcctttttaatacctttccctagtttgagctccctgttctctttaacagataaaacaacatatttgcttcagcctggaatctgtttttggtgctttggtgcagagacaggaaatgggcactcagagtcacactggtagttgcacactgtatctacagagggcgtgtctcatctgtactctgctgggttacaggatttcagtaggtatttgtgtccacctgagaattctgtttattacctttcatttgacagtgtctttcctttctgcagttgattttgctagagaggcaattcataaggtgaggtcctgttcatagtatgacttgctttctcaatatctccttcaatttttagtaactcttggtctatttggtgtctttaaaaaaaataacctagtaataaagacttcttttaatgtggaaatgtggtctggtagtaagttatttctttccacatgtaactgacccaatctggtttccaaatgagaagtgtgcaggccccagaggttgagaagccatatttcaactgtgaaaaaaatctgcttcctgcatctgttgaaatatagttgttcatacttgccatcccttatctttcttgtaacaatttgcacagttcttgccagaataaatgccattatctgtatgtttcagggagttccccaatttgatcattttnnnnnnnnnnnnnnnnnnnnnnnagagagagagatactgcagtaaaacattttctaagggatgaaagctcttgtatgggcatagatatgaatttctttcctctgggtaataattagttattcccagaagcacagtgtcattctttaaataaaagctttc

SEQ ID NO: 16859 - DNA, 971 bp, Homo Sapiens
gcacgaggtgaaaatacaagaatttcatactgcatttgcatctccgagattagggagcacctgtcaggatatgttgttctatcagggttacttctgttgactacctcttagattttgatacagttatattgttgagtttcattttcatatattcttgtagtgtctgcttgcctgtgacttctggtaaaataaaataagcctttgaaaatattttagcatggtatttaacattttctaaatattatggcattttgacatattttagtcagcgaagacatctgcccctttggtgtttctacttgcttatgattgagattttacaagcccttcaaactccgttttaaaggaatttattgtaaaacattaactttaataaattagtgttttcacagatcagatcattatacttggaacttctaaatcatgcaatttctgaataaggacataaggctagattcatttttcttaatagagaaaaaggaaatttctgatttatcacttttctagttgataagtaggattcaaaacgtttgatatgtaagtatttatataagactaatgtaatttaaagttctgtattattgtgattaatcatacagaaattcaggaactgatcagaagtgagattcttttccacatctggttaatgtagtgagttgacaccctgtgggtggtaaagcattataaacatttcatcttgaaccatgatttatacacatctgtgttataagggaggcttgagtacatataccaatgaagagatattcagcatttgtctatttgataaggaattaaatgtcctagtgattataaagtaaaaccacagaccatttgcaaatgatcttcaatgttaagcacttgctctaagattaaaattccttttctttttaaggttaagggtgtgtacgtatggcagtgatgtctatgttgagattaacttatggtattgaggaaatttggaagttattttt

SEQ ID NO: 16860 - DNA, 881 bp, Homo Sapiens
gcacgaggcagttacttccatcctcttcccaatgttaatttgcaatagttttaaaatgggaacaaatgaatcaatcatcagatagttaaaatgaaattaaatcagctgcctaataatttatggaattcattggaatgtgcttaaaatgctaaagtgtatgtcattgaacatgaaatcttttttcaggcacatacattgttggtattgatgactttttaaaacctgtgggataaacttgcactgcacacggaagttttattcttgtatatttagatttgtatgcttgtgagtaaaaatgtgcatttgtaaatactgtgtttttaggttgaatcaattaagtcttaaaactgtaaatttattaagcttgttgccagtaggtttaagaaaatcatgatctcacatgcctcactttgacatttatcatgccttttattaaaaatatcccttaggaacagtaagtttgccttaactctctgcatggtttaaaaagccattggttttgtgtgtgtttacagtaattatgcagatgactaaatgagttgacacagtaaaattacttccatatggtacagtaacaacctaactcccttctacctgatgtaaccatttacaaattatagttattgtaccagtctttcaacatttcagggttaatctgacctatgcagaattctagtgtgaatttattgtgaaaatgctaaatgaaacaatttgtcagaaattatgtacaattttcattaccttcaaatggatcttttgcactgtctgagagtatatatttttgcaactcaagacttggtactagttttaatacttaacacttactgacccaacagaagtttggaattaccttgctataaaaattgaggttgaataaaatg

SEQ ID NO: 16861 - DNA, 929 bp, Homo Sapiens
gcacgaggcccagacctgctggctcctggtgcccggcccgacacagaggtgcctttgtgagtgtaattacctttccctgtattagaaatagtctgtttagagctgtgtttgcaggtacagctagaataagcaggaattagcatgcaaaaagacctgccctggccctgacttctttatcagcaccatccttcaggactggttttttccccactttggattgattgggcaggtgatttaccatccaagatgaagagttttaaaagaagaaaaagagacatcggaaattgctgtgcatgtgcaacagcatgcgtgcgagagaaagagagatacaaatcctgttgtgttatatctattgacagtttcataccaggcagagctggcaaaataaacttgagtggacgatcctagcaacttgagaattgattaaagcttccttgggctttcagcacagtgtccacatcaaaaaggcatgagaagcaaaataaatgattcttttgccatgatatgctgccgccagaatctctaagcctatctaattggcctgtgtcaattgtggactattaatttgaagttaagtgaggcctacccttaaagaagcttttctagatcttaaataggatgatgatggagagactttggcatgatatagaattggaatggaggcagagttgataattaaactagatctgagggttttttcccagtttataacgtaggtctaccctgagatgattttttgttgtccctgtctggatattagtgtgcctttttatttaaaaagaaaaacccaattagtttatcatctttagagagatagatgatttgtattttgcatttattaattttccccactgatttatagtatatacggaggaaattcaggaccatcatagaatgtttaagggcgagctgtcctagaaaccagttaa

SEQ ID NO: 16862 - DNA, 968 bp, Homo Sapiens
gcacgagggtaactcttagtaaaagatgcagagctaaaacaagagacaaccaggaaattcataggtggagtaaatggatatgtaaactgacaaaatatagtgtggatggtacaattaaatagagaaatgcaggatatagtggggaccctgtgactggtacaaagtctgccctgggaggaaagacttcccatagaaagagatgctgaagctggatctagatggatgagggtgaaggaggggaataaggcagagaaaagcgctcagtgcagagggactaccatttggaaagagaggaaggaaagggctgacctagttggggatctgcatatggtttgttgtggctagattttacattgccagaggtggtatcacaggattaagtttttgaggtagagacttgggcccatgttatgtgtgtgttccagtctaaaactttttctgtgagtctcagacctgagatgaatgtgtcacctgaacccaaggtatttcttcctgttgagataagagatttgataaaggatatctaggtttgttattattgttgctgttttatttatttatttattgaatgatggctatgagttcagtaaccttaaagatgaccaattgaatgagtcatctttatgatttttaatttcattaaaataaaattataaagaatttacaaaatagggacaagactttctgtgctgccagaataacattttatttctaatatcagtgaacactctattagtggtttaaaaggctgtttttaaaaatctaacttttatgactttaattgttatcaatataacttactttatccacttgtactagtagctttccagaaactactataacaagctttgtaatgtgtttgttggccatattataatttggcttaactggattaatgtaccaaatatctaaaatctctggatacttaactacttcagaaaaaattatttttaaggtagttgctgctc

SEQ ID NO: 16863 - DNA, 193 bp, Homo Sapiens
cccccgggctgcaggaattcggcacgaggcgggaacaaaatgatgtcatgtcagctccgccccttgaacatgaccgtggccccaaatttgctattcccatgcattttgtttgtttcttcacttatcctgttctctgaagatgttttgtgaccaggtttgtgttttcttaaaataaaatgcagagacatgtttt

SEQ ID NO: 16864 - DNA, 533 bp, Homo Sapiens
cgcacgagggtccggcatcctcagggggtgtgagtgtgtgtggggggtctctgagctgaacttgggtggggtggggacttgttcctcgggggccacctttgtgtccttgtcagcggtcgtcctgctgtggcctgggttgcatttcctcttggggggggtattgaggacccccagcctggaatgagaagggtccccggttccatgtcagacccagaaaggtggatccccccactgttggctgcaggaggtttttggtacccccttttgttccagaaccgtcctgcctctcgcttggggacaggggggctttggatggcactggtgtgcacctggacccagccccggcctggcaggatccagggatgggtgcctgggatcctggggggagggaggcaggggacgcctttccggagctgggctcggagggtcctgccccatccagccctcggctctctgtgttctctgtccctagcctcaaaccctcttctggcagcgctagtgatatgccttagtctgtgggggtgggtggggga

SEQ ID NO: 16865 - DNA, 940 bp, Homo Sapiens
  misc_feature (448)..(506): n is a, c, g, or t
  misc_feature (565)..(730): n is a, c, g, or t
gcacgaggccagcatgtctccagtctgggctataccgaggtgatgggaggggtggcacacacttttctctaagggcaagacctgaaagttgtgtttattacttctgctctctctcgtttgctgcctgtcatttttctgcagtttgctcacacggccacaaccagctgacagggagggtgagaaacagtctttaggtattcacgtcctcagccccagctgaatgttgtattctaaaggaataagaggaaaaatctatcagggacaagttgcttctgccatagatcaactaattgtgagtcttgccattggtaagacaccaaaatgtcattagtaaaccagggtttattttactattagtaacacaatttaaccacaatgaaaaaaattaaagcaggggctccttactttttaggtcctttgtgaaataaagatagaaacaagattcccnnnnnnnnnnnnnnnnnnnnnnnnnnnnnnnnnnnnnnnnnnnnnnnnnnnnnnnnnnntgcttgagcctaggagtttgagactggcctggacaacacagcaagacctggtctttatnnnnnnnnnnnnnnnnnnnnnnnnnnnnnnnnnnnnnnnnnnnnnnnnnnnnnnnnnnnnnnnnnnnnnnnnnnnnnnnnnnnnnnnnnnnnnnnnnnnnnnnnnnnnnnnnnnnnnnnnnnnnnnnnnnnnnnnnnnnnnnnnnnnnnnnnnnnnnnnnnnnnnnggggggcgggcggggagagaaaaagagaaacaagatttccatactcaggaatcggagtgacgtgtatagagaggaaactatgtgagacatgcaaatggaagttaggagagggcatgtaaagtattagagctgattttaggcttcatgaatacatagagttctaagtaatgaataatggtcactgaaattttcacagtctcaaaaagaaaa

SEQ ID NO: 16866 - DNA, 417 bp, Homo Sapiens
gcacgaggctgatacccgtttaacttactgtgtttgattcttggggacatttatgttcaaggttctgtcaaagcaatctattattcttgtttttacctgatggatcatggagaaaaataatggattcagttatgagaaacagtaatagatttttttaactgccataaatttctctccctgtattaaataaaaggatcaggaaaagataagttgaattttcctacaatgagccagctcttcttaaatttacctcccataaattgtagcaaagcacttttcatataatgttttatttatgtaattcagttatttggagatggtggtgagggatgtgagtacatcatttcatgttgtatttcaaatctcttttgacagaaaccctaagaatttgcaataaagaaaattcaatgttccatt

SEQ ID NO: 16867 - DNA, 212 bp, Homo Sapiens
gcacgagggttaggaccttgtgatattgaaactagaataagcaacccagtggatagactgtgaaagagaatccatatatagacctatgtgtaagaatttatgatcaaggtggcattttgaaacagtagggaaggagcccagcagcaaatggtctggggaatcctggccctccacctgagacgttacacggctctttttttgagacggagttt

SEQ ID NO: 16868 - DNA, 677 bp, Homo Sapiens
  misc_feature (180)..(191): n is a, c, g, or t
atagatcaatgattttatttagacaaattatagatttccacataatttaattgatgacctaagctctatattccacctaaacacagagtggaagataaatgaagatctaaattatttaaaaagaaagtgaaaataaccaagtcagctagttttttttagcattacaagcccatttcatgnnnnnnnnnnnntccagattttttccccctctaacacagctagaatagatgtcagttcttaacaacaatgtatttaagcattctaggtaactagcctttggttacatgatcattctgccaaagtggcttttagttttcttattcccaccagataaattaagagtaactttcacagggatacatataaaaccaagaagtcaacagtcagcaactttattactgcttggcgaaataacaaaccttttcttctattatatgtgatatactgcagttaaagaaaaactggatacttttttaaaaagcttttctatctcaaatcttacaaatccaattcatctcagagagggctactatttaataagcattactaaaataatttcataattgacactgcttgatcatttatgtctacaaacctgaaacacctttaaggttgatacagacaactttctaatcttgagaggaaaattcattttggatactaccgtaaagacaaaa

SEQ ID NO: 16869 - DNA, 313 bp, Homo Sapiens
  misc_feature (176)..(244): n is a, c, g, or t
  misc_feature (249)..(257): n is a, c, g, or t
gcacgagggattaagtgacttgccaaagatcagatagtccaatggtggcagtgccaggaacagaattcagctttcttgcccctagacagtgtctttcacttgacccttactgagttttgaaccttagaattactaagattgttgttgttgttgtttaataaagaataaagctttgnnnnnnnnnnnnnnnnnnnnnnnnnnnnnnnnnnnnnnnnnnnnnnnnnnnnnnnnnnnnnnnnnnnnncctcnnnnnnnnnccgggtccccatttccccctaaagggagtcgaattacccggccccacgggcggtct

SEQ ID NO: 16870 - DNA, 233 bp, Homo Sapiens
tgagccactgcgcctggcccaattactttcatttatgcatatttctctatactgtcttttacatgcacaagacatttgaagtaatatactgtaaaactgtacaattaaaattataaataaaatgtaagaccatgacatgaaatccaaacagtacatggatgaattataagaagattagctaatctgctagcagttatcttttgtaatactaaaataaacaatggcagtataac

SEQ ID NO: 16871 - DNA, 794 bp, Homo Sapiens
gcacgaggcccaggagctgtcaccacagggagttaactggaaaccaagccttggggatgctttaggaacaggggcctcatcctcaagacatgactgatttcagtcacccctgaaaggctttgccttcccacctagccctctgcctcttccagatgccacatcgccatttctcaactgcctgttttgtgcccagcaatttcacacgtgttgtcttggctaagctccctgctccccaaaaaatcttcgcagcctgggcattcagccatgagggagccacggctgtagccagtggaatgacgtaccctcagtccaggatgtgcacccgggcagccaggtcccacagccactactttcttgcccccaccactgctcccacagttcccagaactcagtctccagatctgggctccaggatgcagaggctgtcctcagggtgaggggcaggtgttctgcacagtgcctcttccctgcagaggaaagtgcccccaaggcattcccagccccatcttccctccaccgcagagcctgaagcccacatcctgtgctggggccactgcctatgtgagtgtccagccagtggtcgtggaagggcttctcgggcatgctggggcacaggtatggatgtgtgaaattggcattcatgatttttgttgaaagaaggaaggagtgaacctacagactgagaagtaatcaaataaatgcccgaataaaggctgaagaagccagggcataactcaagagagggggatgggcagccaggcatgcttcttgcttgactgcagcaccccaaggcc

SEQ ID NO: 16872 - DNA, 711 bp, Homo Sapiens
gcacgaggccgctctctgtctttaggccaaaacatgactgagccaattcaactagttttggaaatcttccaagaaggcagtaacccaattcaatgtttaaacatcctccaactctgtcaaaagttctataatagcaaaccatcctcaaaacctcttggtgcattatgggagataaatagcaggttccttctagccctgtatttcatgttttgagtatatgaagagtgagaatttcccgtaacttagatcatgaatctaacttagatttcgtaacttagatcatgaatcctgcaaggtttccgcggctagctaccaaggtagaagaagaggttgcctaacaaaaatgctatgagatcctggtgagaagaaggtgggagtagctgcaggagacgttatactttcacttgccttaagtttaattgcatcaaagatgaatccgcagatgcgatgtcaattcgaggcagagagtattggggggcattgaagcaatggggagccaagtaacgtggagaagagtgagagacacacaggtcaggagagaaagaaaccaactctaatactgacacccgaggtttctgatggtcaaaagagttcctgaataaaccaaaagtaagttattaagctctgagacaacccatttacctggaaagctggggtaggtcttggtttcgcaccttattgttccaatgactgatattttgagagaaagaa

SEQ ID NO: 16873 - DNA, 931 bp, Homo Sapiens
gcacgagggaaattagaaaattttataatgtattataaaatccattactaagttgaaagtatgcttttaactctgtgtatcaggggatgtatgtttgtgtggagatgtttttttctgtctgtaggcacatgtatatatcccagtaagttcttattttcatttcatttctacatttttatgaacttgttttataagggtactgtttagttgtgataattaaatatatataaaagctttctgagagattatttactatatgaatatattttcagctggctgatcaaaagtatttttaaaattttgtttttagccattcaaaatgtatttgtattttcagaattgaatgcaagtcatacttagagctcaattaaaatactcttgcaagaaaaagcattaaattctctttgagaattccgtgaaatgcaaattaagggaaaaataggttttaagcagtagcaaaaacacaccgctaaaaatggcctttgaattctcagagctatggaaaaatgtgagaaactaaattgtctcgagatgtcaagatttttctatctccagttgctattggcctgtcctactgttgtctttgaatatttcctgtattccaccccaaaagatttcaacttttagtttttctatcactgggcaaggtcagactgggtttataaaacaatatattggcatattgtgattctttgtaattgactataaattggttttgaaatgtccaaacatacgttgtgtgtctttatattgtactgtgtgttttaagtaactggcagaaaaagaattggaaatgaaattccaatcagacaatgtagtattaaagaaaactttgttttaaatatgcggtaccatgtaaaattactcgtgttaggattaagtcacctgttgaaggttgatgtcactaagcttattatgttaaaaggaacca

SEQ ID NO: 16874 - DNA, 402 bp, Homo Sapiens
gcacgaggcataaacttatgcttgccatttacatttataaagtatagggcgacccaaattgaaacctgacgcactagataggtctctgagatggatgcatgaaaaattataaccaaggtaggaggaagatggactaaccactataccttctgcttaatgtgttaacttgaattaactttgcaaggatagcgggagataacaccccgaaaaccagatgagctactgaatagtttttaaaaaagtacacttgtttatgtaactaaatagtgcgaagatttataggtagatggcgacaaacctaccgagcctggtgataatggttgtccctgtaaaatcttatttcttttttagatttgcccaccaaaccctataaatccccttgtaattttaaatgttagtcca

SEQ ID NO: 16875 - DNA, 711 bp, Homo Sapiens
ttttgtttgaagagtaataacaaaacaaatctctatttgagaatcaataaatcttgagatcatttatggttttgcaattcaacctgaaaaatgaagtcagagcttttatcaaaacaaagcatgtttagtgctctctgtctcactgtcttttagatgccagaccttagattttgtgatgactcctcaaccgtttagatctcggttatctcagagggatcatcagctttttaagaaaattttgagagaaaagcaagtgaagaaaagagtagtcagtgcccaacatcacggatctctcactgaacacaccatgcctggtattctctcacagtgatgtcaccatttctacctgccacgtatcggcgaaggttgggactcgactggtgtttgatcacgatgggaaaatcatccagaaaaccccctacccccaccccagagggaccacagtcagcgtgaagcagttattttctacgctacctgtgcgccataaggaatttccaaggaatattaagaaggtacagtaaattaatcctggttttcaagagtattggttaatgcacacgagcaaaagatttactaaagatgtttattcttcagttgattctcttcccataatttattgagaaatgctttatttgcatttctcattaaagacttaacttcacgatgatttacttttttctttttatcacataatgtttattaggaccggga

SEQ ID NO: 16876 - DNA, 300 bp, Homo Sapiens
accacgaggctcctgctcctaacccccgaaattgaccagaccgagactcgcgggcatttacagggagacgagaagaccctaaggagcttgcatttcttaaagctcacctaatggaaaaagtgcaaactgtgaacaggggtaacctgatgaatatgtcgtggaaaaggtagcttatccacgtgtgtcgaatgggaacttggaatatttcctgagctcttagggattttcaattgctccttgcacttgggaacctctttaacatttaaagtggacacagttgtttgaatctcttcttaactc

SEQ ID NO: 16877 - DNA, 419 bp, Homo Sapiens
  misc_feature (52)..(99): n is a, c, g, or t
  misc_feature (101)..(121): n is a, c, g, or t
  misc_feature (201)..(252): n is a, c, g, or t
tttctgtttattgttggacaacatttttttccccctacattcaacagggccnnnnnnnnnnnnnnnnnnnnnnnnnnnnnnnnnnnnnnnnnnnnnnnncnnnnnnnnnnnnnnnnnnnnnaccctctcataacaaccaactacttatagtaccgctaaatacctaccccaaaaagtttctggaatgctccgaaaaaaaannnnnnnnnnnnnnnnnnnnnnnnnnnnnnnnnnnnnnnnnnnnnnnnnnnngaaatataatgaaaatggtcccaccccaagtaaagttcaaataggacaaaaaaccctccaaggctgggttgggtctccaaatcattaaaaatgggtgaccctcaccattggccaaaatataaaattgtaataaaaaataccaacaaatttctctttaaagtaatttt

SEQ ID NO: 16878 - DNA, 864 bp, Homo Sapiens
  misc_feature (398)..(610): n is a, c, g, or t
  misc_feature (643)..(656): n is a, c, g, or t
gcacgaggggagaggaggagttaaccacggtgaataaagaaggactagaaaagaaaacagcagtgagacaagccatctccattcaaaggcaaggactttggaagtggcccttggtttctctgaaacgtttgagtccggctttgccttcgacgtctccttcccctgcccctgccaaggattgagagctctggaaacctgactttgccttggcctttgcttccgaggtagaagggccattttgttccctctgctgcctcacctcgaggtctccagaatgctctgtgatcagagtcttgcgggcaaacctggccgggcagctgcccaggtggttatctgatggggcttcagaaatgggtcctcccgctctcagctctgtaccaacttctgccattagatcnnnnnnnnnnnnnnnnnnnnnnnnnnnnnnnnnnnnnnnnnnnnnnnnnnnnnnnnnnnnnnnnnnnnnnnnnnnnnnnnnnnnnnnnnnnnnnnnnnnnnnnnnnnnnnnnnnnnnnnnnnnnnnnnnnnnnnnnnnnnnnnnnnnnnnnnnnnnnnnnnnnnnnnnnnnnnnnnnnnnnnnnnnnnnnnnnnnnnnnnnnnnnnnnnnnnncatcagagcatttttcctttgaatttgcaacannnnnnnnnnnnnnctcaaaaagaaccttctcttagcctgcagaggtctctgggaggagttgtatactcttaggcagatagatggttaatgactgccttgattatcagctacaccttccagggccttgtgggcagacctggatccaggctgggtactgaagggagggttgagcaaccaggaggggagagaacgggagctgaaagctcccaaactaaatgtct

SEQ ID NO: 16879 - DNA, 863 bp, Homo Sapiens
  misc_feature (219)..(228): n is a, c, g, or t
gcacgaggcattgccccattggtcagttggggacactgttacaaatccactgaagtcctggtaaaactgtcaagagtaacaggcctcttctgttctaccctgctcacttccacggtgagttaccaccctgggcaacacagcaagaccccatctctacaaaccctcctatgtaaagtttactggagagacttgaattacttaaattcatgttaatatgannnnnnnnnnaatccaggtcacattttaacaaagtttattatgaaacaaatgaaatttgaactctaaaatggtactccttggcttcctcaagtcacaatgaactttatattttctttgtccttaaggactaagatagttgttttatttcagccgaatcacagagataaccactcctgcaggcccccacagctggcccaaaggggctgtctttctgacctggctgtgttagcactgattgagaaatgcaggctcccaaattttaaattgcctttattaaaaacacaaactacagaaaatgggttaagagtatacgcatttcatcaaacacatataggggaaaaaatccttcaatttagagttaaataactcagctttgtatagtagagttagcgctccagtatctaacaatctcagaatcatctctgaaaactggtaactatgcttccatttttaattttgtcctaaatatcagatgtctttgatgtaagggtagggaatggagaaatattttcaattgtgtatttgtattacaaagaacttgaaatttactttcttagttgattatattaaatgatgtatatattatatgtggtttataagctcaacactggccattttttagtctattgttaaatggtattttt

SEQ ID NO: 16880 - DNA, 869 bp, Homo Sapiens
gcacgagggattcaggggacaattatctatctccaaataataggcttttatttcttgcagctaactttttcagtgattctagcagatgccatctagtacatccttgatcttgtttctttcgtgagagatctcgccatggcagcatcttgttaagtaagtgtaattgcacatgcacaaaagacttaactagctttacatttagcagtcagttggttagattaggtttcatagtaaatgaataggaatagaaagaataggaagtgtttttattttccagtagtaattccgtggattccatttgacccagtttactatcagttcagttcaggtagatttggttcaacttttggtggtttttggctctaggatattcttgactttaatatcctagaacttactgagtcttcccttcaataaatacacttctcacatacctctaatcctatgcttccttgaaacaataatgctagctgagttgtttactaaggattattataagggcctgaaggtgtgggagtggagattaattaaaacctttatgttctccaatataagggaaaagcaggttggtactacttctgattaggcagaaaacaccaggattccttaagtgatccttgaaatggttattgttttctgccttgtcacatttgccactgtgccctttaaaacgatgtggaaacctcaggtttgtggacagcacaggtggaatgacatcttgtgcttcctgaggctcctctctaccaggcacattagcttagtgcttcagatgtcagcccaagtccttgttacctcctttccctgctgcccagggaagagtgtgtgtgctggagctggagcgctttgcactcttcagtgactattctcac

SEQ ID NO: 16881 - DNA, 800 bp, Homo Sapiens
gcacgaggccttgttgaaggggcacattcatttattaatccaatgtccattaaggtcactctgccaggcaggatgtggggcttatggctggtgcgtgtggctttgtggggggaggggttgtggctggtgaggacacaaagctgactgccctagaggagctcagagcctcacttctgttttctcttccctccccacaggtaaggctggcctctctgcagtcagaggtctgagctctgccatggggataggggtgtctttattactgcagttttctctaacacctgggggctaccggagtgtgggccgaagcaggcgctgcagccgcggaagtatccccaggaacatccccaagaggagctggaaaaagcctcatccccagctctgcagtctccagggtagagtctggcctttgctgtgctcccaaaccacgccacaacaggggtgcacgggcgtccccatcccggcggaaggaaatggccctttctcatatcctggggtcttccctgtgcacagtctgacactgggaatgagtgacctttgtgttccctgagaagagagagtgcgctctagggaatttagaaggatgtgtctggagcttgtgagcaggcacagaagggcccttaggagcctaactgcttccttcctccttccgcggaggaggctcctgtgcaggaatctgggctcccctgagctgtggaagagctgaacatggggcagcccctggcgaggttggggcaggaccgggcaggggactgagattgcagtctcatcttccctccccttctattgcctcagtaatc

SEQ ID NO: 16882 - DNA, 924 bp, Homo Sapiens
  misc_feature (553)..(562): n is a, c, g, or t
ccagactgatcctctgatcagaagacttaacactctctggccaaggttccccactgcttttgggcgaaagccagtgattcccagcttggaacattaatatccttcctgatctggtccctgctacattctccagaggcgttcttcagcttctgtctccagccttctctctcccctctcctctgatacagatccccactctccagctcttctaatctactggccacattctctaaaggttttggtttttttatgcatgcctcactctgctggaccgttcttcccctcttctacacctggccctcacctgctcgtctcaggactactcagggatcagttcctccaagaccgtgctgttgtggttccccatgcatcctgggcttacttctttcatgggacttaatacactgttactttttcacatgtaaatcctggagcctgaggagcaaggcttaatctatctttatatctacatgcctggttcttagtaggtacttagtaagtgtttattggaatatgtatttgaacagaggaataatcagctgtctatgatttnnnnnnnnnngagaaagaaaggtttaggtaagaaacctgtctttggtgatttttgtgtatctagctattttttaagttctgcctattttggaggaagtatccagtttcactgcaatgcctgccaaaaattgcactgagaatttaataaagtagattatctccattttgaatcacttgggattatttgaaaagttgtactggttgtcctcctatcaagagtcatttgtgtaacaaaagtacatttatattgcagtgagttttcccatggaagcaatgttgtaaatggtcattagactttttttctttccaacttttattttaagttcacgggtacatgagcagatttgttacatgggtaaattgtcatgaggg

SEQ ID NO: 16883 - DNA, 343 bp, Homo Sapiens
  misc_feature (206)..(256): n is a, c, g, or t
gcacgaggaatgaacccaatgttcccaccctgccctaagacccatatcaatgtgaagcaagattttctatccagtggtgctcaaactgtggtgtccataaaattcatctggaaagcttgttaaaaacaaaaattcacagtcctcatcttattatttatggaaagcagcctagaattctgaattttttataagtgcaaatgcattgnnnnnnnnnnnnnnnnnnnnnnnnnnnnnnnnnnnnnnnnnnnnnnnnnnngcaaaattacaaacacagaatgactttaggttactctgttgcaggtggttcctaagttacactttaggagacactgatcaagactgt

SEQ ID NO: 16884 - DNA, 903 bp, Homo Sapiens
gcacgaggatatggaaagatactcatgattcattgttacgtggaaagccaactatgtaacagcaaagatagtgaaatgctacaggtagctgtacagaactttttatatataggtataaaaatgtgtgaaaagaaaaacaaagatatttttatccagaattacaggaacttttattttcttgttacaattttagatagccttccttttaacaatgggcttttatttctattaaaatagaaaaataaatcagcttgaactaataagaactgggtcatttatggctgtgatcatttaaatatttatataaataatttccaaaaatagttatttttttaataaaacaaaggaattaatgtaaacagtttggaaagaaaagttaaataactttaaaaagttatgttgttgaaaacatgtcaattatacagctaaaaattggggggtgtaagtataagtatactagtttcctaatcttaaaaatcagcaattacatctatactgcttcagccctgacacagataggtagaagaatataggtttcattttatttttgcaaagcataaaggtagtcaaatttacaaagatttggagaagcatagaaaataatttcagatggtacatgattatgagatagaaacgtgaggtagtatgtcttgaactggagtgaagaatagtacttaatgtgaaaaataataatttatacagattcaaattcaattaaaaaggaaaccatatcacacttaatgaactgcagaaaattttagtctttcatctaaaatgagaacacacagaatgtagctgaatccagacgatgtattacagtcattgagttaattctctatgctgattaaaataaagacataatctcccataaattgcttcctgatattcctttaagttgtttta

SEQ ID NO: 16885 - DNA, 837 bp, Homo Sapiens
ggtcaatgggattggacagtgatagacagtgggctaggtcacagcaggctttgtgtgctataccatggagattagattttatcctctttgcaaataggagccattgaaaactttagctcagaagaatgatgtaagatttgcttatcagaatgagtattgtgagaactgtataagtggtagggtagccatatgaggatggtgaaactttaagaacagagaccagcgaggaggcgattacagtaatccaggtaaaagatgaagaaggaaagagtctggtagtggcagtgaagacagatgaggaaagatgttgttggatattaagaattagaattaacaggagttattgattaaatgtagggggtaagggagggggaaggatctagaatgatttcctaattttggtcttgagtagcctagtaaatactattttaactataaatgcacaggaagtaaagcagatttgggtatgacaataatatcacaaggtgaaggggtcaaggaggtagataagctggcgcaactttattttgtattaacatgaagcattaacagtattaatatgaagtaggttgtggttagtatgcacattgtgctccctagagcaagtaaaacatactcacacaaataaatatagcttaaaactataaatagaggaataaaaatgatatgctaaaatttttttatttaataagcctgtaaaggagggaacagaagaacaaataagatgaaacaaatagaaaacacatatcaaaataaagacctaaatttcagccatataaatagttatgataattggaaatggacccacacactccaagaagcagagattataagatt

SEQ ID NO: 16886 - DNA, 849 bp, Homo Sapiens
gtattcatcacaatattcctacctttctaccacatgaatcagatgtgtcataacaaaccaatctgttgttgagggaaaaaaaatcaacatgtagaagtatttttgagttgaagattcagctttatataatgaatctatctacatattaccaccatgtgagccaatctccatatttatttcagtggttctatgaaattgatatctggatttatatcttgtgcatggtgtttactgcaaccacaatgttggctgttggtacattcttctggtctataacgtgttatttatttcttggcaattcagtttttagtcttttatcattgttttcttctaaacatcttaaagcggttacttcccaacatatgtttggcctgagtgctaaccaatcttgtccttacattttgggtttactaaaagtatctaacatcgaacaaggttatcttcataagctgaagacattcatctggtgatttttctgtattacataatgagataggctggtgataatattttcactttccatatacggaaataaatgatatttactgctttaccacagaactctccaatgttagctggagccaaagcaagagataatagttgtggaccactgttcttgcctcactgtagcagttcagaagtgacagccacagcttctaaacattaccatttaatttaagcagtgtgagtctccttggtggggggaaggaatgacttgctgacagttgatcattttttcaatatgctttcagagagtatttataggttgttacatacatttagaacggtctatgtggtttaagaaaagatggaattaaggccatgcacattatgttttttaaattcaaa

SEQ ID NO: 16887 - DNA, 539 bp, Homo Sapiens
  misc_feature (380)..(394): n is a, c, g, or t
gcacgaggggggagcgggaagtgaggtgggagggctattggtttattctttgtctactggattaacccgattatacaccaggcaccagcacaaaccgcctcccccacctccgagccttgtacgggaggaacggaatgcagattcgagtttcaagtaccttctgctcttgctgggatttgcttttgattgtgtcgacttgtagtttttccgtttattagaatttcatttttaaggggggttatctatgaatggaggctttttgaagagcttccttactattttgcttcatgcagtagctaaagtctacagtctaagccttttaacttaattcattaataggaacaagattactcagggcgacagcatgggcttccgaaatnnnnnnnnnnnnnnnagggaagggttggctcactgcagatttccttcttcccttaactaaaagtcatccttcatttcccacttttcttgccacctagaacatttctcaagattctgttgtccatgttgaaggtgcactattctttcccatttacaaaaaa

SEQ ID NO: 16888 - DNA, 782 bp, Homo Sapiens
gcacgaggtttcaagtgtacaataattattaactataatcattgtgttgtacaatagatttccaaaatttattcctcctaactgaaactttgtaccctttgaccaacatctcatttcccactacctccctcactgcccctacaaccctggaaaccaccattcaactttctgctcctatgagtttagcttttttagattccacatccaatctgaaatcatgcagtattggtctttctgtgcctggctcatttcatttcagctcaatttttaaaatgtaaaagaaatcctctggtcaaacggagtttcaattagaatgtccagtcacgtttttctctgaagccacttcccagtctgccccaggtttcagttcactctgcacagaattgtatcttctggactcctgccttctggggtgattcttttgaactcaaattaagccagtttaggcagatgttctgtcccccgtgacctgccttggggaacaggaaacacttatgggtgtttgttctgccattggtagggagtgaaggtaatttccagtttggggaacaacatgtgttgtaaattcggagggacacaggtaaagcgcttcaagtgaaccttttgaaggccccctctctcaaggcttgagagaaggttctcataggggtatgagagaactttctccaaaagaacctcttcataagcccttatttcctcaatgccagcagtgggcaacctacagcctctgggacaaatcaagcctactgcttgtctttgtaaataaagtgttattgaaacct

SEQ ID NO: 16889 - DNA, 447 bp, Homo Sapiens
ggaagttcccaaggttatttttgggaggaaagaaaacattggaaaacttttgattgaaaaaaatcccccctggaaaagtggacattccccagggagcattttctaagtaaagggggattggttattacatttaaatggcccacaaaaattcatgaataccccaaaaccaacatttccactaaccggggtgggggaaggtgtggcaatctgcaaaaaaacttctgggagaatggaaaagggacagaaatgatcaaaattacctaaaaataagaaaaaagggcgccagccaaatttgcagaggtaactggcaatacgtcaaagcattcactcttctcgaaaccgggaatggccactgtctagcacaacacccttaaaagccaaagcacaaaactaagattgtttgaacccaaggcctggtgggtctggaatttttaataaaaagccctc

SEQ ID NO: 16890 - DNA, 760 bp, Homo Sapiens
acctcctctgttgagtttttttattattcagataacttatcaagaatggttgaacagattatccaaactaattttggtatccaacgggtacgtctctggaaagaatcccttgggttggcactgagcactctgacttttctccgtgatcatgatcttcagcagtaccatgaagacagcagaactcaaagttcaaggaattttcatttttcaaccaatcttcttctgtcttttctccactgacatcttccattgcaagtagatcatctttagtgtcttccagtcaaggggaaccacatagtcatcaggcaacaaggattctgtgaaagaaagaaagacctaatctcatctctaatgtcacacagatttttgccctaactgtgaagacatgcaaacctgatctctaattcaccataccattaaaagtctggttttaaagatatttcggtgatgtctaaagctggagtttgtctcagatctcaattagtaaacactatccagactccaatactaggattcatttgagttcttgccttatttgcaaggccactgaccatgagcttggctcgtccaatctagccaaacaaatcgcttcgtagcctctacttatggttttctctttatctctttcaagtacatgccatttccaaatatgaaattctttccctctgcttttctttcaagctacattctttttcccttgtacaaacacgggcttataatgcacttccacatgtaaggcattcaagagaaaactataacc

SEQ ID NO: 16891 - DNA, 805 bp, Homo Sapiens
ggttataaaggttacacatacattatgtcattggtttgacattggattagagttggcatagaggagatttaatctaattcacttggacaattaaacaattaaaagggacatatagtcccttcagtgtactgttcttggtgctgttgacctaggatccagtgggagcatttaatcctgtgtagataataaataaaatctcaggattcagtcttctcttgctgttgacagtgggactgaactgttttccttatgcttaaccttaatattttccatgttactatgtggaaatgtttctggggcagaaacatcctagttccatctcagtgatggtagtgattttatgctgttgccttcttcacaatacccttatgtaatgtatcttaccttcataaaacttatattcatttattcagtaaaccttcatttaacatcctatactaggctctgaggatataaagataaaaagaagtaactcctgccctccaggaactctcaatctggtctgcaggaagacatgcaaacgactattactgtaattaggatcatcattatgaagttcatataagatattctagaatgtggaggagggagttcataattctgcagatagcctgtttggaaatgtccaggaaaagtttcaccaagggtataatagttgtattgagatgagtaaacctttatagctaaagaattgggcaaaagtatcccaagcagaggaatagcaagtgtaattcctgaaaacttgaacgagcatactgtactcaccagtttgtaagtttatattcacttgagtatttaacctaaa

SEQ ID NO: 16892 - DNA, 886 bp, Homo Sapiens
gcacgaggtaaatccctaagtggagaatcctaagtaaaatagaggtacagttaccaaataatcagggtagatcccaggggtcaaaatctgaggagagttagcctcagggaagtggagccatgatggaccagcagctgagcaccaaggagaaaacagaacacaaagcattaaacaggctgcccagtggatggtcaaaataggggacaggtgtgagcagagtttagctaaggagctaaagttcagaggaatgacctcaggcttagacaaactgaaactcagggcagggacacaagtcagggtgacaaaacactacccagtgggatcataggtcaaagcagaagcccagttaccagaactggagcacgaggtcagagcagggcagctcatcagtgtgtaaccaatgctgctggactcctcagtttcccaacaagggacaggtctggtcccacagtctggagcagggctaaggctgcaggcaggggtgaagaacaaggcagccggggtgtggggacagggagtcagtgctcacactgcgatctcgcagccttcttctccatagtgacacagccctggggcctctgctcagcccctgagcttccaagcagaaagggctgtaggagaggatgaagtaagtcagggaaacggagccaccgtcatcagcctggagcccttgtcctgcatggagtggcgcgtgggggcggaggagagggagagctgcttttgtttgtttatttcctcatagcaactcacaaacttagccaaatacagatacaaatgaagtgcatgaaaactttcctaacttcctgactcagaatcgttactaaatatatagatcagatgtggcggacgaaggcagaattgtaggttcacctaacagtcctcaaca

SEQ ID NO: 16893 - DNA, 854 bp, Homo Sapiens
gcacgaggcagtttgcagcattttctgaaaatctcaaaaaaatccaataggcagcctttctaacaacatgataaattcagaatactatgcaagttcttttaaaaataattgctattcttatacaaattgctggttgggggtgggggatatattttttcatatattttcatagggttcaaatggaagtggtaaggaaatctgaatagctaatgaaatagctgtgttttgtaaaaagaaatgtaaaagctattaaaatgttacattaaaatccacttgagatgcctaaaatgtactcagcagctctttgcatgttgtaattttcatatcaaaatgctttatttacattggaagagaaatttccattacaaaacaaaaactgacatgaacgattatttcaaaatagtattttgtagctaatttttaaaaatttggagcactattataaacacaaagatgactcacaagttatctcttttataatattttaagtactccaaatttaaatatttaagtctatgatattgatatttattaaggtaatgtttttaggagtggagatataggaaatacaaggccaaaaaatcttaaaggcccactttctcatggaaaaataatctcttgctcaggttttctcaacaggagggaatgaaatggaaatgtagcagagtttcaaaactagaaatgtactagagatggaagctgtattctttactaaaggcatcagcattactgttaacttccaggcttcctgcaaataatgcgtgttaccactctctccttaactttttgactctgtcgagagaaggctcatgtttcctttcaggtctctcctctaggtcaggagcatatctagg

SEQ ID NO: 16894 - DNA, 636 bp, Homo Sapiens
catattaaatataaatatatatttttatgtatttaagtaaatacataaaagcatatatgcttatttttgcttttgaatacagtgaatacttactacacttaaatatttaagtgaatacttaatacaacctgagactcattccaaagcaacacacgattatttcctgaatctttttaatggttgcattgtgttctactgtatggatgcaccattcccaatcagttccctattaacggatatttgggttatccctaacttttgctatgacaaatagcactgcaataaccttgtatacctattgtttccatgtgtggagctgcaccttcagaataaggttagggttaaaagtataactgcaaggtataaaaataaacacaagtaattttgtactccgtggaacttgaaccatttttccactcccaccaggaaaggtaatttcaacgtgtatttccattgtaagtgaggtggagcgactttctatgtttaaagaccattacggtattttttctgaaaatcatctgttcatgtccttccccattttctcctttggcttttgcactttttgttttcaatttttgagagctcttgtgatacgagttgcaaagattttctccagaccgatctgattcactggaa

SEQ ID NO: 16895 - DNA, 937 bp, Homo Sapiens
gcacgaggtgcctcctcccccggaattttcttaattgaccctgggccagggaaagaaatgaatgaagatgccaccttatgcccagaacacatctctcattcaatgataaaggatttgtggttgggtcaacttttgtgatgctcaactctttccttcgtaaggacgggctctttctcaggaggcttttgtactcccaattaacgcactgctgtaagtttgccatatcattatgtaacacatacctggatgtgtttgaactctgtctcaggatgaagctatgatgtcccattgcaattgttttgaaatctgcttcctgtatccagagagaggggcattaagatcccagagatacgtagttaaacataacctgcatatcagctgctcttcattgcaaaatgtctgtgtttgcacataataccttaatgttttcagcttcagctcacttcaacatagacatttatgggatcttttcaaacctatccttctccatttattcacaccacaaaatctagtgatcggcatagaccctgataaaacttttgtagggagaatgaggatggggcttatattgcataatatattaatctaacttcagctatgttgtgataataaataaaccttcagatcttaatgactttgtataaacaataagtatttctctcccatgcagaatctgatgaagctctattttgtagctatgccatctggatcacatagcctccaaggccagcagagcagaggaagacaaagagcagagcaagatagaggtggaagttacacgtcctttgtgcttactttctactggcctcatcgggtcgcaagatcccactctgataggtgcatgggggcttggaaaattagaaaacatgtgaatatttgggtaggcacttacaatctctgccagcatctgcccttctaatcagcaaattttcaatta

SEQ ID NO: 16896 - DNA, 575 bp, Homo Sapiens
gcacgaggagagaagtcaaggttaagctgtgggagagagtgaggatgtctgggcgacagagccatgagaatgggatgaggtctggaataatgacagagagatgaccttagccaagctcaggtccctcttccactgtgatggggttgggaaaaggggggatgtgcaaaacaatgggtgtgaaagtgttgttttgtagcacaatattttaattatgtccttttaaaaaatttccccacagacactacccgaagcagtccttcaccacggtggcagatacacctgaaaatcttcgcctgaagcagcaaagtgaattgcagagtcaggtaacttctagaagatttgttttgttcccttggccctaaagatttttcacaaggctgctcttctgagattcttgtcttcgtactgttcctgctgggtcaccagccggtgtggaggctgaaagcaggcctgtgtgggaattccgggtgaaagtgttgaacatctgtactgttcccggtcttgaattgtcctgatattctcagttttgttattcacgttggactagggcaagtaaatgagttccggtcagagtc

SEQ ID NO: 16897 - DNA, 868 bp, Homo Sapiens
ggtgaagtctttaggtttttccaaatatgagatcatatcatgagcaaacaaggataatttgacttcctgggaggagggataattaacgggcaccttaaatctctaaaaccttggtaaagtgctttgttttataaaatagataatagttagaattttgtgttttgtctatggatgtctacacattattttagaccctggaaatacaggtgccacagctgacattttatttgctaaatttcaacaataaccatcatcaaacagtgaaaaatgaacaggaataaatagcatgggaacattaagtggccaaagggtatgagaaaaatgttaggaaattcttgttatctgtgcaattagaaacaaaataaaccaaagaattgaattaatgacaagaagtgatatatattgaactaaaatatgttagcatctagtcatttctatttctaaaatatcatagtaaagggaagaaaagccattgtattcaactgctcagaaatctgactgtgagtactccagcatctacctacctttgactatggacttctgaagactatagtactagcactagcagggaacaacattcaaagaaccttggactgggcaaccagccttgcgattaaatgcttcttgctcaatgttcatctaatacctttgggttccaagatctcaacacattcttagcatttggtctcagcaaaagatcagataatcatttgcttctcagtgtagattttcagttagtggggtttgatttcctcatctagtactatttgccctccttaaaataaatgtcccaaaaagaaaataaaggacagggcaaaaggcaatatgccaagggcaccagaagctactatgcgggggttttcctttt

SEQ ID NO: 16898 - DNA, 612 bp, Homo Sapiens
gcacgaggtgatggctcattgtccttagaattgcttttgtaaatgctccaccacttatgggcaaaagtttatggactactgcctgatgtacccagaatcctgagttctgtgaaaatctgttcattccaaatctgttaagcatttccaaacatccagagaatggtttcactgttgagggtgcatgtggcagaatctgtctctctctgcacctgtcttctgttaccatcccaggacagtgacagattttaagccagccaccacaattcttttctagttaaccatttcttattttctgtaaattcatgatttgtcttactgaactacagcctggtttgtagacttcctgtttctacactgctgctcttcaccattggaattcactgtggtatttatattactggcttcagtccgagccacaggtaataaaaggatatcatctgtatttctcaaccatatcatggtgtatagatgctgttattcaggcgaacttgctcatgggtggactaacacctggtttggtacagaaactgatggtttttcattctggtgtcaaagttttgtgactttatgggtgtgaagggcatttgatatatttttcttatctatggggtt

SEQ ID NO: 16899 - DNA, 914 bp, Homo Sapiens
gcacgaggcaagggttgcagactgaggactgcctccacagtttaaaaaatgttctgagtagatccaacataccctgtttgggggtagcactctttaaacgtccccaaagtcaattcagacaggatagggcaaaggttttgtgcgtgtgcattttcacagacggggcatcgtagctttcatcagatcctcaaaagaggtctatgacccccaaagtggtaagcaccaccgtttccggatggtccagacctaaaggtgagcctacactagtgcctgagtaaacctttaggagagctcttgggccagatttccccagcattccttgtgtgccacgttgggtgcttcccagcttgctgagcagagcagcagcttcaccatgggcatctggtccttgtctagcacagtctccactgtcttgggcctgaaaggggatccgtggtgtcaactatagcaaaattctaggatctttaggaagcagattagggaaacaagattgataatacacaagtttatcttttctccctctggagacctcattaaaatgagattaaagccattgggggggaacaaaaaaagtagagacctacgttgacagtgaacaggcaatggttaccaataggtaagtaattttaacaagtttcctgaagatggagaacagctgcaagggtggtaattaatgaggcagggctgaggaaacctttgtatggagtacaaatggaggaacacgtagctgggcagtagcagtttgccttataataccctggagaggatgaagatttcaaaactcccgatacaacagagagcagaagtacaagggcagtggagctgcgtttgctggcaggcatctatcttcaaggcataaaatcagaacacttttatctctaagaactgaaaaactggagaaaacatttttcttt

SEQ ID NO: 16900 - DNA, 766 bp, Homo Sapiens
gcacgaggccaataaagaccttgagaaaacagcagagccaagtgaagatcacctaaagaactttgtggctaatttatacttcatgtagtagcagtgggtactgggcagggtctctttcccactctgatgatttgtgctcttatttttcctagatttacctcatctagggcatattcttttccctcttcctctttacctttcctggtcctgatccctctgtactcagttcccctaaattattggactacaaactaatatactagaaaagcatacacttattttatttgaatgcagaaatgcttaacactgtaactttcagtattccccagttagcgtacctaactctcctgtgggttttgttaattcttattagactactagagaaaaaccaactggcagtttgctaagcatatctactggtgttgtttctgcgccctcttttggctaattgatgtaattatactggctctaaagatttactgccctataagtaaatagtatagccacattctgaacatatcaaaagtacaaacttaggaggagtgtatgtacaaaaatgtaaaattttatgaaaatgaacatgtttttatgatgttatttctagttcataagaatgtgatgactgctttgcttcgtttatgtacgttcccattatattcttgctgtcaatcaatcacaaatttatatcacattaggataaactaagccattttatgtattttattttaaacccttattttggcagagtattccttagaatgggaaa

SEQ ID NO: 16901 - DNA, 845 bp, Homo Sapiens
gttggcaccctttacccctgaatcccaacacctcctggggacctggacatcagtggtgtctgggatatgacaggtctgaacatcagtcagtcctcagacaagcatgtaccgacatggcctttgtgcccagtcttgagctcagtgccttggagtttacaaaaaagtcgaatagccgccatttaatgtcctatgtgccaggaactttgtacgagttatctgattgatttctctcatgacccccaagaggtaggtattattagatcattattcctgttccacagaaaagaaatgtatatgtatgtactttacccaatgtcatataactagtaagtggtgtagcaagagtttgaaaacactttatttgaactccaaggccttttgcttttggtcacttcactatactaactgggagtcaaaggtcagatgggccttgaaaggagtgaaatggaggtagcaggatggagcaaatcgaggcagccagacacactatcactccttgagcatttattttgtgctggacactgtgcaaaggactttatgctagtacattaaatcttcataacagccccatggggctagtgctagtattcctacattattgtcgtggaaacggaggctcaaggaggttaaatgacttgtctaaggtgacccagctaggaagtgacacagcctgtaatcatcctatatgccaaactgggcctgatatctgagacacaccacccctgagctgcctccccagggtaggagaggatttccaaacatcatgttcccagggcattcatctccttctgatcttttcccttccccagctgagagcaatacctattacacaggggttttaaaag

SEQ ID NO: 16902 - DNA, 400 bp, Homo Sapiens
aacctgctggaacaacgggcaggactatcggggtcgggtcttttgatttagcgtgattttgcccattgcggcctgtagggtaaaggttgagcggatttggcggctatttatagcccattttttcctgattttaacgcttacaatttaggtggcacttttcggggaaaataccgcggaacccctaattctttagttttcgaaattgcttcaaatatgtatccgctcgttaaagaattagcctgaggagggcttcgcctgggcccaaaaaggaacactatgaatattcctgtcttccgtgtcccccgaattcgcttttgtgcggaattttgccttcctgtttttcctcaccagggtgttgaacagggacgtaaaagatgctgaaggatcacggaagtgccct

SEQ ID NO: 16903 - DNA, 589 bp, Homo Sapiens
  misc_feature (108)..(384): n is a, c, g, or t
  misc_feature (386)..(416): n is a, c, g, or t
  misc_feature (444)..(452): n is a, c, g, or t
ggcagagctgctgacctctgacctctgccaaggcagacgcattggacaacagagcaggacctgaggtgaggctaattcctccaggtgtgaagaaacaccttagggggnnnnnnnnnnnnnnnnnnnnnnnnnnnnnnnnnnnnnnnnnnnnnnnnnnnnnnnnnnnnnnnnnnnnnnnnnnnnnnnnnnnnnnnnnnnnnnnnnnnnnnnnnnnnnnnnnnnnnnnnnnnnnnnnnnnnnnnnnnnnnnnnnnnnnnnnnnnnnnnnnnnnnnnnnnnnnnnnnnnnnnnnnnnnnnnnnnnnnnnnnnnnnnnnnnnnnnnnnnnnnnnnnnnnnnnnnnnnnnnnnnnnnnnnnnnnnnnnnnnnnnnnnnnnnnnnnnnnncnnnnnnnnnnnnnnnnnnnnnnnnnnnnnnngagtttatccttcatggttttcaaatcnnnnnnnnnaaacttggaagaatcttacaggaaatattatttatagtgaagaaacatttatctgaagttccacagttctttcaattaaacttctatttctgttccttttgttaaattcaaataaagttaaatgtaattttaaaaat

SEQ ID NO: 16904 - DNA, 700 bp, Homo Sapiens
gcacgaggaagaccttttgtacatttttacaggggtgcccctcccaacagttcccttcctggttaattaaaccctcagactggtgctgtgttcctagcctctggcctctctgtggggaaaggggactgcagggggaagagccgggaagggacagtcaggcttctccctgggaaggtggggccagcaggagatgaccaacagggggcaggacctggggacctgggctggagggaagggcagaagcttcctacttggctgacagccccggttcccccaacatgttcccgttcactctgcccccacccccaaaggctcagcctctaaatctcagactccaccacctcttaatggctcagtccccttcaccccatttccaagtgcccccaggactcctgggccctgcttccctgaaccctgttctccaaaaccctgccccaggctaagggtggccagagaaggtcaccatgtaccacacaccaaagaagggggtcggcccaggggtgggcgacacaggcagcttcttcggcagcctcacggcagcaaccccagccttcccaaagcagcaggcgcctccaggctggggcccaacctagaaggcaggggtcaatctaacaaaaccctaacgttgacttttttccctggtggggcttcttctgtaacatgacttgcgaatatttatataaaaacgagtgttacaatg

SEQ ID NO: 16905 - DNA, 1014 bp, Homo Sapiens
gggcaataagtgatttaaagaaaagaatggcccacctcacagaaaactcccgagtctgccccccccagatttcatttcaaattaggcatacatccgacaatatttggattccatttttacccgtttttgctctttttccagctcagatgcagaaagctgggacgaagattagacaccacttttctatctagcaaagtctatgttgaaacctgtgattccttccttcccatcaggaaagagttaccttggcaacgaaattactaactcactcaattagcccccacttctaccaatgctcagtaatcacagaccatcagcccccggagagctcagctttcagcagtctgatgctaccgcctcatttagagatggaagctcagaaaggttttcacttcgaggtgcgctccatttgaacactgtgaaagctggtgcaggcgcaaggggcaaaactcttccgagtagtgtttcctcctggttttccatcataactgaagggagagccattgacctggccctatcagtgttacccaaaagacattatagtaagagttgggggtctgcaggcagccctccactgtctgctgtgtgatatgggacaggttctataaacttcatgagactcatttgcaaattgtgggtagggtatgagcaccttgaagacttgtgtggaattaaaattaaaccaagagccagtggtatggggacccaagagcaaatataaacaaacagaacatgtttctgagagacgttgctttagcccctttcttagtctctggccgaaagggcggtatcctatccgcctatgtgagttcttatacccgcgcttcatggcgtcgttttacacgtcgtgatggggaaaccctgcgttatccaccttatggcgtggcgccatctcctcttcccagctgggttaataacaaaagccccctggatgcccctcccaacatgtgtgcatcttgattggcagggtagccgctctgtgaggcgccctttaaacctcgcgggtttgtaggg

SEQ ID NO: 16906 - DNA, 310 bp, Homo Sapiens
  misc_feature (52)..(61): n is a, c, g, or t
  misc_feature (76)..(84): n is a, c, g, or t
  misc_feature (107)..(156): n is a, c, g, or t
aaaaccccctttacaccccccaccaactcaaaaatatattgttttaaattannnnnnnnnntgtctttttatcctnnnnnnnnnaaaaccaccaaaaaaagggcccnnnnnnnnnnnnnnnnnnnnnnnnnnnnnnnnnnnnnnnnnnnnnnnnnngaagtctccaaaaaaagtgtggttggttcttaaatttttatattaacaatcgaataagggggggccaaaaaaatttaaccccatctgcaaaaaaatttccccccccgggcgccaccttttatatacctttaaactttggtggggggggtttctt

SEQ ID NO: 16907 - DNA, 746 bp, Homo Sapiens
  misc_feature (583)..(591): n is a, c, g, or t
aaacagtaaacaataaacttttatttaaaaaaactgattcagttgtgttggaaaaaataaagaaatctgatattaaacgttttctaagatcatttgtataggttcagtgtattcataaaaagtccaccctgagatgcctgtaaaagtcaaatgtaattacacttcaaactttaatcctaaattattgacagatagatagatagtgaccaacttaagggtaatcatatatgtgactaacatttgggaggaaacaggaaaacagtggtctcaaaacaacaatatcccagtctccatttgaaagagcatagatcttggtaaatcattttgaaaactatgtgctttatttcccaaaagatcaaacttaatttttaaaagacacccttttcaaaagtatgggttttcattgctgtttagtttcttaggtgtggtatgtcttacgtagcttatgcttacaaagccaaataatcgcagggcaaggcagataaaggcaggcaggatagtgacagtggctcggtgagcatccgccaagggcctcagaccactgttaccataaaaacatccacccagtgttatgacgtccgannnnnnnnncccttaagaaggtggaaatatggcttttaatacataggaaaccttcagtttttaaatgcagggcaaataaacatttttaaacagtgccagccagactgccagttctcaaacagactgaatttccaagcacaaccttttcatgtttataaaaaata

SEQ ID NO: 16908 - DNA, 692 bp, Homo Sapiens
gcacgaggataacatactcttttgtcttggataatctgttttctgggttatgtatctgttgtctttggcctactcagggatttttatttctttaaataacttatcttttggacatatttttatattatttggaaaactttccaatattcctgttacaaagtggtgtctgttttcagtgatggctatttcatcagtgcttgaaatagtgtgcactgtgttgcacaggtttttcatttttctattgagtagatatttttaaattaacatacacatttttctctttaaagggtcatatctattaggcctttccctgctggtaacttaaaatgattatttgtgaattttttactaagtttcatcaagatcttaaaaagagagaagaaaataaaaagtattatttatatgtcagtgccaactttgaaggtaaaacagtagtagtaacttttgggagaaattctaaaaactactttaaaaagaagcgtgcacataaaataaatatctttctatccaaggcttgtcattttatatgcttttattgtaaatttaatatatactactttaaaaaattgaactatacagaatttataaaatacaactttctctacttaccccacctcttattttctaggggtaaccactgttaatggtttggtatgtgtccttccagacactttctacaaatatacaaataa

SEQ ID NO: 16909 - DNA, 773 bp, Homo Sapiens
  misc_feature (312)..(356): n is a, c, g, or t
gcacgaggatattgcctacctagtctctaaataatgaaatgtgtgtgtttgtgtgttttggctatattatgctatataacttcaggttagaatttgccttcagttttttttctgttttataatatcactggcctaatttatttaggtgtgtacatgttgctcatacatacacacacatataggattacaaatgtggaaaatgttataatgtcatattctagcattggactaaatatcaatttctgactcttaaagtagttctgtgtataaatccaacatgatgaatcaaggcaataatttctcaaatgttcnnnnnnnnnnnnnnnnnnnnnnnnnnnnnnnnnnnnnnnnnnnnnctagtacgcaaatagtgtaaaattgttttaatgcctggactttgaaacaagtaacaagtgttcgaaagtatataatctacgagcgaatttgccctccttggactaaccacatacaaatatgaatctggctgcaagaacaggatatccaggtaactaaagattgggcattgataaaaatatctggtggagaagcctaggatttcaactttttgtcaaaggatttctgttgggacagctttaccagaaaagaataatagcggatatgttcatcccaactaagaactctcatgcatcttgcattgttacatagcctgtggaatgaattcatttttttctccctttgagtccggaatgacttccctggaaaaactcaatctatatacagctgtgccaaaatgaaaggatacttgcctctcc

SEQ ID NO: 16910 - DNA, 373 bp, Homo Sapiens
ggtatcatatgatgtgattctatgccttgctttttttgtctctcaagaaaagtcttgggtattttcctgtctcatagtacagtttgaatgtccccttaaactggtcacaggatttcatgtggtggcacctgtagcttcgtagccatccctgttggaaggcatttccagtttcctgctgttctgaacatttgaactgacacctctctgtcaccgtgtgcactttcccctagggtgtgtgagagggcacgagcgccctagggtgcctgggaagaggtcccatcagtctccatcccatgaggagtggctgggaggacctctctcccccttcacaacctgcgtaacatgaagtattttattaaagagtctgctaatc

SEQ ID NO: 16911 - DNA, 639 bp, Homo Sapiens
tgagtgaggcaccacacctggccaagaatttccttaaagcctatgaagtggtgagcctttcatttcatgtggaaggttctggtggctgcaggatggcctgaaatgagagagcaagtgatcctttagagaaatggtttccttttatccagtctgaagctgatgggggtgaaatctggagtggcagaagtaaggctggaaaggaggagctagatcggaggagaaacatcagcaggacttggctgaaatgtgttgggtttgttcattcgtttatttactcagcagatacacagggagtgctcgctgtgtgcttggcactgtggtcaaggaactgagtatgcaacaaagaagagaacacatacagtccttgctctgtgccactcacagtttggcacaggtccggagaggaagaggagggctccaaggtgtgctcaaggttccactgggacagtggtgtcctccccaaaccaatgaccaattagtgaggggtgcagtcatgcccgtgggccttcaacagcattttactgatcagagccgctctgccggcccgagggagctgagaaagggcttgggaatggggtcttgaggaggggctggccggaatgtgcagcactagcccagctggagcggggcggcgcgggc

SEQ ID NO: 16912 - DNA, 923 bp, Homo Sapiens
gcacgaggagggataggcctagagacataaattgtgctgctaataccaatatgtgcagctggcatttctattgtcttgtctcttatgacagtgccctcctctggaagctgttaggataagagctaatgtgggctgtgccacacaaaggtgatggcaaattgatgagcctgtaaagagattcagaggcaaatagggaaatgcattgttaatgctattaaatattacttagcctacagcaagctgcatgttcaacagtttaaactttaattgctagctgatgcagaaacaagcctggatatatgtaaatcctattgaaagctaatatcattttggctgcttagatggattagcagccactacaattagcagcatgtgcaactaatgatattaggggagaatccatcatgcagtggtctaggcctttaaatctgaaaagaagttaaggctcttttccccacagaaaccccacactggggagtcttgccaattgatgcagcagactctagagtgagccaagaagcttatagaatgcaggagcctgactccactatcaccttgaattgttcttctttttgccctctaccggcaattctagctaagcacattacgaccaacactgcctcctcccaactctccagggagtgacagtggatcacagagtagaggcaaaaagatccatcttcagcgattgaacccttgtggttcactctggctactgtggttgtgatcgaaagagaaaagacaaagctttttctcaaatgtggcaccactgggaatcaagttgttgtacagattacttactacaatgttcgtgactacataaaagggctcctagaaaataattctcattgaaaacttcactgctttagatagtctgtgaaacttgtcatgttttgagtaaatgtctctatctgtccataaaa

SEQ ID NO: 16913 - DNA, 790 bp, Homo Sapiens
  misc_feature (600)..(646): n is a, c, g, or t
ggtgctaactccggcaagaagacaaggatggtttcagaattgaaaaaggaaggagaaaggggaccgtggaatcctgatacccgttggggcaagagtcaagggcagaaaaagttacttaattattactgcagatcaggcgcctcttttttcaaggtacatcttcatttcaatggatacatttaagcaggttccagaagtatacactgcacacattttcaactaaagatagaaactatgcttaaaaagctaatttggtatttttaggagtttgggtttctttgatctggccaaaagaggcttaaaattcagcttcaaactattttggtctctgcttcacaactctgaaataactgctacatcttaagttcccttcgaccgctaaaaagtgtgggattctatcaacctgcacgctggaaaggctgaaagtgcagggctgacttcacatcaaaatcttctctttcatgaggatcctggctttgtcaaaggaggtgaatttcaaaatgtatgatttggtcacttttgtttgtgacagggtcagaccttcctaatccaaattcaaggtttttctctttacagtacaggaaaatctgggtgcctgcnnnnnnnnnnnnnnnnnnnnnnnnnnnnnnnnnnnnnnnnnnnnnnngaaacaaggtcttgctctgtcatccaagatggagtgcaatggcagatcttggctcaatgcatcctggacttcaagctcaagccatcctcccacctcctcctcctggggacctgaaatacaggtgtgcgccaccaccccacccaa

SEQ ID NO: 16914 - DNA, 836 bp, Homo Sapiens
cccttaaaaggatcccccgggctgcaggccctcatcgagggttatatctccattgtcatggatgctgaaacacagaaaaagttccccagtgacctcctgctgaccagctcctcgggggagctgtggaggatggtgcgcatcggtggacagcccctgggctttgatgaatgtggcatcgtggcacagattgcaggtcccctggctgccgctgacatctctgcctactacatcagcaccttcaacttcgaccacgccctggtgcccgaggacggtatcggcagcgtcatcgaggtcctccagcggcggcaggaaggcctggcttcctgaggcccatgggcaacagagcagcctccctgctctcccctcgacccaggcttccaaagacttctctaagctatttccttaagctctggaacgagccccctgttctgctggggaccctcgttccgctctctgtatgtaagctgcgtgcaggcaccggcttttacgcggacacctgtgtacactcacaggtggagtgggcaggtgctagcctgactgcgtgtctgcccatgcaggggaacacggtgctcggggcttaagcccccaacccatcactccctgcgcagcctcggcgtttgcacagtccctgcctgaggcctgagccattccccaaaggcttcctgggcagctgccccgctgacctccgttctgcctctggtggggttgccttccctgggccaggtgagtcctgacagtgcctctccctcctggggtctccaaggaaagtaatttgacatctctcctctcttctgtttttatgacttgttaataaaagactttgttatgacaaaaat

SEQ ID NO: 16915 - DNA, 851 bp, Homo Sapiens
  misc_feature (670)..(699): n is a, c, g, or t
gcacgaggattcttttgtgcctgacattttttgttgaatattttgtttgcaagatttatcctattgttgcatatgcttgtagactgttcattctcacagatgtattataaaatctattgagcaaatatggcacagtttatttatacactctactgttggtagacatcttgatagtttccagttttgtttggagctattacaaaagtgctgctataaacattccagttaagtcttttggtaaactcaaatatgtatttttgttgaatatatatgtatatatacctaaagaaagattcgttgatactgccagttttccaacatggttgtatcaatccacatcactaccagttgtgcataaagatttgagttgccttgtatctttgccaacacttgaaattttttgtctttattgttttagccagactagaggttgtttagtggtatttcactgtggtttaatttgcatttccttgatggctaatgaacttgagaatatggaaatatgtttattggccatttgaatgtctttctttatgaagtacctgttcaagtattttacctattcctctattgagttgcctgcatttttcctattgatttgcaggagttctttatatgtgctagataagagtgtttttggtactctacatgtaacattatatgtatgtgnnnnnnnnnnnnnnnnnnnnnnnnnnnnnnaaatttcccactttgtagtttgccctttcattcttttaatgtcttttgatgaacggatgtttttagtttatttatgcaaagctataagggtaagaacaatgttagattaagctttaaaaggtgattcagttccctgaacagaaagattggga

SEQ ID NO: 16916 - DNA, 869 bp, Homo Sapiens
  misc_feature (275)..(557): n is a, c, g, or t
  misc_feature (559)..(596): n is a, c, g, or t
gcacgagggggaaaggctttggaatcaacatcctaatcctagtcaccataaaaggattccatttagtttacctttagggtagaattgagagacaggcatagtgacagcaaaggttccattccccaacccttttgttaaattcttgaaatccctttaaggaaacaaagactttcatttcacagatttataactgttggaaggaaaagaccgagtcaaactttcaagtatgagttgggactctttaatctttttttggagggacaagaaaataggcnnnnnnnnnnnnnnnnnnnnnnnnnnnnnnnnnnnnnnnnnnnnnnnnnnnnnnnnnnnnnnnnnnnnnnnnnnnnnnnnnnnnnnnnnnnnnnnnnnnnnnnnnnnnnnnnnnnnnnnnnnnnnnnnnnnnnnnnnnnnnnnnnnnnnnnnnnnnnnnnnnnnnnnnnnnnnnnnnnnnnnnnnnnnnnnnnnnnnnnnnnnnnnnnnnnnnnnnnnnnnnnnnnnnnnnnnnnnnnnnnnnnnnnnnnnnnnnnnnnnnnnnnnnnnnnnnnnnnnnnnnncnnnnnnnnnnnnnnnnnnnnnnnnnnnnnnnnnnnnnntagggcacctgatacctgacactgggaatgggatgttcattgtggagaggaaaatggtacagaaagacccaagacaaacttccttcatgaccttcacaaaattgcctatgtaattttgccctttcatttattttccggattgtcatccctccctaaattatttctcagcttccagtttcagctactctaacctacctccatctgccactgggatgtgtgcacatccagcataatttgagcatagtatcccattgctaaaacattcaataaatc

SEQ ID NO: 16917 - DNA, 315 bp, Homo Sapiens
  misc_feature (127)..(237): n is a, c, g, or t
gcacgaggagaaagtccaatattttcaccatttttatgcacacaatcaactttatttaagctggaagttaatgtctcattgttttcattgttctaaataaacaccttttcccttgagtattgttctnnnnnnnnnnnnnnnnnnnnnnnnnnnnnnnnnnnnnnnnnnnnnnnnnnnnnnnnnnnnnnnnnnnnnnnnnnnnnnnnnnnnnnnnnnnnnnnnnnnnnnnnnnnnnnncacgctccctggccgccgttttaaaacttcgggaggggaaaaaccttggggttaccaaacttaatccctttggggcac

SEQ ID NO: 16918 - DNA, 873 bp, Homo Sapiens
  misc_feature (55)..(74): n is a, c, g, or t
  misc_feature (80)..(109): n is a, c, g, or t
  misc_feature (171)..(179): n is a, c, g, or t
  misc_feature (563)..(571): n is a, c, g, or t
gcacgagggtggagggttgtgggtgtcgctagtacagcaaaattaaatacataannnnnnnnnnnnnnnnnnnntttagnnnnnnnnnnnnnnnnnnnnnnnnnnnnnnccccaccccagttgacactttaatatttcccaatgaagactttatttatggaatggaatggnnnnnnnnncagctattttgaaaatatatttatatctacgaaaagaagttgggaaaacaaatattttaatcagagaattattccttaaagatttaaaatgtatttcgttgtacattttatatgggttcaaccccagcacatgaagtataatggtcagatttattttgtatttatttactattataaccactttttaggaaaaaaatagctaatttgtatttatatgtaatcaaaagaagtatcgggtttgtacataattttccaaaaattgtagttgttttcagttgtgtgtatttaagatgaaaagtctacatggaaggttactccggcaaagtgcttagcacgtttgcttttttgcagtgctactgttgagttcacaagttcaagtccagnnnnnnnnngtggataatccactctgctgactttcaagattattatattattcaattctcaggaatgttgcagagtggttgtccaatccatgagaatttacatccttattaggtggaatatttggataagaacccagacattgctgatctattatagaaactctcctcctgccccttaatttacagaaagaataaagcacgatcccatagaaatatttatgaaaacgatgaacctgcaggaaagtgaatgatggtttgttgttcttctttcctaattagtgatcccttcaaaggggctgatctgggcaaag

SEQ ID NO: 16919 - DNA, 833 bp, Homo Sapiens
gcacgagggagaaatgtagataccattttactttactttttccaggaaaacatgaaatattaagaaaaatgttaagactttaattctcaaattattattattattttttaagacagtcttgctcagcctgggtggctggagactccatgtcaaaaaaataataatatgaaagaggcagtcaggaatgccagacttatataagaggttgagaatgaaaacaataaagattagagggatctaggaattatgaaaactttccttttacagaccaagtggaagggaggcttggggcttggcacaaatgttgaaagattctgagaagtgaggaggaagtagacatagcaggtataggacgtttcctttaaggttaacacaggagaggtattgatgtattgagagggaaagagacagacagggtaaaggagtggccctgggaggggctggaggtggtgctgagaaataagggaatggaaatgtgaaaattgtggttcaagggtgaaactttaagagtttaagatcctggaggtggtaggattctgtgtgatcaaatccaacatgtgacctaaatggaatcaaggaggaataaagggccagtgttaatgttaacaaattaggaccaggggttgaggaaataaggcaaaggaatctaggaaccataactgcaagtttgcctaaagactcaagacagctttttgttctgattgaaagcctttggaatgagtcccatggataggcctcttctgctttaaatgagtagtgaattaattcattaaaaacatttattttatgtccgttatgtactagacactgttttacgtgtttgggttgtatta

SEQ ID NO: 16920 - DNA, 848 bp, Homo Sapiens
gcacgagggttgggtgtctcagctctgaagtcagcctggcagaatgctctattgccctttagccaattattttcaagttactgttgttttacaaggaaatgaccccttttcttcctgtgatttgtggatcattatctttcagcttagtcaggatattgccaaatgaaagtctcttgtacaagagagaattaaccttgaaatctctgttgaggtcacctctgccctcccatccagccctccttcccctcaaaatgcctgggcctgacgccagatgccatcagtttaaaggggctcatttagtgccttgattaagttttagttgggtggtctcaggacttagacacacacacaacacatggcttcttggtggcgctagagttttgaattacgtaggaaaaagcatttcatcaggccttaagttttcttaatcaggtcctttgagatcttttagtccatgatcccgaaggaatttgaggcctcgttaaattaggtcatctattcagaatggtatacctagccagctgaagagccaagagaaggccccatctcccaaatttcatctcacaacatggtaacacttagctagaactcacagcctcttgtctccaaccaaaacattatcatcatccctaatccattcacccacaaaccaatgagtctaaaactagagacaattggatccgtcctttaaagaacaagaggaaatccttgttactattatgtaaaagaaaatttgaatgttccagattccctttatctgtgacagctgttttgaggttgaaccctttaatatgggctcttcgctgcatgcagtttacatttcctgggtcattgctgtagctcacata

SEQ ID NO: 16921 - DNA, 958 bp, Homo Sapiens
gcacgaggaagtgggttatttttaaataaaaacaggaatagttgtctaattcaaagattgtgaactaaaaaaaagttaccgttttgggtattcagtgaagtttaatcactgtcatgtatagatgtcagtctgtcacaggtaaattatgtcttcacttgaaaattccttttctaataaaaagtaacttctgtttttcaagctcttttcttgctctgttccttatgaagtgtagagagagaggaaccacgctgatgttttccagtaacgtaaatatagaacttggtacacaggtctgaaaagtttatttaagcagtctacagtaattcttcgtaggctaattttgaataagagcaggaaagagggtcagcttttcactttggaaggtactggattatttggcaggtggttaggtagtacttagatttgcttagatacctgtaaaagtgagattggtatgggataaaacgttcttgtgctgcttgcaaaagtctttggaatattctttgggatattttggtgcttaggaagtgcttttcaggttatattaatatatgcttagtcttcatgctttcaagtcctgtgggacgttaatgttagtcttttaagttgagtcctttttggttatattaagaggtagttctgatgtttcaaaggccatccagaaataggaatgcctgaacaggaatttccaattaagtcggtcagaatcctgaacagaggatatgatgaatatattacgggtataactattagtggtatctgtccgatgactttaattttagggaatagcatgatcactgtgtataatcttatacagaaagagaactgaataatagtttatgtttcctgaaacgggtcttaggcatttggagtaaaatgcagtatatagatttacttgttaatattttgcttaagactgatattttaaaaatgaaaaagcatattactttatacagga

SEQ ID NO: 16922 - DNA, 823 bp, Homo Sapiens
gcacgaggcagaatcttctgggttccaaataccccctagaggtttcccattggccacttggtgttcaccccattggttgcagaaagcaaccaaccagacgtactttcaattttccatctgccctgcaggaaatggggtgatttgcaaagagagtagcctctcttccttttgttactgaggcatggagagttgcggttttcctttcgatttagttctaggaagtcagagggaatcggccttaggttccctgcctccagaccctattctcctgcctcagaatcatacagtatttgaccttttgtgactggcttatttcacttagcataatgtcattgaggtctatctatgttgtagcatgtatcagaatttcatttctttctaacgctgagtaatattccattatatgtgtagaccacattttgtttatctattcatctgttgatggatacttggattgtttctacattttgtctattgtgaatagtgttgctgtggacattgttgtacaagtatctgtttgggccttgtttttacatcttttggttatatatctaagagtggaatttctgggtcatattgttgttccatgcttacctctttaatgaacccccaaactgtgcattaagcactttatatgaggttggtacttagtgtatctaccttccaactgagttccttgaaggcagaatgtatccctacacctcttatatctcagagcctattactgtgggtgatgagaagtagatgctcataaatggtgcagtgagagctggagggcctgaataaatgggggtattgggttgctgataagccagggttttgc

SEQ ID NO: 16923 - DNA, 219 bp, Homo Sapiens
tgcttttaatcccccgggctgcaggaattaggcaggaagatttatattggcccgaaatcccttttcagtggatttctatactgtctaaaaccttatggtgaccaaaattgtttattattatcaaacttttttatatatgacaactaattcttgaattacccgcaaagcacactcgattgcttaactagcaacaactttttattgaaaatttcattttga

SEQ ID NO: 16924 - DNA, 391 bp, Homo Sapiens
gcacgagggcacaatttggattcagatacccaaatattgactatgataatgtaaataatccttaagcagactgatttacaaaggcctgaacaagtttgatattctgaatattcacttcttctgatgaaaaaattgccaagaccttacaattggcaggaaaaaaaatgtgtgttggttaaataagttatgttaacaacaagaacattaccacaattagaaaactcttactatgccaggcactattataaacacacctttgtaccttttttaatcctgaaaaatttctaataaatatgcatttaatattatttgtatttaatattaagtgtatttaatattgcccctgttttgtgaattaatgcagcaataaactggcttgcaatggtgatgt

SEQ ID NO: 16925 - DNA, 463 bp, Homo Sapiens
  misc_feature (269)..(294): n is a, c, g, or t
  misc_feature (381)..(412): n is a, c, g, or t
cttctttccctcctcccttccttttgtcaggtccctacccacactaggtcggcttgtttctcacatgtaaggagagaggggagaccgaggtctttgggtcatatgaaatacaaaaaatattgtgtgttgtcgaccaatactctaatgctgcgttggtgtgcctacttcaatctgtcatgtctataatctacgtgtttttgatttagttttattttttgtaaaaatacattaacagaaatctgggccaatttacctggttttgtatgaannnnnnnnnnnnnnnnnnnnnnnnnnaggtgtcgatttataatgaataattttctaattttgtaaaatgagggaagtataaaagatatattgatttttaccgtaaaaaacacnnnnnnnnnnnnnnnnnnnnnnnnnnnnnnnnacatgagagaaacatatttttttatgaaaaacatgctttaggatataatga

SEQ ID NO: 16926 - DNA, 380 bp, Homo Sapiens
cccacaaaaaggatcccccgggctgcaggaattcggcacgaggattagatcgtttggataggttttgagttagtgcagaactcaagaagaaaaattaggaaatattctgaaggccagaactctggaagaacttagaaagtttgggaataaattaaacttatgtagatttaaaattaaaaggggtttatttcccaaaccccttgagtcttttcttttccttggtatttatggaattcttacaaagaaaaatttgcagaagtactattttcgtgaataaaacatatgtatcattctactaccattagcaaataacttagttgtagttaatataattgttaaaaggtttagctctgttacaaataaaaacataaagatctggc

SEQ ID NO: 16927 - DNA, 627 bp, Homo Sapiens
ataagccaccacacccagcctgtgggaactatttattggatttcaaaacaccctctgcctcattaatccactaagctttctcagcaaaaagctgtttaaataaataatgggaacatctaatttaaaacagtttttctaattatagaccagtacacgaagaagagcttaacttatccaagtatagtctagtttgggtccataatggagctgaaggctcaaaggacattcagggccattacactgcaggaaaacaaggaataagcgatgtagaaatgacctaagaaaagcacgaagtggaatgtatactggaggcaagttaatgaaagctaataaatacaaagtgctgggaaaaatctaaaagcaaaatagctattgtaacttgcaatgcattaaaaacaactttaaaaccaaaaagtcttgataaggaaactctatagtggggtctcagttaaatgctgatgatttttaatgctcagataacattaagtggaatattaacttctgcatccgacaccatctgaattttctcacacactactacacttgttcacttttcaatcaagttccactttctgaacttggtccaaacctcatttggaatatatccagctactgcttttccccttt

SEQ ID NO: 16928 - DNA, 422 bp, Homo Sapiens
gcacgaggcactcagtaaactaaagtacaaagcttctcctcaaccacctaagtgaattctcaacagccttaagagtgagaattaatttacttgaaaataatgtcttaccatataaatatcccacttaatggattaacctcgttaacaagaagaaaaggcaattgtgatttctaaagtggaaaggcaggtaggttgcaaagactcccctacactgaaaatacgattcttttccattctcagctgtaattgctgaaagctcaagtaataggctaaggtaacatacaaggcctaaaaccttattcctttatcattcagtactgaacgttcctctaagagactgcactttttcccgccacctcaaaaacagccctgaatcaagcctggcctgcccacttcagcaacactagcccagctacagacca

SEQ ID NO: 16929 - DNA, 917 bp, Homo Sapiens
gcacgaggatgactagcatcagtcaggctccttagtgtgagtgagataatgccattgggtttttatgagcacaggaatttgtctggcttctttggagaaatttcagagcaatgtgtaaataactatctgctaccttctctgcagtgatataactgtactttggcctgtactgagtataatctatggaaatgtagtaaacatggatttgcaacctctgttgaacatagattcaaatactattttagtttttactagttctgtaacctgggcaagttagttaaactctaatacttgagttacaatgtctatgatagcattagcttatattgcacaattgtttggcactgtgttttaattcagttccatgactctctttaaagaaaagtaaaggggtgtgaagagtagagcttagatgctcgggtcctgttgataccttctatgaatgctcaggtcctgttgttaccttctatgaatgtcctggttacagcctttctactgacctctacccagttcctacagacactgaaggcccaaagatgactacattgcttagtggagttttccaaaatgaaggacaactccctttgtgagaatattttatttgaaatgtacttaaacaaagctacctatgttacaaagtctgaaagggattttagtgaaaatcttttagtgttgtgacttaggtgtgtatccaaaggggcctcagctgagagacatgttcaaaaaatgatcactttgttattctcagagtttcatctctcatctaatgattagggtccttcatggggctggacattttatctagtttttcttctataatgaattatctccctgattagtcctcagtccctaatgtgaagaccataccatttagttgatatataaacatgctccaaatgtaatgatgggtcagtgaa

SEQ ID NO: 16930 - DNA, 526 bp, Homo Sapiens
atggcaaaactaaataaaggtaaaagaaatataacaaacctttcagtgatgctttgtaaatatttgtagcattgatacttctacaagtatcaaagcttaaaattacactaagccttttggaattgttgtatttttataaagtgcccttttctcttttgaagtagttctttgcagggctttcatctgcattgatcacccaaaattattttctctagatgtgatacagaataggatcagttttaatgcacatgtaacaaatttgaaggaactggaccttaatagtagtagatgatctaatacattttattatcccgcatgttaacctggaggcaggtatcatattttatgtccataaaccttaggaaccttacctcctaaaaaaattatcatttatggagtgcagagcttagagattgaagtattgactgcagttttattttcaaaaggtaaatgctacaatttatgtggtttttatttctcatgtttacattaaaagaaaacctaataaacttttaattaaaatgtg

SEQ ID NO: 16931 - DNA, 833 bp, Homo Sapiens
gcacgaggattttttttaaaagtcttccatctcagtttgtgggctccagtcagattgcactaagccatctaaaaccacagtcgtccaacctgttgctaaagccatgagaaaaggctggcaccaaccagtaaagaattccctccagtcttccgtaccatacatcctgaatggagcataatccctgcatcgtttctagcccatcataaccttgctacactgtttcatagaaaaacttcagccattgagaatgatgtcattcatcatatttcctctttctttgccttttgctgccaggaagccttaaacaaatttaatactcaattacagtaataattaactcagattttgggcataattattttcccttcttcctctatggtttaattttccctttattattcaaccaacttattgcatatgtgactttcattgtaaactacctcaagtacactttaaaagttggacataaatcataaagtataaataaattaagttttatctgatctcttgtaaaaacccatgatcagcctgttaaaattcatattactaaacatcttgaccagtaaatgtcaggagggtggcatgaagagcaagaaagagaaagctctgagtcaaggtccatatttagtgggaaaaaaaatcctggcaaatatagatttgttcagaactaattatttaccttttaaaatgggttacttaatacttattctagtatgtcctgtgagcatctgttgggtgtcaggcacagttttaaatgttatttcattaattttgtgaggtaggtattatcatttctagctgaacaataagaaaactaagaatcaaacaagtta

SEQ ID NO: 16932 - DNA, 886 bp, Homo Sapiens
  misc_feature (704)..(714): n is a, c, g, or t
gcacgaggggaaaaagaaattagtgtatagtatgcatagcgttcagtactaaggtttcaggcatccacttgggggacttggaatgtatcccccagggataaggcgggggactactgtgcctattatctctgtggtcacctgccacctctaactcaagaccagggcttctactcatctccttttatcacctctgaacttaccactgttcccttaggaccctgtcttctctaggccaatggcagactgcactcttacttcatcctccaaggtgaacactgggctgaggctaatttatggacataattattcctttataaaaatgtgttgtttcttattacagtataaagcaatagaaactgaaaatgcataatagatgtattacctctccagttttcagacttttctcccagctcccccacctccaccaatctccaataatattatggtatctgtaggtttcccacaatagatacactgagactaggagatatttatgctcaagacaaactctcctgtccagtctgggctcttggctttatcctaaaggacgtttttattatgcaaagtgttttcatatgaattcagcctcctacctgtaatgcagaaataactagtttttaaaatagtaaacatactccacccttacccacccacacatttcttatctggtaatttttcttccagttcacagactttgtttctcnnnnnnnnnnnagaaccgagccaagaaacagcttcccataacaaaggctatggattttggtgccctctgcgattttggcagcttttctgctgatttggagagtaaaatgttgcaaaggtaatagaagatttgggctcttgctccacgtgttccacatcacgtatattaaagataacatggaaa

SEQ ID NO: 16933 - DNA, 744 bp, Homo Sapiens
aggtgagaaggtgagaagagacaaagtagaaaccaaacagatggctaaaggcagaggattgtgagggtctgactgaagcagcaggggatgaattcaggaaaccattcacagaaaggtagaatcaggaggacttgataacttactgactttgaagaaaagaagtcaaagatgaccgagttcctatcctgaagcctaggaagatggtaatgctgagataaggcatacagaaagaatggagaaaacaccctgggctacttacccaacctgatagattaagacagtataaccaaatctgccagaaagaactaaagatatataatgaaaggccatcttctgaacacttgaccattttctactgcctctaagaatctccttcctccttgtcattaagttagatgttaatgctgttaggcaaaattccagaccaggtacagagaaggtgagggagtctattcattcaccactgagggcaatggaaacttgacaaagccctgttctcatgatgcttacattctagagtgaagggaaacacaaatgttaatttcaagatagtgattaaaaatatgaaggaaatatggcaaacagaccagctggggtgatcatagaaagctgcttctgaggagttggcatttgagctgggtgggacctgattacgaggacagccacacagatctgggtgcagagctccacacccaagatcactcccacacaaatgaggactggaagggaaggcaggcagacctt

SEQ ID NO: 16934 - DNA, 439 bp, Homo Sapiens
gcacgaggccagggggttaagcagcccacccagggtcctgcagcggcccccacgctggccacggtgctccctggccactccctggtgccctccacgggagtgtgtgtcacactaccagcacacgagtggcacgtagtaaggcctcaggctcctcactggggcagggaatcgaacccaccccagagccggcagcagggctgacagccttcttctgtaaggggccagatagtgaacatttcagctttgcgtggcagcctccatcctgacattcagctctacggttctggtcggaagctgccacatgccacatgtcagcggactgatgtggttatgttccgataaagctttatttacaaaagcaggcagcaggtcgtatttgaccctcaggctgactgtggggccttgcctgtgggattgtggggagagaaataccaccact

SEQ ID NO: 16935 - DNA, 1052 bp, Homo Sapiens
  misc_feature (127)..(183): n is a, c, g, or t
  misc_feature (187)..(860): n is a, c, g, or t
gcacgagggcacaacaccatcgcttcttggattaaaagaaaaggatgaaacgggccccagaaagaggcggtgacgtcccagaacccatggcaggggagttgggaaaataaatatttgtattgttttnnnnnnnnnnnnnnnnnnnnnnnnnnnnnnnnnnnnnnnnnnnnnnnnnnnnnnnnnctcnnnnnnnnnnnnnnnnnnnnnnnnnnnnnnnnnnnnnnnnnnnnnnnnnnnnnnnnnnnnnnnnnnnnnnnnnnnnnnnnnnnnnnnnnnnnnnnnnnnnnnnnnnnnnnnnnnnnnnnnnnnnnnnnnnnnnnnnnnnnnnnnnnnnnnnnnnnnnnnnnnnnnnnnnnnnnnnnnnnnnnnnnnnnnnnnnnnnnnnnnnnnnnnnnnnnnnnnnnnnnnnnnnnnnnnnnnnnnnnnnnnnnnnnnnnnnnnnnnnnnnnnnnnnnnnnnnnnnnnnnnnnnnnnnnnnnnnnnnnnnnnnnnnnnnnnnnnnnnnnnnnnnnnnnnnnnnnnnnnnnnnnnnnnnnnnnnnnnnnnnnnnnnnnnnnnnnnnnnnnnnnnnnnnnnnnnnnnnnnnnnnnnnnnnnnnnnnnnnnnnnnnnnnnnnnnnnnnnnnnnnnnnnnnnnnnnnnnnnnnnnnnnnnnnnnnnnnnnnnnnnnnnnnnnnnnnnnnnnnnnnnnnnnnnnnnnnnnnnnnnnnnnnnnnnnnnnnnnnnnnnnnnnnnnnnnnnnnnnnnnnnnnnnnnnnnnnnnnnnnnnnnnnnnnnnnnnnnnnnnnnnnnnnnnnnnnnnnnnnnnnnnnnnnnnnnnnnnnnnnnnnnnnnnnnnnnnnnnnnnnnnnnnnnnnnnnngtgggcatttccgggaaatgggccgcgaaacccttatttgttttatttttcaaattacattccatatgttatccgctcatgggaaacataacccctgaaaaatggcttccaaaattttgaaaagggaaaagttaggagattattcaaattttccgtgtcgccccttattcccctttttggcgacatttggcc

SEQ ID NO: 16936 - DNA, 395 bp, Homo Sapiens
gcacgaggaccgctgttaggtaaagttgtctaggacaagatgaacttgcagtcttctgcatcctgggactttataagggggctttctggtatattcagagggagagaccatgaagctcaccacagtccatacatttgcaaggactgtaatgcaaagcaggtactaaccacgtgatcagtgggagtggcatgaattaccctgggtttcttgctgctaagcttgttccagctcgcagaagtcagtgataacagaacactttggcagaatgaataaatgtccacagttgatttaggcagcaggacctggaagaaagaataaggaatttattagcaaattgtcaagatcactagattcgtatccgggccagtctcaccagaacatttctccaggtgttt

SEQ ID NO: 16937 - DNA, 651 bp, Homo Sapiens
  misc_feature (534)..(591): n is a, c, g, or t
gcacgaggctgacaaatagtcaaaatatgatgaggctagtggtcagattggactcatgggatcagggcattggtcagatcaccatagtctggagtttgtcttcagcatgttggttcagaagacacagttgatcactactagggaatgattcacaacgaccaaactcacaaacagatgtaatcatttaggagaaaagtcattctcacacgcaaagatcccgatattttcaattcaactcaccagaagaaatcagattaacttaagctttagagaggtgaattagaaccaggggaggaagttggcttatgttaaagacaaaagtacattttgtaaagctgaggaatctgtttccactgctgggattgatttagcacatgaatgataagggtaagatattatataggggtgccaaaactttctatcttccaggcacttctggtgtcatactgcatttaggtcttactatttttttctcccccatttttgtctccaagttcatcaatttccttccactgccaatttattcattctctnnnnnnnnnnnnnnnnnnnnnnnnnnnnnnnnnnnnnnnnnnnnnnnnnnnnnnnnnngtagactggataaaatacctttcaatagtttttagcatgtatactttaataaagtcattc

SEQ ID NO: 16938 - DNA, 841 bp, Homo Sapiens
  misc_feature (232)..(292): n is a, c, g, or t
gcacgaggctcaaaacaacccaggcatgcttctgctctggaggaaccctctttttagaccattccttccccggacagcctaaggttctctcctaatttcattccagttttgagcatttattatctcctcagagaggcgctctctaaaacagcaccccagttgctctttattcccttattctgattttttttatgtttctcacttgtctatcactatttaacattatatgcannnnnnnnnnnnnnnnnnnnnnnnnnnnnnnnnnnnnnnnnnnnnnnnnnnnnnnnnnnnntattttatctcttccacctaaaacaatgtctagcacagagtaggcacttgggttgaatgaattttgactgactgggaagtaatggaagattaaaatggggaggttggggtcagatgacggaaagccttagaggctcagccagagaggatgaactccatcctgtatctggttgggagccatgggaacatgtgagagagggcagtgacttcatcatgtttgagctctataaagatcattctgagtgctgtgtataggagatgagagtagatatggagtctctagtaaggaggccagttctgaaatccaggtgagatgtggtctctggctcctggctcctagtctccctgtggcttctgggatacagaacaacttggagagagagaaaagcttaccatagcgaaggtaaatgtccaatgtgtcccgagactggtttctcagaccttttcacaggctgtaggagtctgttgtttttagtctgcccatggtaaccttttgggtaaagctcctctgttgcctgttttaattgtcttcctccctcacccatggtat

SEQ ID NO: 16939 - DNA, 864 bp, Homo Sapiens
gcacgaggctagaaattatttaccaagttctctttttcctttttcactttcccaccttgtctctaaaggtctccactccctcccctttaccatctttttccctggttcccatcttctcccctagttaccactcacaatgagctgtgcacacctgttattaattatcttcactaagttttatgagctagcactcagacttttgtacaagcttttcatgctttgggttcactttctctttctggggggatgattttagctcagtcttagacctttcatttccctttcttttctgtgtaactttcccagacaattctctcccaggtctcattctctgtacagtttcaaggcaagaacttgagaaacaactctgttgaaagttgctgtttacttttctacttagagataatttgaagtttgaggctttgtagctttatttgttcttgttgaactattttgctggagggcgtttcttgagatttgaatttatgtggtcatgattattcttgagcacttgggagattaacaattgaaaattaaaacataaaagatgatttaaaaaacatattcaacttagctgaagtgaatattagtaaactagaagatagctatcaagaagtagattacctcagaaagagagagcgataaagatataaaagatttgaaagagtgactaaatatatggagaataaaggtaatgagtataggggaataatgtgcagtcttttgacgtaataggtgacatatggttaggatatagtttaaatttatttttcccatagctgtaagtacataaatcctcaatttttctaataagccatttctgttttattattaatatgtagaaatgttatgtgtagtaaagaa

SEQ ID NO: 16940 - DNA, 808 bp, Homo Sapiens
gcacgaggataacccaattcaacaatcattttatttaatgctttcccaatagaaaatatcggactaagtgctgtgaaggaagcattttataattttttataatcgtgatatttcttgttttatatttaggttttgatcagtatgcaactgatgtctggtgacccatgttttaaaacgtaagttgatacccaataaatggattatgtatctaaaagtataagaaagatttatttgtttaaatttttacattaatattttgtagtgcttataagaaaataccagttaagggatagtttcttccctgggagactgacctgaccctcttagaagttatgtttacctattaccaaatgagttctccatactccaaattattaatgctataggtctttcatcatcttcaggttttgcgtaaaattatataagcaaaaatttttaatacggcttctgtgaacatattcatttcttcaataaacacctattaagtgccttaccatgtgttaggccatattctagatactagagaaacagctgtgaaaaaaatagattaagtccctgccatcctggagcttatattctaagaggaaaatggacaataagctaacaagtaaatatataatatacaaacggttcataagcgctttggagaaaaaggatgggagggccatcgtgaagagaagtgttgctattctatatatagtagtcagggaggccccccccggtaaagatgatatttgagtagagacctgagggaggtgggaagcaagtcacactgggcattacgggaagagtatttgaggtagaggaa

SEQ ID NO: 16941 - DNA, 940 bp, Homo Sapiens
  misc_feature (697)..(706): n is a, c, g, or t
gcacgaggtgttcatatttatctgattggctttgttcttccaaaagtgtctgcacaggactgctaagagaacctaggcaagtcatttaatttttctgggcttcagtttactcattagcttcttttagttcccagatgctattactggaaagaataactagtaatggataaaaacctacataaatatttcctattttgccatcaaagtgctgggttcattttggtgtatttggcatccaagtacaaattaacagtttcccaaaatcctgattctttgacttttttatcttgatgatggaaaggaaggacacgtttacttgctttagtttctttccccttaactacccacttgctgagaggggtaggagcagggattggctttagagaaacaagatacagtgtagattagctaatgtttgcgcttaacaaaacttgtcctgtttaacttacctgagggttctgcagcctaccgcagtaattttagttctagctgttttcagatatattgccttgtatcttcgttctttcgtctcctatcctttttagaaatttatcacctgtttctctttcagcctgacttacaaaatctaatttttggcctaaaaatttcccctagcttggtactagtccttttatttctgcctgtgattatatttttaaaattaaacttaaatgaatctaattcattgggatatatnnnnnnnnnngtaagtggcttgctttgcttactctggttttccatcctcattcctggatataatcaagattgcagtagctaacaatcttaatgctgaaaacaagaatgaaaaacataccatcttttcaagttactttggacccatagagagaaagtggattggtactttaataccttccctgaatttaacagaattgatgtggactgtacataaaatatgttggaaaaataaaaactatttttt

SEQ ID NO: 16942 - DNA, 386 bp, Homo Sapiens
ggcttaacggggggggctttcccaacccccagggtgggtgctctcaagaatttcagggggaggggggccctcaaaatttccccccactgagggggcaccccccaaaatttttttaagggttcaaaaaagttcccggggtaagggtgggggccccatctgtcgggaaaggggaaaaatcccctaaaaagtgatttccccccggggttaagggtttttcggtttttttctgctcttggggggttcctggggggctttgaagatgagggaaaaagaaaaaggccccccctcaattggggccggtctttttggaagggccattttcagtgaaatccccgggccctttcattcccccgttgccttggcaaggtatccccaaattttttttg

SEQ ID NO: 16943 - DNA, 872 bp, Homo Sapiens
ttacctattacctatgggcacttttctgttacctcaagtcggggcttaacccctgtggggcctgttaacctctttttgttcggtaacaagcgagatttaaaatgaaaaaagccccatcttttgttgcccggtctaatatctgcttggggaactctttaaaaacatcccctggccggcctgattggaatgtataaccgaatcttgggaatggctcttacagcctcctcggaactcttttgggcacctgaatcaggtatgctgccaccataggggcactcgtggggggggccgggataccatattcgcctaaaaaggagccaaatacccgccctcactggccgtcgttttacaacggccgaactggaaaaaccctggcgtataacacataaatcgctttgcagacatccccttttcccaagctggggtaataagcaaatagccccgcacagatcggctttccctactagtggcgtcatctgaaatggaaatggcacgcgcctggtaacggcgcataagcggcggcgggtggggtgtaaaccgcagggaactgctacactgtgagccgctaacgccgcttcttatgtgtgccttctttctttcatgcggtatcgcgggttcttccgtaagcttaagcgggggtctcctttatgttctatataagcttatcgccactccacacgcaataactgatatggggaagggtactgatgggttcatcgcctagtaaaaccggtttttcctcttagattggatactccagtatcataaatgggaatacttgttctacagaggaacacacctcttacactattcgtgtactattctaatgaatataaagaggaattccgctgatccggccctaggggataaaa

SEQ ID NO: 16944 - DNA, 689 bp, Homo Sapiens
  misc_feature (147)..(254): n is a, c, g, or t
ggcgaatattctctagtgcctgggataagacagcatgctagatgtaatgtgagcctatgtatgtatgttaactgtctctgctggaaaacaaagtactttagaattaaactgattttatctggctttcaccattttatagaacaaaannnnnnnnnnnnnnnnnnnnnnnnnnnnnnnnnnnnnnnnnnnnnnnnnnnnnnnnnnnnnnnnnnnnnnnnnnnnnnnnnnnnnnnnnnnnnnnnnnnnnnnnnnnnttatattgttatagtggctataagagtttagttgagaaattagtgttacagttactattactattatttttactaataaagggtgggtaaaagtaccacattatgagacagtagttaaaccataacattgactttgcatgtgtataagaagcagaatttttgttttgaataggtagcccttcattcaatctatattatgtgagttttttttaattaaggaaatatgtcatgagctataaaattaattcattattttactttgtacttgatcattttgtctttgtatgttgaaaactcaaataagtgcttaggaattagtatttaccttttaaaaatgtattaattcaacaaatatttactgagtgctatttgccaagcattgtagtgggcactggtgacacagcaataaacaagggctgatgaagtctctgccct

SEQ ID NO: 16945 - DNA, 343 bp, Homo Sapiens
  misc_feature (97)..(113): n is a, c, g, or t
  misc_feature (116)..(211): n is a, c, g, or t
  misc_feature (265)..(275): n is a, c, g, or t
gggggcccaggggaccggggttcaaaaaaaggaagaacccgcccgccccttaattcccttaaaatttatgggttttttttagggggttcccggaaannnnnnnnnnnnnnnnncannnnnnnnnnnnnnnnnnnnnnnnnnnnnnnnnnnnnnnnnnnnnnnnnnnnnnnnnnnnnnnnnnnnnnnnnnnnnnnnnnnnnnnnnnnnnnnnttcatacccaaaaacatcccaaggacctaaagaacaaaaggggggcccgcaggnnnnnnnnnnngccccaagggggttttcccctatctcaacaaagggaacacaaaatccggttttaacccgaaactttcc

SEQ ID NO: 16946 - DNA, 753 bp, Homo Sapiens
gcacgaggcctttaatttctattatcgacttttatttcatgggatcacttaagaaagtttgaaaataacataaaaaatgctttaaacttcgtgggtagtgtcaaggaaacagtcgaactgtgtcttgaatatggttgttttgtgtgtgtgtctgcttgtttctaattttggccacaaacacaaaatgtctttaaaattgtccagggactgctgcagaacgctaatcaatcaattgcacgaaaacaggttttttctattattggaggcaagtatttcagtgtagagcaatagagcatgtttgggctatcttctaattgttcgccttccagatttcagtaacacccttgtaagtgacaagcaaaactttgctgggttttgttgcttgacgctgttgctccacagtaaaggttggagaaactgggttacttgttttataaacttctttttttccataaagtccaaccctgagtcatagcctctcagtctggagggacacacctcaggcctgtgggaatgggtgagaaaaatctcagcattagtggagggtcagaaacaaactgagcccaagtgctcgctgtctgtattgcctgccacctcattaacagctctcacatttgggctcttcatttcctttcacaaactgatttgctatgtaaatgctgtttagagagaaataatttcactgggttttaaatgaaatcctaatataaaaagaaatataacactaagggtctagagacaaataatccacct

SEQ ID NO: 16947 - DNA, 536 bp, Homo Sapiens
  misc_feature (64)..(73): n is a, c, g, or t
ccaattcaggacaaaggtttaatttgcttccccatcaaaaaaaacccccaatattttctaaacnnnnnnnnnngctatgaattgaatattgaaaattttaaagtatttcaaataactgattaaaaaggggttatatacataattgttctaacagtaaaactttgtaataataacctgcacaacaaacaaaattttattcccccaactacaaagtacttgtttcggggcatccaaattttcataaaccttgatgtgggcactgacgctgtaaatgtaatcctaaaataatttatcttccttcaaaaatctctgccatcgggactttacataccacacacaaaaaagaatacctggaaataattcaaatgtataacaacaagtgtatgtcatacataaaaatactatacagagtttaaaaagaaaactagatctactttgttaacatgaacgaatattcaaaatgaatgtgtgaaaaatgcaacctgcagaatacatgtaagagtacgacatccactgtgtaaagtttaaaaacaccc

SEQ ID NO: 16948 - DNA, 375 bp, Homo Sapiens
gcacgaggcacgctcccgcgggacagggagagttacaggcttcagactttatctcgttgtggaaagcaagagaccaagccaaaaactttggtcgtgcttttcaacatctccggtcaaaagaggtcgccaatctgcttttctcccattgctgcgtcttagaggggtgtggtgccatgataccacttttgaaaatcctgttgaatgcaagtcctctttgttgctcattgaacaatgaggatatttagctcccctcagagctaccctcagagttggatgagctatcctcagagttggatgccaccaccgggagcagcaaaagcgaaggcaactcatgattctgcctcagaagcaatcgaataaaatattttgaaaatg

SEQ ID NO: 16949 - DNA, 913 bp, Homo Sapiens
gcacgagggttaaattagtacttcttcattggctttctgaaatgtcctgagtaaagtagaaaagcaacctttgtatggatgtggggatatttaatagtatgtatcttgtttcatttttttcctatgatgtattaatatttatttttctccaacccctgctccattttcttaaaatattttccagttaataactagttgctttatttcctagctgaagtgagaaaaccaacggaaaacaatacagatttgggcagaggagatagagttacatctttaaaggagtgagccagtcacccaggagaatcacatgtgtaactgatgtaggggtttaagtcttcatactttcactaaaatctgtctactaactctcccaccaacctttgcatcaaacacttaggtacctgcctgattaggggggcccctttaagggaaaaaacttttaaaaaattaaatgccttggttttgttttatcttctgggaaagaacacttttacttgattagcaagatgattatattatataacttgcccttaaaaacactccaaaatactgactccttttctccaattacaaatgagtgtgaagaaattctgttgtatgatttgaacactattaggtttgtatgtgtgtttaattggaagaattttatatagagtatctctgctgcttttgtttacctgggtaccacacaaccaaatacacattgagatttcaagaaatgatgatgaaagccagaaggccagaccacagctctgcagcctgtttcctacaaccagatataaaactctttctcgtcgccatgctgatagtcacactgaactagaactgtcccaacacattcttcctctctcataatggcttccatttaatacaggcaagccctttactttagccaattctttatctttcaaag

SEQ ID NO: 16950 - DNA, 820 bp, Homo Sapiens
  misc_feature (82)..(90): n is a, c, g, or t
tgttcaaaacaaaatttccaagatagagatgacccacactcctaaattacactaccaaaaatgttatatgtatacagaaggnnnnnnnnntcaacagtcctgaaatgtgtataataaccacaaaatcattcattctaagcttataatcatttattgatttaaacctgaaaatccaatgaatattctcagactctcttaggcagataaggaaaagtaattgacatactcttaataaaatgtaccctgaaaatcatttatgaaaaaaaatatagagcacacagatatctcggtttagaacatgaagacttgcccaaaataacaccaggattctaatcacttaccttagcagtggttttctttataggtgcatgttggaatatcttcatcttgagatggacagatgatttcgttcacagcagggaccttgccaacttgcccatataattcttttgataagctgctaggagatcagggtgacctagccttgccctgtagcttccctcttagacggatagtctaggtctaggagctgactgagagtagaaaaaacaacattccccttcaatacactgttgaagtggggctgacaatttgcacacctagtttatcacgtgccacaggatgctgttattgaaattttagacaattattccagtggaatagagaaatttcaaggacgtggaaaagaatcctaccttgttctcacacctcatccaaaacaacctgccaaatgaatcaaaaacttctttttcttgaaatactttgtcaaatacacattttgagttttaagagccatgactgctttattagacaaataaaa

SEQ ID NO: 16951 - DNA, 846 bp, Homo Sapiens
  misc_feature (625)..(646): n is a, c, g, or t
gcacgaggcccaatcttccaatttctactaaaaaggtactaccttaaggcactttcttgaactgcctccctagccctttccctcctgccttagtttgctagaagactgagatcaaggtgtccatagggttggttccctgtgaggcctgtgaggaagatctgttccacgactctctcctagctttaggtagttttctggcactcttgggtgctgttcattggcttgaagaatcatcgccccaacctctctcttcatcttcacatcgtgtcctgcctgtgtgtgtgtctgtgtccagatttcccctttttaatgaggacgttatcatattgaattaggggcttgccctactccagcatgacttcatcttaactaattatatctgcaatgaccctatttccaaataagttcccattctgaggtatggagggctagggcttcaacatatgaattttgtggggaggcacaattcaacccctaacacaccctgtttttcaggtggagtccttcagttatgtagtgtcatagttctgccctgcagattttttctgccctgcaggttttttctgccctgcagtgtaattatcacttgaataatcacacaagcaaatgtacatctattatgcannnnnnnnnnnnnnnnnnnnnngccacatctcacttttggtgaccgttgcatccccatgtctggcatgtagcagtcattaagtagtcactggaggaacaataaactctgtggctctccacgtttccccattgcatgtcaatgtcaggagaccagactttgtctcccaaacctgcttgatcacttctcagtgatcaagatccggctggaggcagaccggttga

SEQ ID NO: 16952 - DNA, 617 bp, Homo Sapiens
  misc_feature (249)..(257): n is a, c, g, or t
  misc_feature (268)..(338): n is a, c, g, or t
  misc_feature (347)..(421): n is a, c, g, or t
gcacgaggattccttaaacaggacataaaatgtgtaaggaacaaaagagaagactgatagattcagtggtagaacttttgtttatcaaagtacttaataaagactgaaaacatcaacatgatacaactattcagtaaagatgggatcagatataattatcaatagatattaaatctagaggaaaatttagatgaagaacatggtcttaaagtgtctctccatagaccatttaaagttacaagagatttnnnnnnnnngtaatagtagnnnnnnnnnnnnnnnnnnnnnnnnnnnnnnnnnnnnnnnnnnnnnnnnnnnnnnnnnnnnnnnnnnnnnnntgggtgtannnnnnnnnnnnnnnnnnnnnnnnnnnnnnnnnnnnnnnnnnnnnnnnnnnnnnnnnnnnnnnnnnnnnnnnnnnttgaagacaaaagcggggaaggagcattgttctttaaaaacgtccaagaaaggccagggaaatgttctagattaaaagaagctaaagagataggacaagtaattgcaatactttaccctagactggattctgtactgtggggaaaaccataccataaaagatattattgggttaaatttactgaaataaattgtaa

SEQ ID NO: 16953 - DNA, 318 bp, Homo Sapiens
ttaccttttacctatgggccattttttgttacgtaaaggcggggcttaagcccggtggggcctgttaacttcttttttttcgttatcaaccaagaggggtttggtttctttcaaatcccccaaaaccaatttttaaaaatgaaaaaaaccccctccttggtggccggtgggaaaatctggttggggaaccttttaaaaatatcacccgggccacgcctgatggggattttaaaccgattttggggaatggttcaaaaaccctccccgggactatttttggggccctaaaacgggaagggggccaccaaagggggatct

SEQ ID NO: 16954 - DNA, 460 bp, Homo Sapiens
ccaaccaaaaaaaccagagcaactaggtagcaaagccaagaacccacaggcagcatttacaacaaaactggttagtttccttactacaagccgtaagaactgaatagtatgtctctgtggggaaagaaacagagggaagccattatttatttattagaaagtgtgatgggctgatgtgagaacagcatttgatatcagtaacagtattgtctaatccaatactgggctagatcaagaggttcctggtaatttttgaaggggctagaggagcagatggtgtgaactttcaaagctgaccagctagaggtctttttaaagacaggatctcacagttgggataaatactggaaatggaataaaaattgagcaggttagagacatagagatgaaggaagagaacgttcagataaaattggaggaggaaccaggatacttcaaaatcaagctactgcgtttttaa

SEQ ID NO: 16955 - DNA, 388 bp, Homo Sapiens
catcagttccctttattttttacccaaactcttcattcatcaaatgtttccacacatcagcaatcactgacactgacttctggtcatgactttttctttcttattggggtgctgaaaacagagggcagttatcctcccaaaaagaaggtaaagcagcacagggaggcaagggctagggatggggccccccagcaagaggctctcaaaagttgaagcagcaacattccataggaaacccatgggaggaaagtatggggtcctggtgggggatgccctgctcaccgcttactgtcaaaaggccaggtgcacaaactcactgggacctgaggaggggttgacagtgtttggcccccagtaaagctctgtgggacacaacctggttactaac

SEQ ID NO: 16956 - DNA, 359 bp, Homo Sapiens
  misc_feature (185)..(219): n is a, c, g, or t
  misc_feature (279)..(311): n is a, c, g, or t
ggaattcggcacgaggatctccttgtcattttagcatttaacacccacaatcaaacaattcatgtttttgtgggaaataaaactctttaaatctttttcgtgtttaaagattttaatatttaaggagaaaaaagttataattttttcaccctagatatagttataccatttgataaatgcagttnnnnnnnnnnnnnnnnnnnnnnnnnnnnnnnnnnnttgtagagttgtacataaatttgaaggaagaaggtgcatatttatttagaaggcctgtannnnnnnnnnnnnnnnnnnnnnnnnnnnnnnnngagatggagtctcgccctggcacccagggtggaggggtggaagctccg

SEQ ID NO: 16957 - DNA, 259 bp, Homo Sapiens
ttagggggggaaccctcgtctgatgttcatgaaagcttggatgtttgggtccccctttggaggctgcctttggggtgacggtagggggggtgttttttttctctctcccactggggaggaaaaatttgaagcggccgccaagggtattgagattcttcaagactttatgagccccgaaaaaaccccgacttccaaccccgactcagaaaaggccgatcgtctcaaaaacgaaggaaaccagcagatgaatttggaaaac

SEQ ID NO: 16958 - DNA, 789 bp, Homo Sapiens
gcacgaggattctacccacctccccccacccccgactataggcaaagagagttgatcacttccagggtctctgacttctgtgacctggaaatcagcctggcttgggaaattcatgttgttgatctttaattatttaattattctttaataatccttctattttcttgacatctgacccccagcaagagtaaggatcccagaggtcaaaacagtggtgagagccaagctgctcacagacacccacttgatgccacagccatgccatgaggcttcctcccagctgctctgctggcttgctgaagccagctctgagtcacagggttgccttggaccctcggctgtagggggcacctgtctggctccgggccctttgtcctggatacactgacagtaatgtgagcgcagcacttcagagttcaggcccagcaggtcctggcaagtgcattccacccgaacttttaacccaagcggtggggaaggaagccaaaactccaagctgcactttcttggggttctggccatgcacttcttagccttctctctgactttacaggacaaaaggtaccccacgccttcagaatcatgcttacctgcacggcagcatctgactggatggctggctaggtctcatccaccccaaattactgacccttgatttatgttgttactgctcagttatgctcagatgccctggttgcctgaagatggtttaagtgcaggcccttcagacaagtcacgtcaggcaagagagggctggcctctaacccacaaagagggcagatttgtggc

SEQ ID NO: 16959 - DNA, 865 bp, Homo Sapiens
cccccgggctgcaggaattcggcacgaccgcgataaaagagacagagggagcagaccagaccatgaagatcttgatctaaaatactctttgatatcaaccaatctgcattttgtatttttccaattttatgatcaggttgaagagggccattgcagagcttaatttatcagaattaaaaacacaccagtcttagtaaataggttaagtcagttccgctgatggaagagtacctacatatgcatgtaaaatatttaagagtatgtagtatacatgcatgtatgtatgtgtgtttatatactgtcttttatcttcatggaagctatcaggtctcagctaaaataagaccctcataagccttctaagacacctctcccatctgtgatacatcagttaggtgctttcatagcacctatttttgctatagttgttttactgaatatctgcttccaaggtagaccgtatacatgtaaccaaagtgcacgcaccgtatcttcctcattcactgccgttatgtccagcaattagcagcatgactcctcatacacaggagacgataaatatttactgtctgattgattcttattctagtcactaccctagtccaggctccattactatttcttagttttctaactactttacctcttgagtctctacaatctatcttacacatctgccaggttagttctacaacccaactacagtagttctcacttatccgtagttccactttctgtggtttctgttatcagcagtcaatcccagtctgaaaatattaaatagaaaactccagaaataaaccatttgataatcttaaattgtaaactgttctggctagcatgatgacctcttgtattgtcctac

SEQ ID NO: 16960 - DNA, 614 bp, Homo Sapiens
  misc_feature (309)..(322): n is a, c, g, or t
gtgtgtgccacatgtccggccaggaaaattattttctatcttaaagaaacatagttacattttaaaatgtcaattcagttaaatctttctcagtttttacctttaaatggctcctggaaaggccagcgttccttttcccctctctgaattgaaagcacttgaccccatgctgcccctgcttccaggcctgtctcagttgtcatatattgtgagtccctggcaccattactgttttctaagccagtcttctaggtcttactttcaggatgctgcttcatggcatgaggatatagtttacagtgttgtagnnnnnnnnnnnnnnaaagctttgttctttaaaaatactttttaaaaagaaatctactggttagatttattgtctcacaaaaatgtttttagagattatttttttcacaaatgttttctttctcatgctgatgatcaactgatttttgtctacaggtgttaccttctcacagtattttttcattttagagtctatttaccaaatgaccatttttagtgttaaaaggtactgagggaattgaggtatgtaaatcaggtgacataaacatgaaaattatgtgcctaaatatttttgtaatggtgtaaaa

SEQ ID NO: 16961 - DNA, 620 bp, Homo Sapiens
cgaggagttcctttaataaagcctcctcctagggtcagaagacactaaagggaatatttgcctcgctgcaattcatttaggaaacaccctgctgtgtgtcatctcatgacagcactggtcttctgccagtatttaaggtgaacatttgatagcttctaccttacctgccaaagatattttttccacatagaataggtctaattcaatgtataatgagaacatatgtagaaactgtgaatggattgctttagtttgtaatttttctatgcagttatatttttctagtgtagctagactattttgtcatcatgtttttactacatttttgtttattttaatgacaagctgtataaatgctttacttctagctatttaatggtagcattactggggaactcagacttccttcttttaattcttcttagtaaaagatactcatgaaaaaagcagttttattttcctaacaaaaaagaaagagctcattatgtcagtgtctatgaactgtacccatcccaactctcaaatcgtttggttttttttatcttgattgagatcctctttctcactatgctagtggtggagatattgacaaaatcctatttctttcaaagaggaacttt

SEQ ID NO: 16962 - DNA, 768 bp, Homo Sapiens
  misc_feature (428)..(471): n is a, c, g, or t
gcacgaggcttattcacatttacatgagagaattgttctcccagttaaacaaaaataacatatcagggtctgaaatttacaaataaatcaagtttatatggtgttcaaccaatctgaatttgtgtttatgggtaatgttgaaggttcctttatggtgtggtactcattgcactttggaaaggctgtgagaaagttcccataagccgaagttgttttaatgacaaatagtgaagttatgatcaaggattttaaagaagggaagacacttagaaatagtctagtctaagccctcaccttacacttgaaaaaattgaggccctttgtgattgacctaaagttttatatctagtaatggtagttacactaaaacctttgtatttggtatccctggcaggattcttttcaatacaacatgctgcctgatcaannnnnnnnnnnnnnnnnnnnnnnnnnnnnnnnnnnnnnnnnnnntatcacacacattcagtctcagagccatatgaagtgtcctagggtggggttagaagggcattggttagaagagaagtgagaaggaatagacacagattgcaaaaataatctatgaccaatgtaacctaaatataagccatctgaaattgataatatattttatagacttccacaattttaatatatgaatgttcaagtgtgatattctagaaacacaagccagaaccttgatactttttctgccccaccattcttggaaaggaataaattgttactgagaaaatataattaaataaa

SEQ ID NO: 16963 - DNA, 352 bp, Homo Sapiens
tcttccccaagggatttattttgcaattcccgaaattttaaccccttaaaagaattcccctccattttttgggttcaaaattcaaaaaccgtccaaacaaaacccaggccaaaaccccttttgtttttacctttctcttttctgcttttaataaatggtgccccgttttaaaacaaaattataagggcccttgcataaactgggggcttttaaagggccaaaagttttttccgaaaaggaaattccctatgggggggtggacacgtgaaaaaaacaccccttgtttggggttccacagggaacccgaccagtttttttaaaactttggttttccttcctttggggtttagaa

SEQ ID NO: 16964 - DNA, 401 bp, Homo Sapiens
  misc_feature (93)..(133): n is a, c, g, or t
  misc_feature (149)..(201): n is a, c, g, or t
  misc_feature (229)..(241): n is a, c, g, or t
  misc_feature (278)..(340): n is a, c, g, or t
ggtttcccattctggtttttaattaaaaatgtgatacccttgtattttaaaaaaagggcccccgggggccagggaaaaagcctgggccttttnnnnnnnnnnnnnnnnnnnnnnnnnnnnnnnnnnnnnnnnntcggagggttgttccnnnnnnnnnnnnnnnnnnnnnnnnnnnnnnnnnnnnnnnnnnnnnnnnnnnnnaggggaaaaccccaagggccggggggtnnnnnnnnnnnnnaatttccctttacccccaaagggggtccccgaacccnnnnnnnnnnnnnnnnnnnnnnnnnnnnnnnnnnnnnnnnnnnnnnnnnnnnnnnnnnnnnnnccctttttggaaaacaaaaagggggtgtttaaaaaattttagggggcctggcccccctttt

SEQ ID NO: 16965 - DNA, 811 bp, Homo Sapiens
  misc_feature (316)..(324): n is a, c, g, or t
  misc_feature (405)..(413): n is a, c, g, or t
  misc_feature (568)..(578): n is a, c, g, or t
tgattcggcacgaggcgagttcacacgccccaggaaccgccaacccccgcccttgtctttcccccctctcgtatttcaaattttcatatacaagagaaagaggctatattttaagccagtggaggtggaggggtgtggaaccccatagggggatgggagaccccgtgggggtgtctgcctccggaaaaaggggaaccctggccctctctcgaaaaatgtcactgaccttggggatcctgacccaccctctggcaaaaactttacaggatcccaggttgaaccctggggtgccttccaaggctcccccttccaggannnnnnnnnaaccaaccaaggaggggcatggaaaaggcaggtctgggacaactttaaaacccagcccagaacacccctaagaaaaactcnnnnnnnnnccttaaggggctggcacacacacctgtggcccatatagagagcaaaaccttgatttgaagcttctcttcccctcccttataaacacatgacactttccagggagggagagacaggtggggactccctctctggggccctcctctcccccaggagnnnnnnnnnnngaggcgccaggggccctgtggtgagctccaaacaccacaaagattacaaaaagggggccgtccatacactgcacaaaggatacccgctctctcaaataaagtgcgcccacccctctctcagatttctgcactcctctctctgcagagaaattccgaaaaaatgggcctcccccttttttggggctctcggggacttccccaaacccaaaaaattttattgtaagagcactccc

SEQ ID NO: 16966 - DNA, 651 bp, Homo Sapiens
gcacgaggaggaggcagtggatggccagtgtgcctgaaaactggaattagatcggtgaactgagaggattggtttctgccctacgttgggtgaagaggggcagtcctcattgctaacagccgcaggttggtgtaattaactaacttccgtaggcaatgcccggtgtacatcttgaaaacccatcagatggggtatttctcactgacatcagcttttaaagggaggagggctcatagttgtatcacagctgcagtacttttctttaaggcaagaaacagtttaaatcagagaaaatttcacaggattctagatcgactacttttttcatctagttctattattttgaccttatggccgttttttgtttgtttaatggcgtgaattaaagtgtgacatttctgtccatcttttcacgtacaaaatcagcattcgttaattcaggttatgaaaataattgctgcttcaacaaagtgaggcttaaaataccacaacagaaatgtagccgatagtatgtatcttaacttttagtttataatgactgtattaaaatgatattacagttttaagtttttcaaacaaatagtgaatggttgtgcaaaataagacactgaaatattttttaaagaattaaaatcacaaatgttgaatgag

SEQ ID NO: 16967 - DNA, 659 bp, Homo Sapiens
gcacgaggatccctatcacagaacttatacataaaagagagaaagaggctcaaagaagagacataaacattcaagttatagaaattctgtaagacaagaatgaggtgtattaacctcaggctctaaaataggagaaaattaacattgtgtgtaaatagttacggcattttcagagttagcagaaacttctcagatgttatcactaacgctttgtagatattttattcccttttggaaaaacaagctcataaaaacaatacttcaataaaatatatacgcctagtattgtatgatgtactggtagcacagggaataaagccatttatttttagagatattcaaaaccctcactgatcactgctgcaaaaagtacaagtttagcactataagagttaaagagcagcggaaaatgcccatcttgttatggcaggggagagtattaaaaatgaaaccttagttttataaatttcgaaactgtacagacagaatgtgcagtattagctttgccaacactatctgggataataagaatatttacctgatagaataagtcacataaatttagaagaccttaataattttaggagggtactttgaacaagttttctctctcatgctgttttttagaaactgatcctagcaactggttagataaaaag

SEQ ID NO: 16968 - DNA, 322 bp, Homo Sapiens
  misc_feature (80)..(108): n is a, c, g, or t
caatttgctatctttaaaagataaatgaaaaaacaaacataaagttgtaaagatctgtgttatcccttacaagcttaagnnnnnnnnnnnnnnnnnnnnnnnnnnnnngaaaaataccaaattccaaatggtcaaattcattaatatctataagaaaaggtaaaaattttttgatgaagtcattgttttgctacctatattcaggcagaagccaattttttttccgcccttcccggggcagtcggctgatctttataattggtagagactcgaaaaaagaataggttttaggaagggctgtcttaaagggtaatatttccct

SEQ ID NO: 16969 - DNA, 507 bp, Homo Sapiens
  misc_feature (193)..(252): n is a, c, g, or t
ttaaaggggcccccgggctgcaggaattcggcacgagggtccgccttaggatggagaaaacatttcttggaaataatgattcttgattttgaagaggaaaaaaacagattttgaaattttgtgggatcatacaaaaatcaatttgtttctatacactagcaatcaacaatcaaaaatataattaagaaacaannnnnnnnnnnnnnnnnnnnnnnnnnnnnnnnnnnnnnnnnnnnnnnnnnnnnnnnnnnngcaagacttgtatactgaaaattacaaaatactgttgaagaaaatgaaagaagggctaaatatatgaaaagacatctgatgtttgtggaccagataacttaatattaagatggatacactccccaaattgatatacaagactaacaaaatcggtgtcaaaatcctagctggatttgtttcagaaattgacaagctgatactaaaattcttatggaaatccaagggacccagaatggccaaaacagtcttgaaatg

SEQ ID NO: 16970 - DNA, 587 bp, Homo Sapiens
gcacgaggctcaactctcaatgtcattctcactctgaccccatactcctctcaggccaacccaaaaagaagcaccagcttttcactctggcttccagtctgcataggtctgcctgagggaccaagaactgcccacagcctgcctgattttcccagtactcatgtcatgtgacttccattagccttggacactaattgacaagtctgtgggtcactgagttattcatccacaaggccatttcaaacctctcttcaaactcatattcaccctttctgcagacaatctcatttattctctaccaaaaggtgaaggcatagcaaaatggcctcttttattttgaagctctaccatttacattgttccttctagactaccttcaaacatgcacaagtaaaaaaagaacctttatttgcccttgttgcttctgtcagctgctatcttaagagtcagctttggctcatttctccccttcaatcccttagaaccagtaaagtcccaataatgctaaccttgaaaaatttttttgattcccatcatcacattcatagtgcaggttctttttctttctttcttacttttgaggcaga

SEQ ID NO: 16971 - DNA, 608 bp, Homo Sapiens
cttaaagaggtaatttagccatcattcttatgccagcagatataaataaacttggacccatctggtcttcagctaaacctgagacattttaaagtgcatggacagccatggacagcaggccctcctctaacaggggatgcaaggcatggagaaagacaatcagtacccaagctcagccacagaagacaggagtcactcatataacttgtgtttagaagtttttggtagccacgcacactttctgaaatcacactatctggtggtttaatcatatttttaaagacagaatccctgagtgctgagcagattctcaaaacacatttagaatccctgaaattagaaagatcaatgacaaaatatctgtcagccaggccacaaacaggtgtaaaattatgaaaggagtggttggatgtgccaagtttggtaaagtggtgactgcatctgagaaagaggctgtgaggctgaactcttggtggcttccttctgtaacttccagagggagtcttcaacacaggccccgtgctcgtaaaatacggtagcacctatgtaagaagtgcctggagttttctgtcttctttctgtgtgattttttggcctttttatcaaca

SEQ ID NO: 16972 - DNA, 256 bp, Homo Sapiens
ctgttcccctttaaattctgagaactaccaataatactctccaaccaagtgaacagactctctgctggcccaggggactcccgagaaccttataaactgagtttctgaccctaacatgatgggaggttagacacacctcatcataccccctcccttttgtggttttagacacaacaactgatcagcattgatattaaaagagagatcatacgactgacggatctactttgtgacaataagataccaaataataaac

SEQ ID NO: 16973 - DNA, 707 bp, Homo Sapiens
atgtacagtcatttattttagctgcacactcaagactaaggccaagagctttcagagaaaatagcttataggatgtcaggagacctattatagaaacattcacccccatgtctaaaggggacaaaattctatgtcttccacccttaattccaaccattaaccaaaactggagaaatctaacatggcattatatcacaaagtactttattatttttattttggattcaaggatacacgtgcagatttgtaacataggtatactgcatgacattgaggtttgggcaattaataatcccattgcccaagtagtgtacattatacatgataagtacttgttaacccttgtaccccttctccctccattttggaatccttagtgtttattgttctcatctttgcttccatgtgtacccaatgtttagcttccacttgtaagtgagaaaatgtagtatttggttttctgttctgtgttaatttgcttagatcatgaccttgagctgcatccatgttgctgcaaagagtattacatgattcttcttcagtggctgcatagcattggatggtgtgtattaacctaattttaaaatccatctgaagatttatgagcacatgggtttcattccacatttttgctattgtgactagtgctgccataaacttacaagtgcaggtgtattttgggaagaaaaatttatttgtatttgggt

SEQ ID NO: 16974 - DNA, 806 bp, Homo Sapiens
gtctgttttgttttccccccatcaacctcttctgaccagacttacccagaaaacatctttcccctgtgtggagccagttggtacagaaatttcattatcagtcccttatcaggttgaccgtgagccccaccccagggtggcactgtgagtcacctgggaagaaaggcctccgggcaggagggcaggtggttattcctgcttctccaggaaccaacccaaaggcagcaaggtccagtcctacgacataaagcaattcctctattaaagcggggaacgagaccatgtacaaagtctaggttaagagcgaaggacacttctcagggccttagtttgctcatctataaaatgaaggtgttggaaggttctccaaacccctggcagggctgcagccctgattctctggattttaaaggctctgtggccagactgggggaggggaggacctctctgtgcccgaggcctgagcccagtctgatgctatgagatcatctctgacagcccgttaggcacggctggccacttctccaatatgaaggctgccccactttcagcttcactatttgagtttcactatttggaatgcttacctagagccagaaaatgaactttgctcgacaaatcaaacacaataagaaagataattaaagaaataaaatgtctacatatatgtacaagatgtccagatggatgtttaccaacatataacagtggctgaatcccagtggtagaatcaaaggggacttttgctgttttcgttgtactttcccaatggcttgaatcttttaagctatgcgcatgtatgattt

SEQ ID NO: 16975 - DNA, 817 bp, Homo Sapiens
  misc_feature (204)..(226): n is a, c, g, or t
  misc_feature (229)..(324): n is a, c, g, or t
gcacgaggatgccgcttttataaccttggctcagaaatcacataactgcatctattcatcaaagcaatcacaaagtctcacctagattcagggggaggagacttaagattccacctatggatggggagtgtcaaaagatttccagacatatttttaaacaaagtagtaacttaataaacttaatggtcctcgaccattcattgnnnnnnnnnnnnnnnnnnnnnnnagnnnnnnnnnnnnnnnnnnnnnnnnnnnnnnnnnnnnnnnnnnnnnnnnnnnnnnnnnnnnnnnnnnnnnnnnnnnnnnnnnnnnnnnnnnnnnnnnttttgagagaccatgcgaggccccatttgttgtttagaccagtgtttgggcatggatattattgacaattggggccagataattttttttgaagtagtaaggtaggctgggggtgtctggtctgtgcattgtaggatattgatcatcagccctgtcctccacccactagatgttaatagcaatacactactccagctgccctagagtgacaaccaaaaatatgcccagacattactaaatgtcctctgagggataaaattacatccagttgagcaccactgcactaaatgaacatatattaagcacatttatgttcatggcaacataaaagagaactccaactctggagagtaagttaaatcccatcatttttctgagtaactttagataagccataggcaaacaattccctaccttgttgggtcattgggaagatcgaagggattataagtgaaaagtatttttcatattgaaaagctatggaacattattt

SEQ ID NO: 16976 - DNA, 305 bp, Homo Sapiens
gcacgaggagaagataagatcttgatattctgtacaagttgatgtaataccctgatgcgttttagaggacttggcataaaatgaaagattggcaaaggcccttgaggggcttggggatgagagtatggaactgtctgcattggaccctaaactggactagaagaggcatcttcaaggttcatacgttgtccagctgtaagttcatttgagtagcagacctaacaaatatttgaggtcaaaaccctaccatgttaaaacaaacaaaaacttaccatgttaataaaagtattcatttgcttgaaaag

SEQ ID NO: 16977 - DNA, 922 bp, Homo Sapiens
gcacgaggctcacaccccaccagggcgtaggggctttctcccactggggccaacgggccatgagtggttttgagcattaatataacaagctttgatcattgttttcaatagggcattctgaaaacaatggcatggagtagagtggctttgaaggggacaggacttgggcacaggaggtctgaaagcagagacgacaagggcttgccttgtagggaagtcagggacagactggtgagatatttagggtgcccagcttgagaggtgtgatggctggggacagaaagagaagccagttaggtgatgaggtttcagatttggccacattggtctgtaggaccactaggtggagctcttcaataggtacttggatggatggtaaatcctgaagatttggccgcaggtggcagccaggacctcaaatatgtatgtgcaagtagaattagaagaacagtaggccaaaaacagagtgccaggtggcccagggggggacctagggagcctgaggtcataggagctaagaaagtaagtttggggtaggaggtagggcccaacaggtaggtgcagggagctgggccctggtgaacacagtcccctggcttgatcactgaggaggccacagtgactcttttctgtagacagatggaggtcaaggtcaaggagtccagtggtgaatggaagacagggaagcaaattaccctcagaaagtaattcttggatttaagtctttcccaccttccataaacactttgtgcaattactctagatgaggcactgaaaaatgcttcgtacccaaaatacctttgggaatagcactcttgccctggggcctgggggattcttggccccacaggttaagctgtctggggcagcagcaccagaaccccacttgccatgggcactgtgagcctgggccagctccccc

SEQ ID NO: 16978 - DNA, 845 bp, Homo Sapiens
  misc_feature (85)..(148): n is a, c, g, or t
gcacgagggttagagccacttatgtttatttgtgtttctaatttatagtttaaatttatttgtgtttctaatttatagtttaaannnnnnnnnnnnnnnnnnnnnnnnnnnnnnnnnnnnnnnnnnnnnnnnnnnnnnnnnnnnnnnntttgtaaaaagttaaatgagagtgggtgtttctctcatgttcactctggcatcttttagcatttttttaatttgataattataggacgttagcatgcatatcgagtttgcccttatgtggtgggagttcaaacacacaaagacccactgtatgcacacaactgttcttgctggtttgggataggctgccatgcttttttaatgttagtacagcctgtatattcattacggaattcagataaaatttccttatgttctgctgttatgtttgatcgaatcctaatcacagtgagctcttcattagctcaatatgcagtttgccctcaagtgcgcggtctattactttgtaatatgccactgtgagtactgacatttacagttgtttaaaggtggagcactggaaacagcctttccccctttttctgtgtattggggatgggagtaataacattttggggaggtttttaaatctcccagaagaggaaagtggcctgctttggcaggtgtgtgcaggatagaatatgtttcatttgttccggtgccaagaatgagtgctgtactacagtagttccctgaggatttgtatgtgctctgggctcatgaagatactgcctcatgagctgtggcagttgtactcttttttgatgacctgaaaagggattatttctgagaaatgaaagcctcccatcatgactgtg

SEQ ID NO: 16979 - DNA, 955 bp, Homo Sapiens
  misc_feature (293)..(318): n is a, c, g, or t
  misc_feature (469)..(480): n is a, c, g, or t
  misc_feature (504)..(582): n is a, c, g, or t
gcacgaggattgagcctcagggtggtcttagggacccccaacccaatggggaaactgacacaaacatcatgctcacactctgcctcttgtttttgccatgactaataaaattatttgtctctaatccaggaccacatgtcttctgccggcatccctaaaattgtcgcaggctaactttgtagcttgcaggtagggtaaactcccattcctcatagaattcttaccatcttcaaattattccatgttttcctcttgtatttttatagctatatgtttaaatgtagctcttctcnnnnnnnnnnnnnnnnnnnnnnnnnnagagtcttactctgtcgctatgttgaagagcagtggcgtaatcatagctaactgcagccttggactcctggactcaaggaatcctcctaagtagccaagattacagccacatgctaacacacctggctattcagtttttattttgtattcnnnnnnnnnnnnggtagagatggagcctcaccacgnnnnnnnnnnnnnnnnnnnnnnnnnnnnnnnnnnnnnnnnnnnnnnnnnnnnnnnnnnnnnnnnnnnnnnnnnnnnnnnatacccatgagccacagtgcttggcctgaatgtagctcttaatccatctggatttacccctgtgtgttctggcagagattggcaaactgctttatcaaaccaattactatacaactaatctacattttcccacctctcttgaagttaggtttgggtcatgtgacttaggaattgcttaatcctttagtggaatgtggatgaaaactatctgagccatttccaggtgtggcccataaaatctcatatctcccactcatttttatgtcttagatggatgcctaccttttaagatgaaggaataattatcacaattatcagctaaataacgcctttggacttagtgatcatcaataaacattccgtttgttaaacc

SEQ ID NO: 16980 - DNA, 463 bp, Homo Sapiens
  misc_feature (75)..(84): n is a, c, g, or t
  misc_feature (148)..(247): n is a, c, g, or t
  misc_feature (260)..(318): n is a, c, g, or t
gggggatttggtttacttaaaaaaggggggacccattccccttttaaaaaattttatggaaaatcaaacttatcnnnnnnnnnngttaatttcccccaaaggccccccctttttcccaggatctatccccaaggggttttttggattnnnnnnnnnnnnnnnnnnnnnnnnnnnnnnnnnnnnnnnnnnnnnnnnnnnnnnnnnnnnnnnnnnnnnnnnnnnnnnnnnnnnnnnnnnnnnnnnnnnnttcccccaagaannnnnnnnnnnnnnnnnnnnnnnnnnnnnnnnnnnnnnnnnnnnnnnnnnnnnnnnnnngcaacttgtaaagggggggcccccccatttttcctccataacaaaaccggtttatctgaaaaagggggcaaaatcggctaggacccacaaaaggcgggaaaaaaaccatttttttcctaggggtgagaaaacccggccccccttt

SEQ ID NO: 16981 - DNA, 912 bp, Homo Sapiens
  misc_feature (439)..(448): n is a, c, g, or t
  misc_feature (541)..(549): n is a, c, g, or t
gcacgaggcagatatatacatgtgcttttctaatactatgaatgtgggaaacagaggcataagatgctgacgcctggcccaggctgggtgatgtgttttattggtatgtttgatggccttgtaggcatgggagtctctaaacagtagttatgggattcccagtctcagcttcagtaacaaggtgagtcaatggagggagaagcggagaatgaagttagatgctgggacagttaggtacacgtgggaagtagagttcaggtgtcaggatgagtgattcaggagaggtggtccatggcttaattttatgcagtttcagctgtgtgatgagcctgatggcttgaaggcaccaggcaagcctgaacatttgtgattgtctctattaatgagtaatgggatcgctgaggtgataaaaatctatacaaatgcttgaatgagtagnnnnnnnnnnatatcaccaccaaaccttcagccacaatctgttcttccctcttgacctctgattaggctataatgatcagaaatggtccaaatttaggcaatnnnnnnnnnttggatatgccaccagaggttacctaatcagccataagctcatacatcagaaattgcctgcaatgagggtgattcagacaggcataacaaacttggttcagaccatttacattctttaatgtaaatatggataaagaaaggtacttgcaaattaagccttcacagttgagagagcacttcaataaggtagtagttagaggcaggtggtgatatcttagggctgccactttatcttattatttggcaatatacatcaaaggtgctttcagatgtgaaagtgattgtttaacccattgtctgtgtgggctgggcatattttatgaggggttagctttgtaactatctaaattccaaattcttccc

SEQ ID NO: 16982 - DNA, 265 bp, Homo Sapiens
  misc_feature (67)..(76): n is a, c, g, or t
aaaacccccctccataaagggaaaaacaccaaaatattcaaaccccttccacaaaaggccatttttnnnnnnnnnnttcaaacccaaagggatttttggatgtaaagggaaattttttttgggggaagaaacaaataggggggaaattttacccaattattgcgtgaagtccggggaaacctgggggttaaaaaaatgttgacccgaaaatgccctcggaaatggggaagggaaactcaaaatattttgaggcttgtgggagggg

SEQ ID NO: 16983 - DNA, 302 bp, Homo Sapiens
caggaattcggcacgagggaacaccccttctctgcccaccttaacagacctctagggttcttaacccagcaatcaagtttgcctatcctagaggtggcggatttgatcatttggtgtgttgggcaatttttgttttactgtctggttccttctgcgtgaattaccaccaccaccacttgtgcatctcagtcttgtgtgttgtctggttacgtattccctgggtgataccattcaatgtcttaatgtacttgtggctcagacctgagtgcaaggtggaaataaacatcaaacatcttttcatt

SEQ ID NO: 16984 - DNA, 826 bp, Homo Sapiens
gcacgaggtgaaagtctaaaaatagtacccacagctgtgttcccatggccagaggattctccaggcattatcctcctacccttcactgagaactattgcactctcgtctatgttcactgcttttaaggacttcccaatgcttacagttaacttctctgccctttcaactgaaaactctattgcaaggtttatctctgttgtatattggaggaaggtcttacacgcatgattctttattataaaagttatgtttttatttgtgtgtttactcagacttttaaaagtgagaggaaaattgtataaatattgtatccctcagtctgtagaggcatcagttcctcatagactctgtctcccctttggagcctctgcctattttattagcacagcagttctcaaccttcttggtcttagggcctttaaattactggggaggccatagagtttttttctatggaaattatatttgtcaacatttgccacgatagaaataatactagattttaaaatattaacactttttaaaattccaaatcacaaaactaatacctgtcacatagtgatgctttttgtaaaaggaactatatattccaaagagaagagtgagaagagtggcattgtttcacacttttgcaaattttttaaatgactgttttaatagaagacaactggattcttatgtctgcctttgcattcaaactgttctcatataacacatcctgtaccctttgtcaaacccctgtaaacacttgtataagatttataggaagaaaagccaaaatggtaaatttgtgaaaatggttttgagcttgtgcatcctgtaaaa

SEQ ID NO: 16985 - DNA, 708 bp, Homo Sapiens
  misc_feature (465)..(474): n is a, c, g, or t
gcacgaggcttcctgtcttcttttggggggaatacgtcgcaaaactaacaaatctccaaaccccagaaattgctgcttggagtcgtgcataggacttgcaaagacattccccttgagtgtcagttccacggtttcctgcctccctgagaccctgagtcctgccatctaactgtgatcattgccctatccgaatatcttcctgtgatctgccatcagtggctcttttttcctgcttccatgggcctttctggtggcagtctcaaactgagaagccacagttgccttatttttgaggctgttctgcccatagctcggctgaaccagcctttagtgcctaccattatcttatccgtctcttcccgtccctgatgacaaagatcttgccttacagactttacaggcttggctttgagattctgtaactgcagacttcattagcacacagattcactttaatttcttaannnnnnnnnnaaatacaaggagggggctattaacacccagtacagacatatccacaaggtcgtaaatgcatgctagaaaaatagggctggatcttatcactgccctgtctccccttgtttctctgtgccagatcttcagtgctcctttccatacagggatttttttctcatagagtaattatatgaacagtttttatgacctccttttggtctgaaatacttttgaacagaatttctttttttt

SEQ ID NO: 16986 - DNA, 950 bp, Homo Sapiens
  misc_feature (69)..(80): n is a, c, g, or t
  misc_feature (149)..(464): n is a, c, g, or t
  misc_feature (506)..(599): n is a, c, g, or t
ttgatgatctttgaaccctttagggaggggccgtttcccattccccctaaaaaaagaatcctttagggnnnnnnnnnnnntccaagatttgaatgaacaaaaaactccaaatcgctctccacggctggggttcccttttccccaactgnnnnnnnnnnnnnnnnnnnnnnnnnnnnnnnnnnnnnnnnnnnnnnnnnnnnnnnnnnnnnnnnnnnnnnnnnnnnnnnnnnnnnnnnnnnnnnnnnnnnnnnnnnnnnnnnnnnnnnnnnnnnnnnnnnnnnnnnnnnnnnnnnnnnnnnnnnnnnnnnnnnnnnnnnnnnnnnnnnnnnnnnnnnnnnnnnnnnnnnnnnnnnnnnnnnnnnnnnnnnnnnnnnnnnnnnnnnnnnnnnnnnnnnnnnnnnnnnnnnnnnnnnnnnnnnnnnnnnnnnnnnnnnnnnnnnnnnnnnnnnnnnnnnnnnnnnnnntttcccgcacgttcgccgggttccccgtaaggccttaaatcnnnnnnnnnnnnnnnnnnnnnnnnnnnnnnnnnnnnnnnnnnnnnnnnnnnnnnnnnnnnnnnnnnnnnnnnnnnnnnnnnnnnnnnnnnnnnnaccggttttgtctttgacgttgagtacaccgtctatataagggactcgtgtttcaagtagaacaacactcaccctactcggtcctatctttggattttaaggggattggcagatcttcgcttagtgtaaaaattgagctgatttaccaaaattaacgcgaatttaacaaaataaacgctatcattttaggggcccctttcggggagtggggcgcgaccccaaagggaaatccaaaatacatcaaaatgtaatcgctcatagaacaaatactggggtaaatgcttccaatttaatgggaaaaggagagagagtaagaaattcccacatttcccgggtccccccctatttacc

SEQ ID NO: 16987 - DNA, 690 bp, Homo Sapiens
  misc_feature (175)..(193): n is a, c, g, or t
  misc_feature (227)..(248): n is a, c, g, or t
  misc_feature (415)..(466): n is a, c, g, or t
atcagtaattttctgacatacataatggtgcctttatttaattttaaaactatccgtattaattcccttccagtaaacatacacacttgcacacacacgtgccacacaacttgagaaataacactttgtccttgttgtctatcattaggactaccattgttactaatattggtgnnnnnnnnnnnnnnnnnnngaaacgtaatctccctctgttgctaccaaaagtnnnnnnnnnnnnnnnnnnnnnngagttgaatgccagccaaaatcaacaagtctctgaattgcattccagcaattaattactaattgggaatcactgaaaaggcacaaattccaatcaaacacacattggcctggcatatgcatacttgcacaaaaccgaaaaagattaaaggccgtttatgtttccagnnnnnnnnnnnnnnnnnnnnnnnnnnnnnnnnnnnnnnnnnnnnnnnnnnnnggctttcacctttaagtgaaacaactgaaaaacgtcatagtggtggttatctcagaacattgttaagggaaggaaataaaattaaatgagataatgtaagggaaagcccctagtatatcatagatgcttattcaatattaattgacagtaagagttatttcattttcaaactgaaacacattagccatcatagcattatatttataaataacttcccaggttta

SEQ ID NO: 16988 - DNA, 783 bp, Homo Sapiens
gatatttgcaatagtaatgttttgaaattttggttacaaagtcacaggtcttgccaatactgttgtagtttcttgcctatatccgtaatttgaaggaaatggtaagagtgattagagaagtgtaattactgtaattttttcccctattgtagtttcttgcctgtatccataatttgaaggaaatggtaagagtgattagtgaaatgtaattactgtaattttttccccattcaactttatatatctttaactgatgaccagatcattgttgttctgaaccagtttgtggtcagcaagtgttttgtggggttttgtttgtttgtttttaaagaacagtttgggtcacttgacatggttctccaaagggatgttatgggttgtatttggttctgggtgataaccgacttgttagataatttagataagcaaccgagttgccatgtttgtttgtcgaatctcaagtgtagcttatattttatgttcctagagaggttgtcagggaagatttgaccctttggcaaatctgtttgaatagagatactagccatgctgcccaatagggctttctggccctgaaaaagatacggagtattcttggaaagttgaagggaaaaagaataaactgatccatgtagtagcatgcagattattgaggaattttctaaaggtatctctctcggtgtatttctctacttacctgtaataatgcttttgtcttaatagggtggttctcttcccaaagtggaagcccaattcatcaatatgtgaagaattgcttccgga

SEQ ID NO: 16989 - DNA, 876 bp, Homo Sapiens
  misc_feature (689)..(714): n is a, c, g, or t
gcacgagggtagcataaaaatagattgtaggctaattaaaagttctgataagtcgggttgattgttcatcaaggctttttaccatgttagtctgtgttctctggaacagttgagagacaaatgcataagcattttagaaagaccaaatgtgaagccatactccaaatattcaacatcactgcagttatttttgagtttatcaagatgtgattacaggagagtcttactgtagtcctgcttttatgtttccaaggtgtttgtacatggactttcctcttttccaatagccaaacttgtttggatgtgatccaagatgtaccaaaaggtattgaaaattaaatgtaagagtagtcttctagcaatattgcaccattcccaggcagtttccaacgtgcatcagcatgtctgtctccagtggaacaagataacttccagcccctgaacccctggggaaactccttccctctttactgtatgttgttgccactgtaggagaaatctctcctctgcctgactctgcagctgctttacccagaacctcaggaggaactctgagtccagagccaggctgagttcagccaggcaagtctggccttggggctgtatatatctgtctcagacatcgtctgtgttttcatatattttttgactttttaaaagatgacccagaccacaatagtatgttctannnnnnnnnnnnnnnnnnnnnnnnnnccattacattgcttagtacagtatttctaggatagaaaatttgctttcttggtctgccttggaacatacctaccaattacaacattgattttccataaaaattgagtttaaagttcccaacttgcaaatgaacttttggatagccatcccatttgttagtgg

SEQ ID NO: 16990 - DNA, 930 bp, Homo Sapiens
  misc_feature (491)..(507): n is a, c, g, or t
gcacgaggcaaaggtacagtggaagaagggttaatcacaagaagttacttatatggtagccctgagctttaattgcagagtaactttaattacttttagagcctaaagatgactctagagcctaagtcctagtttctcccaatgttatatttaattttaaaaaattgatatgaaaatgtctaatgtatagtaataatttatgacagatctagtcatttcttcctattaaaaaagattaccttatctccagtaggaaatggaattttatgggcctttaaaagaaagttttatgaaacttgatgctataattttattggtatttcaaggggaaaaaagcactggggttcaaaaatggtagcagaactgctttgaaatgctgcaaggtggccactagatgatgcaaaatacaaccaaaagattgactgagaataaaattaggtgacaagggtttttaaagaataaccttttaaagtgtgggggcaggggttgcnnnnnnnnnnnnnnnnnaaagtcaattgtattttacatcttacatttctaaaagcattttataattatttttagtaagatttttcttaaaatttcatatactggtttctacaatttatatttgaaatttctcagtgttatgtaaagagtgatggaaaagcattgatttctttaaaaccgtaatgtttttagaacttaagcctatagggcctttcttacaatgttgatgtacccattatcttagaaaatctagtttaaactgttttctttcaccgcaaaagaattaaatgggaaaatcatttgtttatctctaagttatactattagtagaaccaaacaaattatcttcttttaaaaataatcttataggaaatagacagtccaaagtcatgtctttgaacagtggattggatctgtgccagtaatgacaaaattattttt

SEQ ID NO: 16991 - DNA, 545 bp, Homo Sapiens
gcacgaggatcctcttaaaaatacaaaatttgaatatttattattgatagacactttttatttccaatttgattatttatgatacacatttgaaagtgttagaaattcatgaatttccaataaattatactacgatggatattaaattaaataaatatatccaaaaatgtgtctctaaatgaaatatttatactcatatttttagcattttaatttcacaatactattcacatgtacacctgtaagttgggttaaatattttgttactataaattttttggctctacattagagaaaaataccatagaaaggcatattttttaaggtataaaacatatttagcatgatctttgagtatgtttgtgcatatataattctactttgactgctatagtaaatgatccagatttagtcaccatagctaagaaggggaaaaagcatttgcaagaatttggcttgctaatgatgctattaaaagataaactaaagttgatatactgtattattgcatagactatttgtccatgtttgtattcaaaaatgcc

SEQ ID NO: 16992 - DNA, 759 bp, Homo Sapiens
agggaatttgggactctgcctatataaggtgttttaaatgtcttgagaacaagcactggctgatacctcttggagatatgatctgaaatgtaatggaatttattaaatggtgtttagtaaagtaggggttaaggacttgttaaagaaccccactatctctgagaccctatagccaaagcatgaggacttggagagctactaaaatgattcaggtttacaaaatgagccctgtgaggaaaggttgagataattttgaggagtttgtatttaattatagtcttccagtactgtatattcattcattactcattctacaaatatttattgaccccttttgatgtgcaaggcactatcgtgcgtcccctgagagttgcaagtatgaagcagtcatggttcatgaaccaaaggaacttatatgtagaggaaggataaatcacaaatagtgaatactgttagatacagatgatatattttaaagttcaaaggaataaaagaatgtgttaaacactgcatgagaggaggaataagtggcttagagctaggctttagaaataaaaatattccgataccatatgattggtgaggtaagtgttattctgagatgagaattagcagaaatagatatatcatccggagtgattagagtgcagggtttctggaaagcaaggttttggacagagtggtcataaaggcccccctgtgactttacactgcattaaattattttcttagaacataatccctgatcattatcacttt

SEQ ID NO: 16993 - DNA, 860 bp, Homo Sapiens
  misc_feature (77)..(372): n is a, c, g, or t
  misc_feature (375)..(401): n is a, c, g, or t
gcacgaggttagaattaatacaacaaaattttcctttggctagaaatcttatgttatacctgaaaaattggttttannnnnnnnnnnnnnnnnnnnnnnnnnnnnnnnnnnnnnnnnnnnnnnnnnnnnnnnnnnnnnnnnnnnnnnnnnnnnnnnnnnnnnnnnnnnnnnnnnnnnnnnnnnnnnnnnnnnnnnnnnnnnnnnnnnnnnnnnnnnnnnnnnnnnnnnnnnnnnnnnnnnnnnnnnnnnnnnnnnnnnnnnnnnnnnnnnnnnnnnnnnnnnnnnnnnnnnnnnnnnnnnnnnnnnnnnnnnnnnnnnnnnnnnnnnnnnnnnnnnnnnnnnnnnnnnnnnnnnnnnnnnnnnnnnnnnnnntgnnnnnnnnnnnnnnnnnnnnnnnnnnngttcatcttagaggattttatttatctgtatgtatatacatatatgtttgtatgtatacatacccacattaacattttatgaccctgtaacatttgttttctattcttttaggtgatgtgaattgacctcagtgaagaaacatttcatttagtctaagccttgcattcagggtcttacaacagatttcttgtgcaagaattattattagttaaaatggaaggtgttagtttaacaaactgagagtcaaattttctaagtttttaaatatgcattttaacatgcattatttttggcatttaatttaaaatagttttgtttcatgtatacaacagctgttacagatatatgccagcaatattcatacttttttaacaagcttttgttatatattttctaatcttcataaaagtctaatcatctatgaaaaagataatttagggagaaaatactttgttttc

SEQ ID NO: 16994 - DNA, 303 bp, Homo Sapiens
  misc_feature (65)..(115): n is a, c, g, or t
  misc_feature (151)..(162): n is a, c, g, or t
  misc_feature (244)..(257): n is a, c, g, or t
ttcgggaatggggccgggccccattttccccaaatggggattgtattaacgcggcctctgggccnnnnnnnnnnnnnnnnnnnnnnnnnnnnnnnnnnnnnnnnnnnnnnnnnnncccttttgcacaattccccttttccccggttggggnnnnnnnnnnnngggcccgcacgtttcctttttccaaatttttgcccctttaaatgggaaaggggaaccccccttttagcgcccttttaacgcnnnnnnnnnnnnnnttaccccgcggggggccgcttatttttgccgccccctaagccccgc

SEQ ID NO: 16995 - DNA, 874 bp, Homo Sapiens
gcacgaggggaatgcagtttttgacaataggtgaccttacccatatttagagtctctcctttccctggtctctcagtccctgtgctgatgtggccggcgaacctcagcaacacatctgccatctttaccctgcctactacccagggaccctcaagttgaggtcccattcccctgcttgatggtgctggggctgcctgccactccctgtcctgggagttgaggtcccattcccctgcttgatggtgctggggttgcctgccactccctgtcctgggagttgaggtcccattcccctgcttgatggtgctggggctgcctgccactccctgtcctgggggttgaggtcccattcccctgcttgatggtcctggggctgcctgccacactccctgttctgggagttgaggtcccattcccctgcttgatggtgatggggtttcctgccactccctgtcctgggagttgaggtcccattcccctgcttgatggtgctggggttgcctgccactccctgtcctgggagttgaggtcccattcccctgcttgatggtgctggggctgcctgccactcccctgtcctgggagttgttcagacgctgtgcatggttataactgctttgtagcacaaggtcttctgaaagtgcttccgtgctggcttctggagaggctggtaagtacgctgcagtaattttcccaggccatggagcctggggcttgcccctctagtgctgagctttgtggagcagacagagcagccgacatagcagagttgcttttggaaggggtcctagaggctgttcttggaagttggccgctcgctgtctagttctcctctgcaacgttccaccagtctcaaaactacgcttttattttc

SEQ ID NO: 16996 - DNA, 851 bp, Homo Sapiens
tctcagccagccaagtagctgggactacaggtacatgtcactacacctggctaatttttgtattttttgtagaggtggggtctccctatttttcccaggctggactcaaacttctgggctcagataattctctcacctcagcctcccaaagtgttggaattataggcatgatccaccacacccagccatatttgatttttaatatcttgggaaacctctatcctaattttcttggaggctgcattattctcttctaccaacagtgcatgggggttccaaatgctctgcatccttgacaacattgattccttttgtgtgttgaatagtggccatgctaatgggtgagaggtaagagctcactgggattttgctttgcatttctcccaaaaaaataattttgatgatcctttcaaatgcctcttggccatttgcatagcctttttaaagaaatgtctttggagaccttggttcattttattaaaaatcaagatattcactattggttgttgtgttttagaagtcatttatacataagggatgttaattcctgtcgaatagattacttgcaatttcttccccatctcctggttggcatttgtactccactaagcgtttcccttgatatgcagaaggttttgaaagtttgatatagtaccattttttattcttttcttgttacttctgcttttaatgtatactcaaaaaatttgtgaaaattaatgttattatgctcctccctatttttctgacgttgaagagatatatgtctcacatttaggtatttggtctgtgtaaatattttcttttgcatgctatcaaagggaaaggtcccagttcattatcttctattt

SEQ ID NO: 16997 - DNA, 866 bp, Homo Sapiens
gcacgaggtatctgtcacctcagacatttattgtatgtttgtgttaggaacatttaaaaacctcttttctagctaattgaaaaatacttaatatgataaactatagagcactccacagaacactagaatttaatgtgtctgtctagctataattttatattctttaagaaatctccccttattccccactcccttgaagtcagctcttaatttagaagtattatcaggtatttttggaaaactgtatttgtttgtattggcttgttgccttttcagagttgttgatgagactgtagcaacgtgctagttctcttgttcccagtattaagttttaagtaagaaaatgtgtacccccatcattacttctgatttactgaagcatgagaaagctttacaaagcatgcacatgctttacaaagtaaaagttatctgtaagccttccaagaagttttattaaatttcgctatcatttagatttttagtctgagaataaacgtgaagtccaatgttataagttgtttcatgaccaacaactagtaagcatataatttttccgtgaaattttatgtgactatatagctgcctaattacaccaacaagtcatgaagaaagattaaagcgacaggtttataaatgaatctttagcgtcagtacatttttattttataattgcttaagttaaaaattcccatgatgggctgtttaagcataagaacctagcctgtcatcacattgcctgaaaggaaaacaaattcacaagcagtgagaaacatttctttaatgattttgtggtcctgggtgccagcggtaaaggagaaaggaaaaggagatcctagctgtggttgcctgcagcatgtggtatgagg

SEQ ID NO: 16998 - DNA, 733 bp, Homo Sapiens
atgagccactgtgtttggccctcaggaatctttgatagcttcctagctttccagtatgacaagatgctccaaactcttccttttatttcttgccaagaccagatattagtcatttctccacggagccctaattctgtattaattactaaattatttaatttttaaatttccttttgccctgagttatttagaaggggatttgaaaactttcttttcggcaagccttgcatttaaaaatgtacattttagtgcactatggtaaaaatacacctacaatcactcctgttgagatattctgacacttttggtcaatgattcttatttaaaagggaaagatcgttttatagtcctaaacttgtgccttttcaaaccaaagaaagctattctagtctatatttttctccctatgtcccatcttttatctcctatttagatactggaattttgggacatatccctgtatcattgagctttccttgatactttctctgttagtactttttggttgaatgagagacaccttgtgattattctgacagctttactcctcagctgtatccctctatttagcttttaaaacaactttaacaacataattgcaatatctaagattggattggttcttttataataacctatacttatttatggctatgataccatactctatactcttgggatgttaaatacacttatttgatgtcttctttaatatgctggtattttgactttt

SEQ ID NO: 16999 - DNA, 712 bp, Homo Sapiens
  misc_feature (573)..(581): n is a, c, g, or t
gcacgaggtgactctgagtaatgcaccttctataactatctaaatttctactgaagctttttggattatgagtatgctgacttttcacgattggctggtgcatgtttagacttaaatgtcatatccttcatgtctcaaagccaaaatagtaacatctcatctcagaacagagctgtgaccacatgccaatatatgtgtcacaaagtctacatatgttacattccttggaagtctccttaaatgtttcacaaaatgtcaacaagcttgttttgttattgatatttccgagattgggcacatttaagacagtaaacgggaaaggtggtgaagatgctataagaagatgctgtatcttgagaattgaaaaatgagaatctgacatggtttgaaaaatcatgaagggtatatataaaggatgcatgtgtaggagccattaaaattcataacagtatgtgccccttcagcgttttaatcttatgaagtggttaagagataagtcttcggagttggacaaaaggatttgaatttaggttctgtggattattatgggtccttgataaattctcaaagccnnnnnnnnngttcatctctaaaataggaatataggattacctaccacattgactcgtaaggactatatgagaccatgtatatagaatgtttaacatagtaccaggctttacaaagaactcaataaatgtttaccattatt

SEQ ID NO: 17000 - DNA, 957 bp, Homo Sapiens
  misc_feature (739)..(758): n is a, c, g, or t
  misc_feature (777)..(867): n is a, c, g, or t
cggtggcggccgctctagccataaaaggatcccccgggctgcaggaattcggcacgagggaacatattagttctttgtgagtcccatacattctctctctattccaatgttacaatctttaaagctattaaaaacctgcatttgagaacacctgttgaactccttaatagagcttgattataaaccattttttgaaaaggaacaaagcaggacaacaattgtctgtgaatgacaaaattttcaggatagttaaaaacatgactgacaaagaagtttatttatcttcatggtttacaataactttacccttaattatgattgatagcatatacttagacattagaatcttagaaatcccatacaattctgaaacatatattagtattattcaccaaactataacttaaataagattggacatcattttggcaatctcatgtgactaaacatgtcaaataatcctgtttacctcttttctgaatgtttcagggcccctctaaaccattcaaaaagttaggtatcaggaaggacaatttccagattgccataaattattttgccaaaatgatgactcaaaaggcaaaatcctttcattagcctttattatgaaatgaaaatcttgttcaaagcaaaattttacccttgcattagtttattaatgttaaccccaatttgtttacacgaaaccttatagattattccatcaaatcctaacccatttgaccatgaggtgaaatcnnnnnnnnnnnnnnnnnnnngagatggagtttcattctnnnnnnnnnnnnnnnnnnnnnnnnnnnnnnnnnnnnnnnnnnnnnnnnnnnnnnnnnnnnnnnnnnnnnnnnnnnnnnnnnnnnnnnnnnngtagctaggattacgtggatgggccacacaccaggtaattttatattttaatagaatggggtttgccttgttgccaaacgggggggcccg

SEQ ID NO: 17001 - DNA, 846 bp, Homo Sapiens
  misc_feature (94)..(182): n is a, c, g, or t
gcacgaggatgactcaccattctatttgttttattgcaactgtcatttcataaaatgccctgacagctttaaactgtaaatgccaaagtgaggnnnnnnnnnnnnnnnnnnnnnnnnnnnnnnnnnnnnnnnnnnnnnnnnnnnnnnnnnnnnnnnnnnnnnnnnnnnnnnnnnnnnnnnnncattactgtctctttctctgtccctcccttccttcctgcctcccccctttgatgactctaatggcatgagtagttgaagtggtttttgctaacatcatggtgcgttctttccagctttaatgctatctgattgagcgtgtctcccctcagatttttgtgtagggtttagaaatggaaatgaccatgcacatcagagtttaaattttcctaggaaagtctgccatgaactgtaggacctataacttctagagatggagggacccctgacatctgtggactatggactcctgacttctgtggactctagaatttatgacttctgtggattgtggggcctctgacttccatagaccgtgggactgtgacttctgtggacccagggacctctgaattccatggactgtgagacctctgacttctgtggcctgtgagatctctgacctctgtggcccgtgggacctctgacttctgtggtctctgggacctgtgacctctttgacttccaagtcttctgtggactgcaggacctcatcaacacgtgtattgccagaagagaggctttgattgtgttaacctgtttctctcagaggtgtcaatactagaatttctgctcagtcttatggcctaggtggggtgttgagtctaaatatatatattttttgag

SEQ ID NO: 17002 - DNA, 573 bp, Homo Sapiens
  misc_feature (56)..(66): n is a, c, g, or t
  misc_feature (73)..(159): n is a, c, g, or t
  misc_feature (189)..(332): n is a, c, g, or t
  misc_feature (343)..(361): n is a, c, g, or t
  misc_feature (484)..(530): n is a, c, g, or t
ccccgggcgggcacaattagggggggcaaacaaaacttctccccacccttaggggnnnnnnnnnnncccaagnnnnnnnnnnnnnnnnnnnnnnnnnnnnnnnnnnnnnnnnnnnnnnnnnnnnnnnnnnnnnnnnnnnnnnnnnnnnnnnnnnnnnnnttttgctttggtaccaccaaacatgaaaannnnnnnnnnnnnnnnnnnnnnnnnnnnnnnnnnnnnnnnnnnnnnnnnnnnnnnnnnnnnnnnnnnnnnnnnnnnnnnnnnnnnnnnnnnnnnnnnnnnnnnnnnnnnnnnnnnnnnnnnnnnnnnnnnnnnnnnnnnnnnnnggaatcccatnnnnnnnnnnnnnnnnnnntggatttataaggttcaagcaaccttaccaatttaccaaaaattccaaccaaatcagggcaaagggctttaaaacatcaaaattctttatctcgcgccaaatgggacgagatacttttccgtnnnnnnnnnnnnnnnnnnnnnnnnnnnnnnnnnnnnnnnnnnnnnnnttttttaaagggccggaatttgtttaaccacatgaaggattta

SEQ ID NO: 17003 - DNA, 740 bp, Homo Sapiens
gcacgagggaaaaattttcagccattattttttcagatactttgatccctcactcctcctctcctttagagggtccaatgacatgcacatttgaccacttgaagtaatccaactctctgatgttattttaatttttacaaattgcttttctctgtgtgttttatttttgacactttctattaatgtgtcatcaggttcattaaccttttctttggcaatatctaatctactattaatttcatctagtgtatttttcatgccagacattgtggttttaatcaccagaagtttgatttggatgttttcatatcttccacgcctctacttatctttttaaatgtctttgatacatttaaattgttccaataactattttaacataatgtcagttatgggttggtttgattggttgattattctacttatgaaccacaattttctacttttctgcattcttgcttaattttatttgacgccagacatcatttgatgccagacatttatttgatgccaaaatgcagaaaattttattttctgcattcttgcttaattttatttgatgccagactttttgtgtactggatattcttctatttctgtatgtgttcctgagctctgctctgggattccgttaaatgatgtggataaaattgatcagtatttaatctaaggctaattatttccccacactgaggcaagacctttctgagcactgcgcccaatgtcccatgacaataaac

SEQ ID NO: 17004 - DNA, 436 bp, Homo Sapiens
  misc_feature (93)..(197): n is a, c, g, or t
tgggctcaagcaatcctcccacctcaggttcccgagtagctgggactatacgtgcgcgccaccatgcctggctaactttttgtatttctgcannnnnnnnnnnnnnnnnnnnnnnnnnnnnnnnnnnnnnnnnnnnnnnnnnnnnnnnnnnnnnnnnnnnnnnnnnnnnnnnnnnnnnnnnnnnnnnnnnnnnnnnncatggcaacaatattaatcgcattctcagtttctgagtattttctgggtgctgggcactgtgctaaatgctttgcacatttgtctgctgggatcctcccagcaacccctccaagatccctattcacatttcacctcacaagcacccgaaaggggcagggtctgttaaaggacttctccaaggccaattctgcgtggcttccggaggccatatttcttcctggggctctaaaggctgtga

SEQ ID NO: 17005 - DNA, 856 bp, Homo Sapiens
gcacgagggtccagagtagttctcctgccttaaaacctcttttgctgcacctgtttctctctccccactcaccccagctatctgatcttcttagtgcctccgaagttttggtcttttcaggatgttgtagcgttggaatcatggagtatgtagccttcaccacatacaccttccttcactttgttggcttcctttacttagtaatatgcattcaagtttcctccatgccttttcatggcttgatagctcatttctttttagcaccaaataatattccgttgtccagatgtagcacaatgtttatccattcatgtaacctgtgaccgactcacagataggatgtggaatcactcaccacagaggcattagacaataatcagacccaagtcatttcatgggggaacaagcccacaggtaccagactgtccagtgagtcagggccactcgtaggaagtaagaagagaggctagagcatagccaggtcctcactttatactttaagcccatgtgtatttctcccaaaccacacagcattgtttccatgctttcagctttgcatgaataacgtgatacttgaacgcatcatttatcacttgctctctttcccacagcgctgttttcaagcttcttcctgttcatgatgctctgcttaacccttaagctgcatgggattctgttctgtgaatacgcccaccccatgtattatcctgccccagcaaaaagtccccaaaactctggacggtggttacctctagggagggagagaagagattgggaatagggagcgacttcaacggtgtttgtaatgttttgtttctttaaataaaagagctgagatcatttcagcagaatgttg

SEQ ID NO: 17006 - DNA, 384 bp, Homo Sapiens
  misc_feature (54)..(65): n is a, c, g, or t
  misc_feature (93)..(108): n is a, c, g, or t
  misc_feature (121)..(159): n is a, c, g, or t
  misc_feature (306)..(327): n is a, c, g, or t
gtttatttttcttaaattctggaaaataaaaaattgaaaagggtcacgggccannnnnnnnnnnnattttgggaggccccggggaaaaaccannnnnnnnnnnnnnnncgctccccaaacnnnnnnnnnnnnnnnnnnnnnnnnnnnnnnnnnnnnnnnaccccaattcccccataggggatccgaatacccgcccccccggggcggcttttaatttcttctttggggggaaaaccctggcgtttcccaaattaaacccctttgagcacattcccctttttcccccgggggtaaaaacgaaaaagnnnnnnnnnnnnnnnnnnnnnnacagttgccccaccagaaaggggaaagggaccccccccgtagcggggccatgacggc

SEQ ID NO: 17007 - DNA, 963 bp, Homo Sapiens
gcacgagggatgttttcagctggaaaagcaaaatggaacaaaatttgaaagtggcttaaacaataaaggatttgttactttacataatatcacatctgaaagtggacgttttcatagtgtgctaatccagtgctcttctaaatgatccaggagtctcgaacctttctactctggaggcattgcctctcctcgtctttgctgaagccagaggtcatgtgctcacacaatcatatggagaagcataaatgagctatttctcatcacctagctctttttatcaggattaaaaatctttcctcaaaaagtccataagcatacttccctctagcctagttggccaggattacataacatgcctccgatggaaccaatcactggtgaagggaatgcaattatcgtgattctagattaactgtaataattgacattcaccccctggagctgggatagaaagccgatttacagcatcgctgagcaggaaaaaagagatggctgttgaacaggaggcaacatgcaatgacataattaagtacatgtgcgggtttgtcatatgggtaaattgcatgtcacagttgtttggtgtacacattatttcatcacccagttgttaatggaattctaaccaaaaggatgtgggaggagaggaaggagccacaaagggagaatcatgcctaagagttaactatggtactctgaagcagaacagagagatcttgctccagggcctttaggaattttcaagcagtttctgggaagtcaatctctgctttatccagaacagttctgctgttttcttgttgtataatacataatctgttttacatatgattccttctgagaagagacttcggctacgaaaaccatttttaagatcttgttaataagaaaactgtccagctaccccaaactacttctttataattatatttttaattttcttttagcaagaatcttaaagaaaca

SEQ ID NO: 17008 - DNA, 855 bp, Homo Sapiens
gcacgaggaacatttgtaggtactgaaagttacccagaaatctcacattagtctaggaagaggtatgtattatgatgctcagggttactgtggcttgatataattaaacagatgtatattcgtctcctagagtcttcaaaataatgatagtggtgacgatgacgatgatgatagttagcagtttttaaaggcttactctgcaacaggaattatacctagaggtttatacacattatctcatttatttcctaaaatgatgccatgaggttggatctattatttcttccagtctacagaagaagaacctgaagcttagagatatttggtaaattgttccaacttcactctgtaagtaaatgtcagatctgaccaatatgatgccaccctatgccttgtcacagtattattctgctatacgtttgagaatctgccaaattttcttaggctcattatccactaccaccatattctgacttgtggtggaattaataatatttctagaagaaatacttgcaatatttaagcaaattttagaatttttatactagaaataagatcttggacataatgtaactgtatgtctaggtggtgctaagtaacgagactttctgcactgagttttagaatgaagaatgggaaggaaagctcttcctaaataaagcaggaaacatggataccagcttaccatttgtaaccagaggtgtttcttaatctttttcagatcagttgtacaaaagttaagacagcaataatggtttttatagaatgttctcatgacggttaaatattaaaatgtatgtgaagtacatagcccagtactaaaaagatctgggcgtctcttctgattatttattg

SEQ ID NO: 17009 - DNA, 554 bp, Homo Sapiens
ttattaatacttttaaagactgacttgtttaagaattttttggggaacatttctatcagtgattttttttggcctttaatgatatgtgggagaccggagccttacaacttaggcaaagcatttcaaatgcagtccttcttccatctcaaaatatgtacttattttacatacagaattttaaactaaccattgaaaaataaagtaggatctgctacagtttcacctgaaaatttataaaaagtgttgagattggtaaaaggtagtttttaactacatgtgcactaccctaaaagacttgtctattgtcaataaagtgttagtatttgtgaaattattattcctgttcagaaatactatttcttaaatctcctgggaatttgtggcataataaagcacattcaaagttctaatgtatttatgagctcattttcaaaatagtaattttgtcatctttaaaatgaacatgacttgcctccttgatttctgaaatgaattacttgaagattgctatagtaatctttatttcatctttctagagttgttgacaattttat

SEQ ID NO: 17010 - DNA, 304 bp, Homo Sapiens
gcacgaggctgccctctctcctcgagccttcttctttcttggtttgatccagatcgctgacgaggcatgccctcagaataaaggccctggatgtgatggtgtccaccttcatgccttactctggggtggagggtgacttgttggggatcaactgtgacaaacaagcggagatgatggtgcgggagctgcccgccttcttggggaaaaggaagcatgaaactgcttttttcaaactgatggctaacttggacatgaatgtggatgaggctttggacttcctggactagtgtgtcttcctgtcctg

SEQ ID NO: 17011 - DNA, 240 bp, Homo Sapiens
gtttcaaaaaaccacaccaaaatgccatctcaaatggaccacggagtgggggcttgatgtttggggttcacaaatttttggccccctgagggtacttaaccccccaggacctgaaaatactcctgattaaagcgttccccggaggtctggaggatcaaaaaaacctcctggctgtggacgggataatgaaagatctgaaccactgtagactgagccaagtggggttccttagcttctttt

SEQ ID NO: 17012 - DNA, 419 bp, Homo Sapiens
ttagaatccccccggcgggccgagtccccattagccccaccttgagtgttctttgccgagctatctggtttgcgtcttacaattttgtacttgctcccacccgcttgttacactgtaaactcctgtggaaacatgtcacactttcccatattggtgtgttacctaaaaataagtgaccttaaaaactgtatcaccatgccgtgcatgaaatggcatctgcctttcgcctccttcgtttttgtgaccaagatactgtttgtggctaacacgcactcctaccaactctttgaaaagttgttccaaatgcttcctccggctttcttcacttcagttccgaccaccagctacggatactcgttctggctcataatgctggtccttcttctaagtttagtaattgttgctttcctgtttttcta

SEQ ID NO: 17013 - DNA, 394 bp, Homo Sapiens
atttcaaaaaaagtcttttaattgttcaaaatagcacaaaacgacatcgcactatggtaatattgagtcacaggggttactctacaatagtgaacggtgtactctcctcaaaaacaaatcaataggcgcgcgagagaagggatggggtaaaacaacaggaccaggtgagtgggctccaaggtgactaaacgtgacattttccacagcgaaatatactataatacaacaaaccaaaggccctggaggacacaggctgctgcgtctccaggcaaaggtcggtaggggagggctggaaagattggctgctcggttcaaatccttctgacttgctggcaagccttgctcctcgacagaagtttggggtggggggcagaaaactccaagcagatccccc

SEQ ID NO: 17014 - DNA, 825 bp, Homo Sapiens
  misc_feature (75)..(89): n is a, c, g, or t
  misc_feature (115)..(270): n is a, c, g, or t
aggattgcttgaggccaggaatttgaaattgtcctgggcaccgtagcgagactctgctttctacaaaaataattnnnnnnnnnnnnnnnttgccaggtatggtgatgtgcacctnnnnnnnnnnnnnnnnnnnnnnnnnnnnnnnnnnnnnnnnnnnnnnnnnnnnnnnnnnnnnnnnnnnnnnnnnnnnnnnnnnnnnnnnnnnnnnnnnnnnnnnnnnnnnnnnnnnnnnnnnnnnnnnnnnnnnnnnnnnnnnnnnnnnnnnnnnnncctttccagtgttctattatagacattttcattgatcaataagtcactttttctctagtgcaatggattcttatttttatgtgaatcatcaacaaaatcaatgcaaccaacttaggctgttctgtttaaataaattaagaaatgagggtgtgtgaagttctaaaattgtacagaactatgcttatataaaaagtttatttctactcctgtggtatttcagaaattcttaagattcctgaggatactactttctctaagtatcaaatgaccactagcctggaataataaatagtaagcaagacagtaaatactacagataaacaacattttcccaaagttaatccacattctaaattgggaaaagtgagtaatacattcaagaagcagatatatatattcttaaaatacgatgctttgggcttactgttttcttaaagctttctgtgtctgggctttcttttattggtttaaagtgaattttatgggtttctatgagtactaaaaattctgtttatatatattgttttaatgtaaacaattatataggtgttttct

SEQ ID NO: 17015 - DNA, 621 bp, Homo Sapiens
gaggaaggccttactccgtcccaaactgaaaggattaaatggcttcacctgggaaaaaataaccatcctgccctccattgctacccccacatactgtccatgttctcagggggtactgtgagtcctgggatctttggggttgcccacctgcctgtggtagttatggaaacccccaggtgttgaggcagggctggggtgtccccttccaaccaggctgtcaaggccccaactctggggcaaaggcagtggcagggcagccagggttgtgccaaagcctgagcaggttgaggtggggtcaggcagggctgggagtcagggcaggggcagcagcagtggacctgctatgcacacattttcttctccaaggtttgtgtgcaaaacatcctgcccatgctgccccagcagcttcagttggcacctgcctcagtccagcctctgggaaccatgcagcagctcccagcggccctgcacccaccaccagcatccgtttcacctgcagttgaagatccgtgaggtgcccagaagatcatgcagtcatcagtcccacggagcaacctgcgaggctgaggctcctcccactggaccgccccccaactggcaccactgctgcccctgccccta

SEQ ID NO: 17016 - DNA, 501 bp, Homo Sapiens
gcacgagggtgctgatcccccatctccctgtgaagatgaaggggtgtgctgatcccccgtgcccctgtggacatggaggcgtgtgctgatcccccgtccccctgtggagatgaaggtgtgtgctgatcccccatccccatgtggagatgaaggggtatgttgatcccccgtccccctgtggagatgaaggtgtgtgctgatccccgtccccctgtggagatgaaggggtgtgctgatcccccatgccctgtggagatggaggtgtgtgctgatccctcgtgcccctgtggagatagaggtgtgtactgatcccctgttcccctatctagatgaaggtgtgtactgctgatcccccgtccccctgtggagatgaaggtgtgtgctgatcccccatccccctgtggagatgaaggggtgtgctgatcccccgtcttcctgtggagatgaaggtgtgtgctgattcctcgtgcccctgtggagatggaggtgtgtgctgatccc

SEQ ID NO: 17017 - DNA, 1065 bp, Homo Sapiens
  misc_feature (521)..(530): n is a, c, g, or t
gcacgaggatgagaatccctgagttacaattttaaattttgttgttataataatgacttacatgaacatatctttcctcttttgaatactacctgattcagagaaacttctaatattccaacgggtttttctcctcatgattatttatatcattgtgtccaaagtttcttgatcatccaccccatgagtaaaaacttttgagcatgtgcccccaaaatatatttacttgtaaattttatatgtaagttactgtcaacccatatagtatatatttttagagcttaatttctttcttattttagatacaaataaatagaaactctaatattttactcctgtgctccaggaaattatcatacagaaggaatgcttgtaccccactttggaggatattacataaaaagaaaggggatatgtacgaggttgtcatcattcctgcaatgatagaaacaacattcttctcccacctcaatgaactgttgttctgacagatatacatataaggccctctgagctaatgnnnnnnnnnngaattattcaacctaattcagtgggaagcactgtgccataaataatctcaaatcattatcctggccattaatttcagcctctccctcttgttgcacatgcttttggaatgaccaacttgcagcacaattgactcatttgctgtccacatcccttacttggtttatccctttctggaagtgctaactgcagtgaaatggtcaagttgctggagggagaaaggaggatgttcacaaactgggaaagagtatcaaaattatcacaaggtgccagcagagtcactgtcaccatcagaccacctagggagccaactgttgccatcactcacccatgtcacttacagatctccctgtttccaaagagagaaacctatgaaaaggctgtttacattagaaaaagtaaagtttagcttccattggctggtgatctagcttctttctgtagttgtaatgtggaaagaaaatagacatggcctgtgttgctttcagcagaatctccctgccggttctcaaaaactttaaataaaaaatatccacg

SEQ ID NO: 17018 - DNA, 626 bp, Homo Sapiens
  misc_feature (255)..(292): n is a, c, g, or t
gcacgaggtattgcttggattaataaattttccaaaagttgtcttatgtagaatatggtttgcaaccagcagaaccattaatctatactgcaatgatatgcactatgtataattgtttaaaagcctctacttaatgatgtaaaatgctctatttaattacacatttgggtaaactgtatactaacatctgatggcatttttccactgtttgttgcttttttcaaatactttattgtacaaagctgttcttaatannnnnnnnnnnnnnnnnnnnnnnnnnnnnnnnnnnnnnccttgaattatgagcactgacagaatgtgcttagcacttttggctattcacacagcttttgagcatgatttgcatccaatatttacattgctagcaataataagccatctgtgagttttgtcaaaagttattggggattttttaaattttagaaatgcaaattattgtttctttgaactaactcttatgcagttgcaaaggcatttccagttgttatagtttgtgtacaatatcaggtgttccagattatgattcattattaatatcattgcttccttgttccctctgaggtccagaagattcatgtttacaatatttagaaacaatgttaaaa

SEQ ID NO: 17019 - DNA, 685 bp, Homo Sapiens
gcacgaggcccaacccatatatttactctgtagaaagaaccaccatcagcccggtactcaattcagaaatctaaaaatcatccctgaatcattcctcaagctttctttatacctcatcttcagtcatatacaaccaagtgctgagtcctgttagttatacaccttaaataagttcaatatctagctcttcatctccattctcactgccattgtcttcctttagactttaataatatctcacttgaaacactgcaaatatagtgtctaggctgccaggcttaccctttttgttcactaccacctgagacatcttcctgtaatataaatctgattagatcacccttctgtccatgttttttcagtgcctcctatgaccttcaggataaattcaagtatttttcctgccttgatcttgtgtttgcctatctgtcctgctacatttcttgctgttccccaattcatatgatgctgtagctttgccaaaccatgtataaatagttttcctgaagtcctggcttcgtaaacttcagtgtccttttcatgcatttctctatcagtgctgaatggcctgctcaagcttttttacctgggagaaatctttttcatcttatcaaaactcaaattcatagctcttctgagaaacctttcttgacccacctcctctgggatacaagttatttttcac

SEQ ID NO: 17020 - DNA, 396 bp, Homo Sapiens
  misc_feature (55)..(126): n is a, c, g, or t
gcacgaggggcttttattcatttcttgaataattttgttatatcttcatcttttnnnnnnnnnnnnnnnnnnnnnnnnnnnnnnnnnnnnnnnnnnnnnnnnnnnnnnnnnnnnnnnnnnnnnnnntaaaaaagtatatatatatgataatatcttcctctattagaatttaactctttaagctttttatttagatgtaaacttgcccccctgacatgtggtatgaaacaaatagaaacctagaaatttagtgcatattcaaatattaggaaagacactggtgtggtgacttttgtctgtcccttcattgggacgttttttctttcggatcaatttaatgaaattataattgactataattaattgtagccctttttactgtacagttcaatgatc

SEQ ID NO: 17021 - DNA, 929 bp, Homo Sapiens
gtcagacttggttattttgaaagactggtcttcaagctctgaggttttttcttctgcttggaacagtctattgataaaactttcaaatgtgttttgaaaatttcagttgagtttttgaattccagaagctctgattgatttcctaagatgtgtatctcttacttcatttcctgaattgatttaggagtttctttgtgttgactttcaacacactctagtgcctgtgtttaaggctgttgagcaagatggaagagtgactgtattttcacttacatgaaaatagctctacccaatacgattttatttgttgcctggcagaggccatcccaggaagtttcttcccagttaaggcctcattttgggatgagatttgtttccattgtgttcctgagggcaactcattttactccaggagagaaatgtaatagtgatgtaggttgtattcaaacagtaactaactgaatggccaatttatccactggaatttcctgctttcaacttattgttctggcaacctgtagtctgaaagacagcattgtcttcaggcatcacatgatatccatgagatctgatcatactacacaaattaccctgcactcaggaatctcctacatgatattgctggaataagtgtccatatgaactacagttttgctgatatgaattaattctgcatggtattatttaaaaataaaacatccttggctgaatccaggttactttcaaattttggctttgagatttcattctgcatagtaatattttttatcatttataaacattcaacattaaacacattaagtcctcaaatctaaaaggaaagtattggaagcctcatttaaattattgaggcagcgaaacctaaaccttatgaatctcatattgatgaatgtttcacctgacttaaaatatgattgtacaaggggggg

SEQ ID NO: 17022 - DNA, 369 bp, Homo Sapiens
cggactatggccaagggaagcaggtggggtctggcgtcttcacggaccttttgcaggctgatgcccactagtctgggccctggaccttttcgggaacatgtccctgaacatcaaatatagcgactggttcaaccacatcatgttcacctgccgcgtggatcacaggggcctgaccttctgcttaatgcgtcctccatgtgtgtccccaatcaaaacccacccttccgggtcttcctcatccccctttcttttgccttcatcttcctcaccaattgctccaagttgacctgcctggtcacaaacatatgctgataagacatcgtgagcatcactgggacccgtcaaaatggataacctgtgaaaacccat

SEQ ID NO: 17023 - DNA, 622 bp, Homo Sapiens
tgatgctcaagtaaggaagagagaaagatagttaggcaacttcaatccaatggtctactagtatctcttggatagagatgggtgcaaggtgttatgggaccccatctcacttagtctgtggggttcaggatatggcttcatgaagaacatgacatctgtcccttcataagttgttcgttctgcttagaagaaatgtgtacaaaaattacaattgatattagtatttcatttatttactgttattcttcagtgcctactacatgtcagacagacccttgctaggatcagacatgcttctggatcctctaggagattacaatctagttgagaggcagatacattaaaaaccactataaatcacaatgaattaatattaatatctataatacccgaagattcttttcaatctagaaatgttttggtttagtaactgctactgaaaataatttataaaaggaaatagaaagtatctcaggggaaactaccctttccttgactactgatctttttcactgatcttatcaaaattaaagaggctctgccctgaaggggaattgctgtcattaatacttaaagtatgtcgctaagatttaaagtaactcaataaataatctaccagact

SEQ ID NO: 17024 - DNA, 571 bp, Homo Sapiens
gcacgaggagcacatggagggttttagaaatggcagtggacatgcccggaagtttgcccatgatgtggcacccatagagtctgagatgggagcctgtgctgtcgggggaccacaggagggcagtctagcaccaggagagggttggcaaggatagcagtatttgtccacgcctgtccagtgtcttcagggccccatgctcaggggtcatttgctgtgtctgcgtctctctcactctgtcagtgcagacaaagagctgcaaacacagccttagcactttgcttccagaagcaagttaaaagtcacctagaccagtggggacccacgggagtggccatgactgcctcttggtcacccttccatgtttgagaggctttatctgtcaaactaaagcaagcaggaattccttttctctctcttttagacacatgtcaaccagaattctgagcagcctgtgagagacgcaattagcacacagatgatagaattatagtccaagcaaggcaaagtcagtttccaatgagccaatgtgcccttgtcacaggccaatttataacttaatgattaaaggttt

SEQ ID NO: 17025 - DNA, 808 bp, Homo Sapiens
gcacgaggatgaaatgaagaaaaccttttgactgttttttaaaaatcctttttcttttctcaagttctagggggcatttgcacatatatttgtactcaacatttcatgggaaagcggcagacctgagctgaggaacagcgtgggcagggagggaaagacccagggtctggacacttcctccaacacaaaacccttccccacccacctcctgctccctccccctcgcccaccattgtaaaataatcagaaacttgttctattttgtggcagtgacaatagttttatattaaaagaaaaaatacagttttcatacagcaaaatctatacaatatcattgttttatttaatataaagatcgctacccaccttccttccatggttcccaccctccacgttattttccctttctgcagcggttgcactacaggtagctactgtgtattatggacaaatgagaaatgaattctttttctggctgtccatctattttatttcaaataaggaaaagtgtatttggattttgtgtaaatacatctagtgatgacattttttcaatgtttttaaaaaccgtgtacagtactacatgtggtagagcgttttctcaaattgtctattgtagcaaaaatgtttttgtcgtaaacctgttttgtctcctttttttgttctcttgccacttctctcctcttcctcctgctcctggttcccttctctcctcccacccccacaaccagtaccaatgtacatagtaattgtaatgttttagactttacagaaactttctctgtattctgtatataaaaacaaaata

SEQ ID NO: 17026 - DNA, 801 bp, Homo Sapiens
gcacgagggccggcatcacagcagaaatcatgtacgactggtcacagtcccaagaggaattacaagagtactgcagacatcatgaaatcacctatgtggcccttgtctcggataaagaaggaagccatgtcaaggttaagtctttcgagaaggaaaggcagacagagaagcgtgtgctggagactgaacttgtggaccatgtactgcagaaactgaggactaaagtcactgatgaaaggaatggcagagaagcttccgataatcttgcagtgcaaaatctgaaggggtcattttctaatgcttcaggtttgtttgaaatccatggagcaacagtggttcccattgtgagtgtgctagccccggagaagctgtcagccagcactaggaggcgctatgaaactcaggtacaaactcgacttcagacctcccttgccaacttacatcagaaaagcagtgaaattgaaattctggctgtggatctacccaaagaaacaatattacagtttttatcattagagtgggatgctgatgaacaggcatttaacacaactgtgaagcagctgctgtcacgcctgccaaagcaaagatacctcaaattagtctgtgatgaaatttataacatcaaagtagaaaaaaaggtgtctgtgctatttctgtacagctatagagatgactactacagaatcttattttaaccttaaagaactgtcgttaacctcattcaacagacagaggcttatactgggaataatggaatgttgtacattcatcataatttaaaattaaatttctaagaagagg

SEQ ID NO: 17027 - DNA, 625 bp, Homo Sapiens
  misc_feature (81)..(99): n is a, c, g, or t
  misc_feature (453)..(503): n is a, c, g, or t
gcacgaggctttctccagctgggttctgaattctgtgtttgtcacagtaatgcactaaggaaaaaataagcatctgttcannnnnnnnnnnnnnnnnnnctgatcaccttttctctttgttgttattctgtaacactgttcggcatactaagcctccactgctggatcaagctttcgggaatttaccctctcactgcaagcccggtgggcctgcattctcacacctgggttaattccctggatcctaaagctcgaggttgggtttcattttggtctgctcctcaagcatcaaaaatttttgtctatctgtggctctaataattttttttccttatccttttagtttcctcttttctaatcctctgccaggggctggtctatttctaggtggatttggcttaaagccatcttagccacccctctcacactttcccagtgtgtcctagcaaaggnnnnnnnnnnnnnnnnnnnnnnnnnnnnnnnnnnnnnnnnnnnnnnnnnnncttccatttattctaattgcatctctatttatactgtctcaaattttctttaaatgagtatttatctttgacctttgtttctttatgtgggaacatttttttaaggagcaaataatctgccc

SEQ ID NO: 17028 - DNA, 399 bp, Homo Sapiens
gcacgaggatttataaataagagattagcgaagcctgtttagtatagtggggaattgggagaaaagttttcttttcaactctttgtatttgagcctagctcaattttactcaggcatacacaaatttctttttgcatcttttaaatatgtgttttcttctaaaaagatatcccactaatgtgcttcctgggacctttccttagagaagtgggaggagattcttcaagtgcaattttgacttaaagttcatagaatgtttatgttcttctgcacagttgccccagtatataagttttctttccataagtatctcagaaaaatgattccaaatcctaattttgtggaaactttaagggtcatgaactttttaaaaacttaaatatatttaatttaaaaagg

SEQ ID NO: 17029 - DNA, 467 bp, Homo Sapiens
  misc_feature (52)..(142): n is a, c, g, or t
gcacgagggcctccggagccggcagcgtgagtggccccgcgtccccgcttcnnnnnnnnnnnnnnnnnnnnnnnnnnnnnnnnnnnnnnnnnnnnnnnnnnnnnnnnnnnnnnnnnnnnnnnnnnnnnnnnnnnnnnnnnnntgccctcggtcccgtgcggtccccgaaactccgagcactcgcccggtcccggcgcggagcccctcggcggcgcgtggagctgctagtcgcccgtttccggatgcgcacactggccagttgcggcggtccatctgccggggcagcgggggctcggcgggagggttgaggctgaatcactcgcagcttgcgggcggcgtaaacgtccctaaagccttgccgccctgtgaaccgggctgcttcctgggagaggattacattatcttcctgctccacttgactttcttccggaatatctggtctcgcaggatcgggtccaagactggaa

SEQ ID NO: 17030 - DNA, 821 bp, Homo Sapiens
gcacgaggaaacattctaagtgaaatgagtataatccaagtaactggtgaactttggaggtttggagcttgaagagaatggctaagaagatttgaattatagggagggaacagaaatcatacatgaaaaggttttactgagaaggggaaaaccttagatagagggacatgtgaaacaaaatcatttgaaattttgattcagacatccatttccagtggcaaacagcaaagcctgaacccataaacccaaatgataggtgaagttgggtggttttatccaatgtctcaagcaagcaatgtctgggaatatcatagagtaacaagtgctggtcagccaaagaaacattcactgctggtgaaccaataccataagcatgtattatctaagcacttgatcaagaaatatacatgttgtacaagctctcaattttgttcatttattatcaaatttttaaaatacaagtttggtatgtgatttggaaaagatgccttctggatcttaagccagttgtcagtggaggtcctcagggctgcaaatgtcaagacataaccctgttcctcaccatcatgataccagatacaggtgaatacataggaactatctgcctgtgtcctcaatctcccttcaaacaagatgctgatttgtagggtacttggcaggttaaattaaaccagaagaggtgacttaataaaaaagggaatgacatttagggtataaagatctcataagaaatgtaatatgtaaattatatcttgctttatgttgtaaaatatacattgtttgcgctagaatagaaatgatttcttttcaataaaaagaaa

SEQ ID NO: 17031 - DNA, 703 bp, Homo Sapiens
gcacgaggtatacaaaggcctcccaaatgtcaatattccttaggcacctttgaaatatttataaacttaatctttggactaggcatcctaattgtaattccatatcttaaagaagcaattctaaatataggaaatgcttcacaaatatggttgatttttgcagagttacctataaaagcaaaaagttataaacattgtaaaaccaaccataggaaactgtattaaggtacattcacttgatagactatcatacagcattaaaatgatatttataaagaacttataacaatatgggggcaaggtttatgccatattgttaagtaggaaaataactgaatacaaaatcaaatatgttacatcaccattcaaaggtataataatgacaataaaaagaatctcatcaacatggtcggaagaaatacaccaagatattaaaagtaattgttaattgaacaatggcatcgtaggtgactttttctctctacttttctgaaatatccaaattttttacaataaacatgtatgtatttacagtgaaagagagaacagtgaaatttctttttaaaaatacttgaaaatgatcacaaaaatgtgccaacatttcaggtaagaaatgtgtttttatattggtctgtatacaaatttctatccagctgataaaaataacttcaagaaattaaacctattcagaaacaataaaaaa

SEQ ID NO: 17032 - DNA, 310 bp, Homo Sapiens
  misc_feature (171)..(207): n is a, c, g, or t
gaaaccattcccgtaaaatctttggcgaggggatcacatatcacacaggggggggaacagcactccccctgctacctgccgtgggggcaggggcaggaatgaatggcttctcctggggacaggccacagttaaccggtgacaattgcagaaccctaagaattccttctttnnnnnnnnnnnnnnnnnnnnnnnnnnnnnnnnnnnnncctgagtataaaacctccgcagtgtttccgcactatctcggggtttaaatataaaaaggcatcctgagaaaacagttaaaaagataacagcagcagggcgcca

SEQ ID NO: 17033 - DNA, 237 bp, Homo Sapiens
gtttaaagtgaattttaccatcatcggcctattggttgccaatgagctgatttaatcagtggttccctcctgttttcactgtctatcttccctcacaagtggagtggcacttttccgggaaggtgcgcggcccctccatcttgtttattttatgcttctaaacggatatgcatctgcgcatgatatgctacatgggataattgctactataattttgcccctggaaaatgatcagta

SEQ ID NO: 17034 - DNA, 544 bp, Homo Sapiens
  misc_feature (356)..(385): n is a, c, g, or t
  misc_feature (387)..(459): n is a, c, g, or t
gaattacccatattctctttgtttttgtttattcacattaacctttattctatctggaatttattagagtatacttttttctcaaataatcaattgtcctagaaccatgtgtttctcatttatttgaaaggccatctagtgagagatttctccaaatgttggggtagggaagggaggggaagcactttaaagtctgagcctttagaggtgattcctcaagaccctgcttaatcctaacaattttcctcattagtaaaagtcagcccaaactgggggcttgttaagatccttaccagccacatccatctgaaattatgaatttcaaagtatcttacaaatttggtgccacattatcnnnnnnnnnnnnnnnnnnnnnnnnnnnnnngnnnnnnnnnnnnnnnnnnnnnnnnnnnnnnnnnnnnnnnnnnnnnnnnnnnnnnnnnnnnnnnnnnnnnnnnntgggttcacaccattctcttgcctcacctccaagtatctgggactacagtcgcccgccacacgccggctaattttttgtattttt

SEQ ID NO: 17035 - DNA, 334 bp, Homo Sapiens
  misc_feature (84)..(130): n is a, c, g, or t
  misc_feature (155)..(166): n is a, c, g, or t
  misc_feature (215)..(229): n is a, c, g, or t
ggggggaaaccccgacctttattcctaaatttccaatttttgaattttttgaaaatggccgctttgtagcggggttgaattccnnnnnnnnnnnnnnnnnnnnnnnnnnnnnnnnnnnnnnnnnnnnnnncccctttctgggacccttaaaaacnnnnnnnnnnnncttctattttgaaatttttaaaaatctcccccctttaacttttttcctnnnnnnnnnnnnnnnttatctaaaaacgtggcccccaaaaaagggcagggggtcttttaaaaaaattcctgggccccgaaaggaaaaaccccaactaatttttctcccttgggggccttt

SEQ ID NO: 17036 - DNA, 616 bp, Homo Sapiens
  misc_feature (255)..(280): n is a, c, g, or t
  misc_feature (321)..(378): n is a, c, g, or t
ccattttccacctttaaaatgtaattgaaaaaacaaacataaagttgtaaagatctgggttatcacaaagtaatacaagagttttttaaatttttgtcatattcatttgaaaaattccaaattccaaatggtcaaactccattatatctaataaagagtgacaaaattttctgatgaattcactgttttgctaccaaaattcaagctgccccaaagttttcttcccccattcccggggctgtccacagttctttnnnnnnnnnnnnnnnnnnnnnnnnnngtaggtattaggaattgctgtcctctaaggtagtattacannnnnnnnnnnnnnnnnnnnnnnnnnnnnnnnnnnnnnnnnnnnnnnnnnnnnnnnnnatcgggtaaagataaaaagaaagaaaatacaaattaccaacattagggatgaaagagggacattactgtacctcttacagaaattaaaagaacaaaaaataggggaatattgtgaacaactttatgctaaccagtttaacaacataaatgaaatatacaaatttttttaaagattcccattaccaacacagttgcaaaaagaaaatatgattagctctattatccattaaagaaattg

SEQ ID NO: 17037 - DNA, 335 bp, Homo Sapiens
gcacgagggcgcaacacgctaacctgactgtgccgtttgggtgtctgggtaacatttgtcaatcacccattgctcaaaccgttttcaagaagcttggaaccgataaatagatctcatagaattggagggtagacctatctggtacttcttggtatgagatgcggaaacccccagagaacgcagggcagattcgcatgaacaggctggcattccccagagccaagttgcccggcagattaccaaacaaaattttttcccatttgagtttatattatgtatggatgaaagtcatatgatagattacaatataaaaagtaatcaatttaaaccctgca

SEQ ID NO: 17038 - DNA, 231 bp, Homo Sapiens
cccaaaaaagatcccccgggctgcaggaattcggcacgaggcccccaccaactcctccttactaccacacaaccttagccaaaccatttacccaaataaagtataggcgatagaaattgagcctggtgccatagatatagtatcgcaagggaaagaggaaaaattataaccaatgttaatatacctggggctatcccctataccttctgcataatgaattaactagaaata

SEQ ID NO: 17039 - DNA, 418 bp, Homo Sapiens
  misc_feature (141)..(201): n is a, c, g, or t
  misc_feature (214)..(223): n is a, c, g, or t
  misc_feature (266)..(275): n is a, c, g, or t
aaatgtttaattttacaaaaaaaatattttttaacccccaaatttctgggggctaatttcggaaaaaaagacaatggaaaaattttaaggaatttcaccttaaaaaaattttttatttcccaaaatacttttccccttgannnnnnnnnnnnnnnnnnnnnnnnnnnnnnnnnnnnnnnnnnnnnnnnnnnnnnnnnnnnnctgggtaagcccnnnnnnnnnnataacccccctcaaaattttaaaaaagtggaaccccccggggnnnnnnnnnnggtaacaccctattatttttcaaaaacctgggcaaaaaggcccccatccgaagtttttggaaaattttcgggggcatgggaattaatggcctttaaaaataaggtaaacccaacaaccacctcctttcttaataaaggggggg

SEQ ID NO: 17040 - DNA, 406 bp, Homo Sapiens
  misc_feature (126)..(200): n is a, c, g, or t
  misc_feature (242)..(258): n is a, c, g, or t
  misc_feature (288)..(354): n is a, c, g, or t
ccccaaaatgggcccgggccccctttccccccaaaggggggtgaattaccggggcccccgggccggttttttaaaaagccggggaggggaaaacccgggggtttcccaatttaaaccccttggaannnnnnnnnnnnnnnnnnnnnnnnnnnnnnnnnnnnnnnnnnnnnnnnnnnnnnnnnnnnnnnnnnnnnnnnnnntgaaggggaaaagggaacccccctggaacggccctttaaacnnnnnnnnnnnnnnnnntaacgccaaggggacccccaacttttgcannnnnnnnnnnnnnnnnnnnnnnnnnnnnnnnnnnnnnnnnnnnnnnnnnnnnnnnnnnnnnnnnnngaaagcttaaaaagggggggccccttttgggttccaaatttgtggtttaagg

SEQ ID NO: 17041 - DNA, 309 bp, Homo Sapiens
  misc_feature (185)..(208): n is a, c, g, or t
  misc_feature (217)..(232): n is a, c, g, or t
ccaagcgggatttacccctttgaaacccaaaaaaaagtggcccccaaggggtaaattggttattcccaaaaccccttttaaaaaaccttaagggtggttcttgggggccggaagggcctttgcccccaacaattttgtggggaaaaggacaaatttttggtctttatcttcaaccccggtttcannnnnnnnnnnnnnnnnnnnnnnnttttgaaannnnnnnnnnnnnnnnttttctgaaaggttaaaaaacctccccccttaaattttaattttccaccccccggcaatttggggttggggggaaaa

SEQ ID NO: 17042 - DNA, 221 bp, Homo Sapiens
ccttcctttcacggccccttctccggctttccccgtccagcgcggctccgggggctccctttaaggttcgtattccgcgctttttgggtcctcgaccccctcaaacttgattagggtgatggttcgcggcgtgggcccccgccctgataggctgtttttcgccctttgaaattggactccgcgtactttaatagaggactcgtgctcctaactggaacaag

SEQ ID NO: 17043 - DNA, 282 bp, Homo Sapiens
caaatatataacagattggaaggaagaataaaaactgtcttttttttaagcagataacacgactgtctatcaagaaagttccaaagattctactttgaaaaagtcaacaaaatgggcattctgaaaataatttgtagtataacaaatttacaggatacacagtcatgtatatatagtattatatgaatacatagtttgtattgttactatatgtataatttgtaccattactatatatacagtagtatagcaaagttacaggatacacactgtctctctctc

SEQ ID NO: 17044 - DNA, 642 bp, Homo Sapiens
cctaattggtaaccactgcagtatgctagtgaactgactgctatttctaaagcttgcaaataaatatcctgccttttctgtacagaattggttaaccaaatagtcaatgagacgtttctcatcatagacattttccagctaattaatgaagaaagactgataggctatccccatttttcaaccctgataaatttatatatggatgtaacatcacaaaaagagggagaatcagacattctgtgcctcccaatagaagaacagacatctatggcagggctagggttgggatgagacaagtgaaacacttagtaatcaagataaataataatttaatgcagctgtgctgagctttattggagcctgaatcaaaagggaatatgtgcattcctatattcatatttttatgttttttaaaaaatgggtaattggtaatggttttaatgaaaatattactggtgagatttcttccattaaagtgagaaaagtaaaatgataagaaattaagtttagtataaataaaatgttcagtcttaaatgtagtgattttaatatatactttcagattttccatatttttaaactcatattctgggaaaaaattaccattaagatataataccaaaacatgcatccatgtttttt

SEQ ID NO: 17045 - DNA, 886 bp, Homo Sapiens
  misc_feature (646)..(688): n is a, c, g, or t
  misc_feature (700)..(817): n is a, c, g, or t
gcacgaggcataagcatcatgagcaaggaatccagtgcttctagcttaattcatagctccatctaatcctctgtgctaagtgaaagctcagtgttgattgactattgttgctcacaaatactatgtactaaaaagcagattattttagtgtcttacacttcagcatataaaataaaggcttcattaggatagtaaaagtgctgttgagttaaaattcatggattaacaatagcatgttatgtcttatttccccatcaatttcttgctttcgctcctaaaatctaaaagcaaaaaagggccacattgtttaaaatgcattctccctaaaaaatgctatatgctataatcatatctgcctcatccaacacgagtaactactaaattaaacgtctgttttagctgatgtctgaaaggccattacctcatagttgattggcaaaatatgagttcataaagaattttcctttctgcttaggaggataaagcaatacaataattaaaggatatctaatatgcaaaagtctatatttagggaaatattaaatattctctttaaaatgttcaaatgtcatacatatgttaatgtatccaatgctttgaaactttataggggcaatatagggatgaaaattaaaaagcagtgacnnnnnnnnnnnnnnnnnnnnnnnnnnnnnnnnnnnnnnnnnnngctgagtgtgannnnnnnnnnnnnnnnnnnnnnnnnnnnnnnnnnnnnnnnnnnnnnnnnnnnnnnnnnnnnnnnnnnnnnnnnnnnnnnnnnnnnnnnnnnnnnnnnnnnnnnnnnnnnnnnnnnnnntgataaccattgacatttttctattacaaacttaaatctaaatttcaccataatttaaacaaaaagcaa

SEQ ID NO: 17046 - DNA, 207 bp, Homo Sapiens
gcacgaggaaatggtagtgccattttcctctggcatgaaagaataaaaagaaacttgcctaaggcaatggaacaaattcattcgcgaagcccattcattaggttaactacttattgagaacatgtcacatcctaagcaccctggggatttaatagagaacaaaacacaaagtccttgtcaccaagattgtgttgggggtaaaaggca

SEQ ID NO: 17047 - DNA, 997 bp, Homo Sapiens
  misc_feature (227)..(256): n is a, c, g, or t
gcacgaggctttaagatagacacattttgcatagagtttcatgaggccatagaccctttaacacctgaagatgctgcagcagtgcccccttaacacctgagaagagtgtaggaatgttcccataactgtttgcttgtcgttgcagtttataatgcagttatttggttgccctgatattcttgaataaagtgggaaaacctgagggcaagagctttgtcttcttcatnnnnnnnnnnnnnnnnnnnnnnnnnnnnnngaacaaaggattcctattccccacattggaattttccacattcttttttcccctccaaaaatacttgagttttagcttttatagtacttttagtataatactaatttcagatatactgtgttttttaattcagttgggagatgatggatgaaaaagaattttttattgccagaaattttgggatttttaataaaatccattagaagtttaaaaagctaacttatagatatgcatttgacatttagtgtggttataatttggagtttgcccgataagcatctgaccatccagattgtgttctaaaataaagtggacattccacatgcttataggagtgcactgtgaaggggctcaaggtggcttcaggttgtgggtgtgcttagctggctctgtggtctctatactggatagggtcaggtggtgacagagagacagaaatctacagctgtctagtcaaaaagcttcaacttccacctcaacaaattctttgttgttgttaatagtttttttctaaggatagcagagggtttccccctgaccccaggcagtgctaatgaaatgaccacaaatgataaaatgttcaaacagtgcagtgttttagacgataaatcagcaccagtacttggagtagtttggtagttttatcatcagccctgcagggatctctttcttacatctcacatccccggtcccagttaagaagaccaaagagctaatgttttatttgtgggaaggttttac

SEQ ID NO: 17048 - DNA, 879 bp, Homo Sapiens
  misc_feature (227)..(525): n is a, c, g, or t
gcacgaggaacctacctctggatctagttaaaaaatctctaaaatactccaaggttatactttctataaatttcaacctgatagaagtaaccttttagggaaaagaaagtatataaagcccactggtgccagatcaatccaccaagcctgcctggcctgaccaatttctggtccacaaataaaaaatttgaagagaaacttgaagaagtatcaaaagaagcatttannnnnnnnnnnnnnnnnnnnnnnnnnnnnnnnnnnnnnnnnnnnnnnnnnnnnnnnnnnnnnnnnnnnnnnnnnnnnnnnnnnnnnnnnnnnnnnnnnnnnnnnnnnnnnnnnnnnnnnnnnnnnnnnnnnnnnnnnnnnnnnnnnnnnnnnnnnnnnnnnnnnnnnnnnnnnnnnnnnnnnnnnnnnnnnnnnnnnnnnnnnnnnnnnnnnnnnnnnnnnnnnnnnnnnnnnnnnnnnnnnnnnnnnnnnnnnnnnnnnnnnnnnnnnnnnnnnnnnnnnnnnnnnnnnnnnnnnnnnggcagcatttacaacctatctgggagacctctagagtcgatactggagaaagtgctgaaaatgaaaaatctctgagaatacaaaatagtcctgttcacaatggcatccaagggctcaaccaccaagtaatacatgtcagctctaaactaggacttcagctgattttataaaaggaaatttgggttgaaaagggtaggtaaggagagaatggaacactctgaacataaagtaaagctgctgttgtgcttttcatatagtaggtcctgtgttttatccctggggataagatagaataaaacacattttgttcttatgttgtgattttgaagggccagttctaatttttactttaaa

SEQ ID NO: 17049 - DNA, 273 bp, Homo Sapiens
ggtatttcactttatttagcaaacggtcacactcggccccaccacaacgcgcctgccgcctacttgagcatctgtctcaggaagctcctcagggtgaacaggaaggcctgggtttccctgttcaagccttatccgtctccacacgtgccacaaacctcaaaacaaaatcacttccccacgtcctcaggagcccaccccagtgtggtccgggggaccctccagtgttcaacagctgcctgcaggggccacatcccatttgtagaaatagacccc

SEQ ID NO: 17050 - DNA, 608 bp, Homo Sapiens
  misc_feature (543)..(552): n is a, c, g, or t
taaaccaccactcctggccaatgatcatgaattctagggagaaagtccagcacagcaaccatcctgtgatccatcccttcatctctgaatgatcctgctacttaccagctattgctgttgtggtaggcagtttctttaaccacctgaataatacacaccttaatttctcgggcagaggatactggctttttccattacctactgctggctgtcagcctttccagaattacttggtggcaaaagttcaaaaggttctagaatggctactcatatgccaaggtacaaagtctgtccagttcagaacctaacaagctgactaaaattcgattcctgcattattttttctctaactggggctctttaagaaagtggcaaatgatgttcacaaaaacacacatggcttcaagttgacattctctcattttctgtttccttctgctataacacttagttcacaatcacctgtcagtagcatgctgctatgaggctcctgacgcaaccaaatgaaaggtgattaagagtcttgtgcactcacaaaaaaannnnnnnnnntggtcttgacaatactgaggcctccagacgatgaactacacctcacccaccctttt

SEQ ID NO: 17051 - DNA, 351 bp, Homo Sapiens
gcacgaggctccttacttccaacagtcacccccgttcaactcgacatattttatctcttcttccaatgccgagttatccccaccttggcaatccggcatctacgaggctcttctggagaaggacagaaactcggaccttactgctcattccacgcactagaatgctcccttcccctacgcatctgactatgttggtggccggaaagcctacgctcactttgttccctttcctccactcacatcgttcaagaactaccaaattcgggaaccaaccactttgtatgactagtttactgggaagcttgtattctttatatacctcattacagattcgccttatgactccctaaa

SEQ ID NO: 17052 - DNA, 849 bp, Homo Sapiens
gcacgaggcttactgtttatgttttcatgcatctataccttatgttactaaatcaaagtgaccagttccacattatactacaagtttcactgtgtaatgcataagaattacacagagggaagggcctcaaaaaatgcacttctgaagtattttaatgtaaaattatttaagaccataaagtttcatgaaagcctaatctttctggaacctacacatactctgcatgtgaaccagagttaaactagtcaagtattttaatactgaactaatctggaaaaacatcatttaaaaaattactgtatttatgaaggaagaatataaaatctgttaaaaacttaaaacatctaaaataggtatgaagagaggcttatggtgctcattttaacagcattcttgagtaggttaccttgcagtcaaagcatctgctccagaccagtgttttaaactgtggattatggtaccactatgggtcatgaaattaatttattgcattatgactagcattttttatttaaaatagagaaaagaatagaaaataaaagcgtacatcacagatggtaagggtatgtgtttttaagtaaacatttgttcatgtgtatatgtgttagattaccttgtaaaacatattccttattgtgggttacaggccaaaaaaagtgtttgtttttgtttttaaaaatctacagttcagattttccttagaaaatggggaaaaaaggaatgttagaaagatctgactgcctatgaactagtgaaggattttagaggaagtaccaggctattttagagatctgatactggtttcagaaagtaatcttaagcaaagggtacgaaataaagttatgttgt

SEQ ID NO: 17053 - DNA, 400 bp, Homo Sapiens
  misc_feature (56)..(99): n is a, c, g, or t
ggtagagacaggatttcaccatgtttgccaggatggtctcgatctcttgtgctcannnnnnnnnnnnnnnnnnnnnnnnnnnnnnnnnnnnnnnnnnnntgagccactgcgcccggcccgttggcttgctttctagatactgggaatagatcttgttatagtatgtgataaatagatcttgttatagtatgtgataaaatgccatgatcaaataaattacttatatcctgtttggtgatttttagaaaaacatatttatctacatctaaaatacttattttaattttaaacacttgatggtatgaaatgaaattttgttactttaccattgtaactatgtcataaagtcataaagtacctgtccccaaaaaggcaaccagtaaatatttttgagtaaatg

SEQ ID NO: 17054 - DNA, 856 bp, Homo Sapiens
gcacgaggaaagtattattttcaaataaaatggagaagctggtgaaaagtcatattggcaatttttatgtagtttaagtggaattaagcagagggagatgcttttgggtttttaatatgccacttctgagtgaaaacatctcgtggagtcattgtgttcagctctgagaagaacaaagattcatagttctgtacatgtggctggatttaaatatcctgtttttgatactaattttgaaagtcatgtaacttcttttgatatctgggcaaaagtaaccatatgctataagcatttgaatatgtttaattttatcataatagcatctgtaaaagtacatcttacacattatatagagggttcttgtttgaaattttcagttctctttatcttcccagtacctcttggtcctcataatgggcaaaggatacaacgaaggcaggttgtataggggttatagtggggaagtggataggggattcattttcttatatgacattttgccttaagaatataaaagtgctttagcactgatggctggcatttttaatataggcagtgaaagtgactttagaagcatgggatgaaatagagggaagaagagtttttgagacccagagaaatgcacagagcttgagcaaaggcatgaagtccctgacattgttttcctttttgtctcagcatatagtattaagatgcctagaaataggactctattgttctcctcttgtataggcactttacatttcttgttgtcactacagcaaccacatacagtacagacaacctccaaacctgtttatattagtgtaaatagaaaatctatagacaactttctagttttctctggaggcatttt

SEQ ID NO: 17055 - DNA, 405 bp, Homo Sapiens
gcacgagggcccagatggcggcttcccgtatgagcggtcctattagcggcgctcgctggcccgaggattcctttatcacgttcggcaatgacgtgacgttacccaacaaaatagacttggttctaacttccctttcgccattgaaagactgacccgtcctggttcctcttatttccctttgaacccatttgaggttcttcatatagatcgtgaagttccctatgacgaaatattaaacacgtttcgggtgttgtccatcttggtgcagcctgacacacttgccaatgatgctgacccagctcctttcgcttttgacccttcggatcacgcttacaacttgcgattggatcatgagcaacagaataggggcctggatgtaattctcgcattaaaagaatacctgga

SEQ ID NO: 17056 - DNA, 384 bp, Homo Sapiens
gcacgagggtcggcggctgctgggctccgcgccggggtccgagtcccacgaagccccggcccgagccgccggatgcccgcgcgcagcggggcccaggtgagcgcgcgcctcggccgccccgcggaacagacgcgcccacccccaggcgcagcagcgagcgcggccgcgggagcgggagtgccggggacgggcgtagcgcccaccgccccgagggttcggggcagagccagagcataggccaagggccaagctcgggccgagagcagtggccgcagcgcccgggggctgaacccacggcgcgctggcagcgcgggccgagctgcggagacggtcacgtcagcgtccgttccaggccgactggcagtctccgttctacattaacgt

SEQ ID NO: 17057 - DNA, 292 bp, Homo Sapiens
gcacgaggctcaaactcctgggctcatgtgaccctcctgtctcagcctccctcagcctcccaagtagctaagacaacaggtgcataccaccgtgcctggcctgaattgtcattctttatgtcttataatacttttggttttaatgtcgatttcatctgataggagagctatacctgcttttaaaaatttctacctacttatctgcttttttagtattttaatgaatatatttttccatccttttactttcaacctttctgggtctttgtatctcttgtaagcaacgtacctt

SEQ ID NO: 17058 - DNA, 710 bp, Homo Sapiens
  misc_feature (217)..(226): n is a, c, g, or t
gcaggaattccggcacagaggctgggtcagttgcccttatttgcccttacctgacatttaaggcatatattgtgcatctttgtaagtaaatctgtgtggatacaatatagctttttgaatagatgttgattttggtttctgaataaaagtttctcttgtgatgaacctcacagtggcaaaatgtagatatgagaaggagaaaaccatttcttgagtnnnnnnnnnngatctcacggcagcaaacttccaaaggcctttgatgtttgccattttgttgtgatagttaactaatctataatgtttgggactattgagttttgtgatttgacatttgttgtattggaatctgatctgtaaactagtagcatggcttgatgtagagctttgactaaagagactgagagaatgaagactaggaaataaatttttactatctcttctcaaatgtttgtctaaaattagtcaagaacttcatttcattaaaaacgttaaagtttttttatttatatatgacctccaaaaatgattgaatattttttgaatacaaattctgtgccagtcaacacaccagctttttacatgattatctcatttaatccttaaacaacctcatggaatagatgttatcttcatttacaataatgaacattgggttcagagagagaaatatttttgttcaagaccattttttccagctggtaaatacctga

SEQ ID NO: 17059 - DNA, 872 bp, Homo Sapiens
  misc_feature (405)..(449): n is a, c, g, or t
gcacgaggcttcttcctgaggattagtctaaagaaagtaaatcctaggttatatatcaggcaacatgaatttagtcaaaatggcccaaacagttagattttcctactgttgtgtgcctactatatgtttaatatttagtaagtgtagtaaggtataatgatacttaaatctacttcctctctcaaggatattacaatcttatttgggaaataaaactaacataaaataattcacaatacaagacaatagaaagctaaatatcagaagatcaactagggctggcccagcctggaaaacttggtttgggaagacttaaagagaaaataggttttttgagatggtagaatgtatatggttaaattgttgagggcaaaggtaaactcttgtgcattataattctgtcannnnnnnnnnnnnnnnnnnnnnnnnnnnnnnnnnnnnnnnnnnnngagtagatgatgaagaccaggtgaaggggctaatgagagggagacattatcgatgtgtaaaacagtctgaacaaaaatggggaggtaggaatgaacatgctatttcagagagaaaataagcctagctggcccagagggtaatgttggcaaacagcaggaaattaacttcagtagacttactgggactaaattgtggagtcccaggctcaggagtttggaattcatcctgtgggcgatggagaagtattacaggcttttgagcagatgactcacatggtgtgtaatagcagttgactagtttggtaaaataggagctttagaattgctgcttttgagagtctcagaattctacaaattgtttttaagtacatttatgctatataacaatatggaatcaagctacttgcacatttcatcctaata

SEQ ID NO: 17060 - DNA, 882 bp, Homo Sapiens
gcacgaggctaatttcaactgctacctttatcatatttcaaactctcatttaatttgtgtccatttctagactctattctggactgctgatgggcctgttgataggccagagctcagttattttaattatgtaactttatgatgcacttatctgtgtagcaggactccccctcatctccattacttaagagccaataatgggaagctcattttcacaaatgcagtcaaccaggggaattcatggcatggcctaagatctaaacactcttaagatttaaacacaggattagctcttgagttagacaggaagctggggtgtttgggactgaggcttcatcgtggcagctaataatgtcagggagcatgagcacttgtttcttccaaggctcacttcaaggaaggcagaatccaggtcgggggtgcacaggagttgccagctggacccaaggaccatttcgtatacatgtatgatcatactttcagggcatcttggaaaaactgaatttgctaactcaatagagaacaaaagagcaaataggcctaattcaagaatttttaaaaacccgcaataagaaacataatctaaaacttgtagcccagcccctcctccataccaaccaccaaaaaaacccactaacaccataaagtgtcatagctagagctagagtgctgttataagctgtgcaggccaaaatgggtttcatggcatgagttgggcagcagcgactcagtttccatgtctgagttaggccacctgtaacaatgcagccccatccatgtgaagctggtccagaggactacagctgcctgtcccacccttggctgtgctctcctttactaatccatagccaaagacaggggctaataacagggtctggagtc

SEQ ID NO: 17061 - DNA, 883 bp, Homo Sapiens
gcacgagggtcacctttccttctgtattctgtagtgtaataccttttagaattgctgcacagggatgcctacccacagtggaatgaaacttaagtcaaccctttctctcttcttgaccacatgtatcatgacacataggaacgaaattgtgtagcagcattattttaggctgatttacagtttcctgtacttgtttttatttcctggttttaaaacctaatattataaaattgtttgaggaccagttcagctgtcatcaggttgactttgagacctgtctgtagcctctgagaatcctatttctttctttctgagaagtcagctttagaagccccctttcacttctgggacagccgaagatatcctacaagtactattgctgacagtcaggactaaatagttcactcagcagttataaagtaatggtcactggaagtttactatcttctgaagcggcagcctttgctgctacggttcctcaattatctgccctattggaaatgggaaggaagagagaggttattagcttttcatagaaactacgttggaactcctattcctgttttgaccagatacctgtttgttacacattctggtgtatgcggtactccacgagattagaagtgcatattcaactgcagaaaccggaaccagcatggggagtctaaatgttaccagataaggtttttaggggcattttggttatagtgctaagcatttttggggaaaccgtaaagagggttaggataggtggtgggaatagaggctgacagcagttttcagatgtccgtgtgttcatgcacgcagtatgcccaggtaagttcaaaactttattcttaggctatttcgatcaaccctgccaggcattttaaattcttggtga

SEQ ID NO: 17062 - DNA, 559 bp, Homo Sapiens
  misc_feature (47)..(85): n is a, c, g, or t
  misc_feature (94)..(349): n is a, c, g, or t
gcacgaggagagagtgtgtgtttgtgtgtttcaaggtcagaacaggnnnnnnnnnnnnnnnnnnnnnnnnnnnnnnnnnnnnnnngaaatggannnnnnnnnnnnnnnnnnnnnnnnnnnnnnnnnnnnnnnnnnnnnnnnnnnnnnnnnnnnnnnnnnnnnnnnnnnnnnnnnnnnnnnnnnnnnnnnnnnnnnnnnnnnnnnnnnnnnnnnnnnnnnnnnnnnnnnnnnnnnnnnnnnnnnnnnnnnnnnnnnnnnnnnnnnnnnnnnnnnnnnnnnnnnnnnnnnnnnnnnnnnnnnnnnnnnnnnnnnnnnnnnnnnnnnnnnnnnnnnnnnnnnnnnnnnnnnntgagccaccgtgcctggccagaataggttttttctttcaacttgatcagtagaaaatggacatcaagtttgaacagataaatcatggacagccttattgtgattgaaatgcttgtaggttctgtgccaattttccaccactgtgtactttgttgctatttaaaactgtatcaactctaacggaagaataaattatttgtgattttaaaaa

SEQ ID NO: 17063 - DNA, 437 bp, Homo Sapiens
  misc_feature (59)..(97): n is a, c, g, or t
  misc_feature (136)..(193): n is a, c, g, or t
  misc_feature (290)..(325): n is a, c, g, or t
  misc_feature (367)..(392): n is a, c, g, or t
cttttaaaacaaaaatttccttgaaaaaccctacccctgtccgggtgcccttttaaaannnnnnnnnnnnnnnnnnnnnnnnnnnnnnnnnnnnnnnaaaatgcccccggccactcttttaaataattgccccctnnnnnnnnnnnnnnnnnnnnnnnnnnnnnnnnnnnnnnnnnnnnnnnnnnnnnnnnnnatgtttaccccttttcgggttgggccaggggccgaaaaatggcagcggggcatcaaaaaaaccctccaaaaaagttggacttgtttgggttggcccnnnnnnnnnnnnnnnnnnnnnnnnnnnnnnnnnnnntggatttcagggccccccggggatgtaactccacaggttttnnnnnnnnnnnnnnnnnnnnnnnnnntaaactgccccgttgaacatctgccaagggacctgcctaaaattc

SEQ ID NO: 17064 - DNA, 202 bp, Homo Sapiens
gcacgaggcacccagcaccctgggcaggggactcccgacgaccatccttggtgtgcacacaatctgtgctcagatgggagagctgggcccttcaaggcggcaggcgtctgggggtggcaagggagcagtgctcagtctgagcccagagggcaggcggctcccctgggtggagatgggccaagggggaggatgcggtgttgtg

SEQ ID NO: 17065 - DNA, 861 bp, Homo Sapiens
  misc_feature (502)..(582): n is a, c, g, or t
cgatcccgtgaattggtgcttatgagttaacctaacaattatcaaggatgtgtatatactgatattacttaaaagtagtaacagttttagataccataaacttgcatagtaagagatttgcatgatgctcttctgtttcattcgtgcctgttttgtttcattctattctgattttcacttctcagcttcctgctgttactgtttgtgcacacctgcccacagttttcttctcccttgactgttagctctctctgctgttacagacacagctttgcctccctgccaagcgatctgcctgtccccatagacacagctttgtttactttggtctctcatgtcatctgaacttataaacactatttctgtgtttgcacatgcgtgtatataaagcaggtgcctctgtcgcatagtcttgggtagttctggataatccaagtgttttgttaataggggattgccacttgccaccttgtcagttttctaagaagtgactgccttatgnnnnnnnnnnnnnnnnnnnnnnnnnnnnnnnnnnnnnnnnnnnnnnnnnnnnnnnnnnnnnnnnnnnnnnnnnnnnnnnnngcagttttagcgtgatgcccaggggattatcacgcacagaaaagttttgagaagcactttcctaaaccatactttaagttgagcctgtattctttgatgattaaggggcactaaatttagagtcttacagaaacttatggttttaagtatgaaagcacaacactattggaatgtcaaaatgctcattaaaattatacgaagagggggaaatattgactttattagaactgcagcaaatgtcaaagaagaacagtctgcctaagagtcattaaatgattt

SEQ ID NO: 17066 - DNA, 437 bp, Homo Sapiens
  misc_feature (148)..(274): n is a, c, g, or t
  misc_feature (318)..(372): n is a, c, g, or t
ggacaaggtattgaccaatcaactttgcaaatgtgtttagtgattaagactgaagacaaaaggatctgtacataagcactgtactctagttgataaaattgcttggcccataggagtttaggttaacaattccaatactgatacatgnnnnnnnnnnnnnnnnnnnnnnnnnnnnnnnnnnnnnnnnnnnnnnnnnnnnnnnnnnnnnnnnnnnnnnnnnnnnnnnnnnnnnnnnnnnnnnnnnnnnnnnnnnnnnnnnnnnnnnnnnnnnnnnagagttagattaataggtataaactaatatttagcttaatattnnnnnnnnnnnnnnnnnnnnnnnnnnnnnnnnnnnnnnnnnnnnnnnnnnnnnnncagattactctaaaaacatacatttccttactttgtccatggacacagtctagtagcaatgaaac

SEQ ID NO: 17067 - DNA, 344 bp, Homo Sapiens
gcacgagggtaaggctagcccaagctacttcccctggatagctgagcttatcacatttcatgatcacgccctccggtcattttccttatctgcttcctagacctgtatgcccttttcctaacgcgctgccgggcctaactaggctgaagctctcccacgctcccgaaatagaacccgcccgaactaccctgcccgccatctccgaagtcctcccagaactcgcatccctagtggtcctttctatggggactgcagtcaacgatcctgcccttaccagtcatcaattggccggtaccggtactgatttcataactacgttccctacggccgactaatcttcccct

SEQ ID NO: 17068 - DNA, 901 bp, Homo Sapiens
  misc_feature (730)..(783): n is a, c, g, or t
gcacgagggacctttttaagggttgagggaatttttagatgattctagtttgagagatatatgtaataatgctgacaagaacattatatatttttggtgtccatctgtgtacacaaagaaacatgtactaattccactaggaattaattttccaaagtggtagccaatttacactgccaccactggtgtataaaatctccagttgttccacatcctcaccagcatttggtaacgtctgtttcaatttttgccattctgatgggtatatattggtatcttgtttgggttttaatttacatttctgataaccagtgattttgagcacaatttcatgtttattggccacttggatatcttcttttgtgaaatgcctacgcaagtcttgcccagtttttttactggactgtctttttcacgttgatttatatattctagatacaacttctttttcagataggagagaagaaagaaaagcagagagaaagaaaggaaatatgtttttctacactttggcttgccttttcaagtctgttcatgtaatctttgatgaactgaagtcttattttaatgaagtccagtctacacatttttttcctaccccaaggtcatgaagatatcctacgttatattttatcatctcaacttccaatttaagacatatcttgaaatatatgtttgaacttatagtgtaacattttaacaaaattcttaccaatttttaagttttcannnnnnnnnnnnnnnnnnnnnnnnnnnnnnnnnnnnnnnnnnnnnnnnnnnnnngctatcatcaaagttttcaaagaaaatttcaaaataaatgttcttaaaagcacagaaagagggaatgtgaggggtttataatagcagtaccagtggtgttaaaagcatagacttgggg

SEQ ID NO: 17069 - DNA, 378 bp, Homo Sapiens
gcacgaggcctttctattaacgcttatggtcattacagaatcaagcatccccgttcccatgagttcaccctctaaatcggtcttatcaaaagggacaagcatcacgcacgcagaaatgcagctcaaaacgcttaacctactgccaaccccgctggaaacagatgtgattaacctttaacagtaaacaaatttttaactaaactatactaaccccaaggttggtcaatttcgtgccatccaccgcggtcacaggattaaccctcttcaatagaagccggggtatgtagtgttttctatcaccccctcccgataaagctaaaactcacgagagttgtggaagactcctgttgattcaaaatatactatgaaattggattt

SEQ ID NO: 17070 - DNA, 396 bp, Homo Sapiens
ccccgggctgcaggaattcggcacgagggtcttttttaaaaacgcttgtattttattatctgtttcattaattcaatatagaaaattttccaaaatggtttcgtaatcaaatagatgttcttgcatctgcataagtatggcaatagcaatgaaccaacctatgacaaaacacaatattttgagaacattctcatgcctttctttaaaggtgggcgcctatctaaacattttagatccccaaattcaccttaaattaaccatgaaggaaatttgaaaactcatttcaccgggaaacctgaaatagggaggacttcttatacattatatttataaattctttgtgaaagaagacccatgtcctttccaagcttccctctgccatcagccattgccctc

SEQ ID NO: 17071 - DNA, 824 bp, Homo Sapiens
gcacgagggtttttttaaacaatgcatgtatcaaattatctgtctcattagataactaggtagacttttccaagatggtttcaaaatcaaatatatattcaaagatcttccagtgtaaagcaataggaatgaaacaagccatgagaaagcagaatattttgagtatattctcatgcctttctttaaaggagaagcgcctatctaaacagttacagaaacccaaattcaaagtagattaaacaagaagtaaatttgtaaactcttttaactgggagacaggaagtagggagggctccaggcacaatatcattagcagttcaatgtgaacgaagacccatgtcctttccaagcctccctctgccatcagcattgccctccttcccagggtcacagatggctatcaatggcaaaactggggttccgcgttctcttctcctcatctggcaagagaaaatgggaaatctctatcccaagcttggattaaaaattattttcatttttgtgttccagcaaacttgggtcctatgcccagccatggaccaaaaataggcttaatgtgaatgttatgtgctgattggattaaaataagttctgactctgaatctgggaatgtggtcaccttcctcagagacaagttgagaggttggcttatctgaataaaagcagagaatatgagatgctggagaggtgttcattaaggagaacattctctgaggtgaattaacggttagaattatctatctctgtatttatctatccacccatctatcatcatcatcacctcatctccctcctttctctctctctaaatatatacatgcggg

SEQ ID NO: 17072 - DNA, 940 bp, Homo Sapiens
gcaagaggaagtcagatatttgggactgtccaggaaatctgggagatagtgtgatggtggcatagctctttctcatctgacactttttatgcttactcagagtacgaatgccaagtattgagacaatacagaataatatttgaattgagatattcctagaaagacaggtcaacatggctcttggtcaagaatgacttagagttccttgcctagtgctcagctggcttcatgtcatagttgaggctgggtccacaggtgggataagattccaccaaagctcaccaggctggtactgaccccagagtgtctcccaggccctaccttattttagcattcttttgaattgagtttcagaggtgattcagtagtaaatgtatggggagaagaattagaaaaacccatctctttttaagcagtcatcattcttaaacatctgaattgttttacaacagagtcagcaaacctttctagcatttctaaaagatggcagtttcttggagaccacatctttgcaaggcagtattttcaaaatataaaatagcccccaaaccaaacctttaaacatgaagggcaaatgggtaaagacttaatattctttttgtgtcaagtatacttaatgtaaatctagttgcttgtgaagtagtaaaatagtaatagctcctattattttgagcactgactatatgtgctcagcctctgtgcttggatctgacatcactatctcatttccttctctcagcagttctggaagggagtacctaccctgggtatgctttgcccagggtcacagaagttactgaattagagcacggattcaccccaagtgtaaaactcaagagctcctgcacttagggtttacttcactaatcatctaacctcatttattatgcttaagctttttctcagctgacctgactttgctttaggtcattctttttta

SEQ ID NO: 17073 - DNA, 237 bp, Homo Sapiens
aattagttgaaaaagatgtaattgccagtgtatcataaatactggtattttaaaataaagctgctttatcacttttaaggaaagcccttgtaatttagtgcattgtaatagtgtattgagctgatgtccaccatgatccatgtaaacataggtgaactatgcaaatacaagtttttcttcttgaaaatgttacatttcctctacaacactttatgctaataaatgtttatgaacctc

SEQ ID NO: 17074 - DNA, 461 bp, Homo Sapiens
  misc_feature (150)..(178): n is a, c, g, or t
  misc_feature (388)..(417): n is a, c, g, or t
gcacgagggagccaccatgcctggcctgattgtgtaggttctttatccactttgtgaaatacacatttggcatttcactgttttgataataaccatagcaaaacagtgaaagaaataatagatgtggtcatctattaataccaacctagnnnnnnnnnnnnnnnnnnnnnnnnnnnnnagacatatatattttgaagagtgtgatgggaaagtagataaacatgaccaactgcatggagttctgtggtcttggtaggtttgtagacctttaccaagagcctcctgggtagtgtgtgcagcaggtcacaggagtgccacgagacatagtccctttctgctcaagtattgtcttaggagcttgaaggagccaggagtcaggaaaagattnnnnnnnnnnnnnnnnnnnnnnnnnnnnnnctttgtactggaaactgcaacatcaactcttctatgggtctcca

SEQ ID NO: 17075 - DNA, 224 bp, Homo Sapiens
  misc_feature (116)..(124): n is a, c, g, or t
ggaccttttttaaaccaaaaatttaatttgggcccaattatttaaaaaccccccaccctttttggggttggggtttaaaaatttccaaaaaactttttcccaagggaaggggggcnnnnnnnnntgggtggctactttcccataaccccattttttcaaaggaagggtttcccttaaaaaccctttttgggaacttaacccaaaaactacggggggccaaaggg

SEQ ID NO: 17076 - DNA, 820 bp, Homo Sapiens
  misc_feature (460)..(468): n is a, c, g, or t
gcacgaggcacacacccatccatgcacagagatggaccaccactgttggagaatgcccattcttcctgagttcctctgtactgggatgtatattttcctagccccaaatccattgctggcaatggatgcactgaatgtgccagcactgaggagttaaaatgagaactccaaacactaacgactcttcttcaagatgcagtataagacaatgaattttaacctagatgtaattatacaatggaaatggtattccagtttagaatatggaaagaccgacctagaggaattggacaactgattgcacctgaaaatcataaagggactttttctggccaataggcaggagtcctctttttgtgaagtgatcttttgtgaagtgatcattaaagggatggaaaacacagtctagtgtccagcaggcccacatgacagtttttgtaattcaaattatgcacttttnnnnnnnnncaaacttaaacagggatcttaatatcttcctttgttttcctttgctttactcttctactttagaatattttcttaaaaatcactcaaaggactgtgaggaaaggctgtggtacctgaccttgttgaaatcaaggcccggcactgtactacaggcctgtttacagattattacggtgaactgaatgggtaccgaggcttcaccaagaggtacttttttgttgttgttgttgttttagaatattgtaccaattttaagagcattccccccacctgtccccacacacccaacaaatgtggtggtgttgccttcaaaaagagaagttttgtgtcattaacatgacagagacttttt

SEQ ID NO: 17077 - DNA, 777 bp, Homo Sapiens
  misc_feature (674)..(706): n is a, c, g, or t
gcacgaggcttgcatcttattaattttctatgatattttttccttcttcgtagggacttgggacaatctggctttgctgctttctaactgctaggcacctctctctaaccctcattgtcagagggaattggaggatatccacagtctgttcctgttctgatattctgagcagagaaaaggcactaacggttcctcttagctatttaattatcagaagcaagtaatctttccccagataatattttgccctagaagaagccgtgatttagctcttttattgtgcttacttggtccaaatacatctgtggggtgttttgtcatttcttaatgaatgaatcatagttataaccaggggccaagctgcccaagaggctcttcagagatcatggatgctctctttctggaagctgtggcctgatggagcagccccattccagggtcccatctgtccggagttgtgtatgtcaagtccggctcagtctttatttccaacactagccgtggtcctgtgcagtcaagctctcagctagtgtttagggctgtctgtcagaaatggttatacgtgggcaaaagaagatctgacagctcctatataccttatcttactgaattcttaaactttgaaccagttcttccacttactgacttgttaccactgctgactttctgaaaannnnnnnnnnnnnnnnnnnnnnnnnnnnnnnnnccagtggggattagaatgtttagtcctacttagtaagaaaaatattgtatttttaatcattcatagtgctg

SEQ ID NO: 17078 - DNA, 376 bp, Homo Sapiens
gcacgaggcaaaaaataaacatagaagtagcatactaaaatgagctgcataatgtgcacttttaaacataaacaagcactacagcactataacttgaaaaaaaatcaaagcgtctgcagttgagggaatgagctattgcattttggaggaaaattactatgggaagagttggtactcatgaaatattctggtcattatttaaatatgttacacatggctaataattttcttatatatatttttaatcgccattttccacccaaattatgtgcctccatttttcacattattccaaattgttgttatatgaatgcacaaagttagtcctttaaaaaagaatatatttaggaaaatccttcaaaagttttttaattta

SEQ ID NO: 17079 - DNA, 586 bp, Homo Sapiens
acaataaaaaacccccgggctgcaggaattcggcacgaggaaagcttataagcactttatttgggagcaatcagtatttttgtcaaaacttttggacaggtctttatttttgttttggaaggttcaacacgaattgtgcaaaatctctggatatattagtttagcgatatggttgttgaagaaaataatatgttttaagcattcacaacgtgacctccccctagagcttttgttgatgatatgaatgatctggattcagtgagttcagtggtcatttaatccagtcctacctctcatacagcagacagatagatagatgaacagacagacagataactagatgtctaataaactcctgctccctaaaagtacttttgcaatttcagtgaagacatggctaaaactgagtggcacctttatgagactggtgctttttaaatcaaagaagatagaaatgtacctttaatctacggcactgcaccagagcagaacataagctattccttcccccatgacagaggcatgaagctggggaggacacaggcattcaccttgacacagaatgggtcctgggatgtctacttct

SEQ ID NO: 17080 - DNA, 380 bp, Homo Sapiens
gcacgaggcataaatgaggccattcacataactccttttgtaaagtgtttattcacatcttttgctcctcctgccctttttttgagattacagcaggatatgcccattatttttcattgaatcatttaccttttactagtgatttgtgagcgattttaaaaaaagtatattctggaaataagtcctttacagatatatgtaatgagaatattttgtcctagtctatggtttgcccattttcttaatggtttctttgatgaacaaaaagatgattaattttgatgaagtccagtttgtcaatttttttcccttattagttactttttgtgaccctctagaggaaatatttgcctgtcacaaaataaagattatatttccct

SEQ ID NO: 17081 - DNA, 619 bp, Homo Sapiens
  misc_feature (220)..(245): n is a, c, g, or t
  misc_feature (272)..(388): n is a, c, g, or t
  misc_feature (394)..(461): n is a, c, g, or t
ccgaccttatctttccattcttttgtggccaaatctaagatctatgtggtagttcactataagcaacttggttgttaaatcacttggtgtcttgactatttgtgatacattgttcatgaaacagaagatttaagaaaaactattatatgcagatggatttttttgtgcctaaagaggaacaaaaaggagtagactttcataaaaacttactgtatcttcnnnnnnnnnnnnnnnnnnnnnnnnnnagtatgaaacggtctcagtctgtcaannnnnnnnnnnnnnnnnnnnnnnnnnnnnnnnnnnnnnnnnnnnnnnnnnnnnnnnnnnnnnnnnnnnnnnnnnnnnnnnnnnnnnnnnnnnnnnnnnnnnnnnnnnnnnnnnnnnntcagannnnnnnnnnnnnnnnnnnnnnnnnnnnnnnnnnnnnnnnnnnnnnnnnnnnnnnnnnnnnnnnnnnngggctcagcgattctcccacctctgcctgccaaagtgctgagatatgggcgtgagccatgcctctcatatatattaaagttcatgcccggcctctcatatatattaaagttcacttatctgctgtattttaaaagccttcccattggtatagcttccc

SEQ ID NO: 17082 - DNA, 671 bp, Homo Sapiens
  misc_feature (76)..(106): n is a, c, g, or t
  misc_feature (119)..(366): n is a, c, g, or t
aatgatgaggatgataatgaccattgagcatttcctatatactgggcactgggctaagctcttttcatgattatcnnnnnnnnnnnnnnnnnnnnnnnnnnnnnnngaaatggagtatnnnnnnnnnnnnnnnnnnnnnnnnnnnnnnnnnnnnnnnnnnnnnnnnnnnnnnnnnnnnnnnnnnnnnnnnnnnnnnnnnnnnnnnnnnnnnnnnnnnnnnnnnnnnnnnnnnnnnnnnnnnnnnnnnnnnnnnnnnnnnnnnnnnnnnnnnnnnnnnnnnnnnnnnnnnnnnnnnnnnnnnnnnnnnnnnnnnnnnnnnnnnnnnnnnnnnnnnnnnnnnnnnnnnnnnnnnnnnnnnnnnnnnnngtgtgacccaccatgcctggtcccatgactatctctttgaatgtcaaagccacccccattttaatgttgggaaaaaagaggctcaaaaatgcaatgtaatccgctcagggtcaaggagctagtaaagctaatagatgaggtgccaaaaattgacctgatgcaactcagggtaccctgtgattaaccactatgctatactacccccaacctggcaacacagtggttcttctcaatctctgctggtaaagtggattcaggaaaccctctgtgaccctgtgcccagtgagcatgaaccacaaaaccca

SEQ ID NO: 17083 - DNA, 735 bp, Homo Sapiens
gcacgaggcacaaatcactactgctgctgtttatacagatctttgcaccttgctcatggaatatctcataatcattttccaatacttctgtctataaattgtatgcccttttcctaactgtctttacatattgatggacaactggcatctcatatcctcaggaaatcataagcgcctttactatccactttgcttactgcctatgcctcatcgccctcccattgatacgcttccgaaacaaaacgaattaaggcatatatcccaccctttccctcgcatcatcttgtcacaagagctactggaacaatgaatacctcgatgattgaggacatttcgtttctgaccttgtacttattgcttacctgttctctagactatacctgcaaatccttgacgtttatgatcaaggtgatgaggaaattgaaacctccatttatatatgtattatgtttctagacgtcttgccttttaaaactggcccctattcttgtacatttttgaatgctatttcttcacttctgaaccatgccactttcaccgctacacatgtcatattttactgttgattatgctctaaatttagtggacttacggtttattgatgctacatcgtcccagacttgagtctcgtaatagtgtaagtgacaggccccgccctgtagcctagaacacgcctcctacacactctcgagccgaaggtgtggcttgtaaagcattgagattcagagtattttg

SEQ ID NO: 17084 - DNA, 629 bp, Homo Sapiens
  misc_feature (51)..(142): n is a, c, g, or t
  misc_feature (164)..(176): n is a, c, g, or t
  misc_feature (281)..(289): n is a, c, g, or t
  misc_feature (319)..(341): n is a, c, g, or t
  misc_feature (369)..(378): n is a, c, g, or t
  misc_feature (396)..(404): n is a, c, g, or t
  misc_feature (526)..(535): n is a, c, g, or t
tttccttttaaaaacccccaaaaggtctttgggtctgttcccggggggggnnnnnnnnnnnnnnnnnnnnnnnnnnnnnnnnnnnnnnnnnnnnnnnnnnnnnnnnnnnnnnnnnnnnnnnnnnnnnnnnnnnnnnnnnnnnaacggaaacccccggggaattnnnnnnnnnnnnnagaaaaatttttggtgggggaaaaacccttttaatttttaatttccaaaaacaatttttcccggggtgggggggcccccaaaaattttttaggcccctttccccnnnnnnnnngggggggaattttccttggggattttattnnnnnnnnnnnnnnnnnnnnnnnttatccaaacaccgtccccggccccttnnnnnnnnnntctctgagggcctcccgnnnnnnnnncccccttttgattttttaagattcaaaaacccccctgggtgtgggatttaccaaaccgaaggcttttattcctccccataaattcggtttaccccaaaaaagcaccgggccaaactcccggnnnnnnnnnncactctcccaaaaccttatgtgtttagggcccccattttacctcccggtcccccccctagagagagtgggtaagggaaaaacccctttctcaac

SEQ ID NO: 17085 - DNA, 587 bp, Homo Sapiens
gcacgaggcatttacttaggtaggaagaaatagtctactgcccctttttcttaaagacagtatatgccttcaaaaatgttattataaacattttcaagcatatagaaaagcagaaaagtgtgtaatgaacatccatacacctatcaaccagattaaacaattatatttttcctatttgctttctcttttctgttgaaatatttaaaaatatagataatgttttaatgtatttaagtatgtttaatgtgtaaattaatgtttcaaattcaataaagctggaaatattttatagtatactatgaacattttcactcgtaaacacttgagtgtcatgtacccatttttaagtgcttttcaacttcgaatccctctgtgactgactggcagtcaggtctacagaggagcttccctccctgggagtaggagggctccaggtgcctccttggggtctgtgtgtcccccttcctccctggtatgtcagagcccatgcctctacttgctctatgctgttgtaaaacaaggaatgaccaactgctacaatctttataggactgctctgtaccaaaggcctttactgggggaatgtg

SEQ ID NO: 17086 - DNA, 501 bp, Homo Sapiens
acaaagatgatgatggcaatatgatgctgcggcctggccttcagagctctttttacccggtttcttttgctggttggaaagagtagattttattgtactacccttttccctgtgaagatgctggctttcctgtgccatatctggactctatactgtgtcctgtgaaatacagactattcctgctccctgttgtttctgacctattttacttcttactaatggaaggcccgaatttcccgaaccccctcttttttcgtttttataaaggatctccgcccatggtactggttgctctgtcaagtatgaccaagttcaaccctaggcatgagggggaggtttcttttatctgcccccttgaacttttttcatctaattcctgttactttaagacgattgtctttgtgaatgccattcttttttggattttccagataattgtctggttttctggaatgttcccgatgaatcacttactgatttttggattaaccttccagccaa

SEQ ID NO: 17087 - DNA, 759 bp, Homo Sapiens
ctgaaaattcggagtattttgtaacagtgagtgtgacctggacttcatgtttcagtgaccaggaagcaagttttgttatttcttccctgcccaagcctgcatttgcgccccaaggcagacgactcgtggcagaaacatgtgaccgtcaaggccgaaaatacttaccacgtgttcctttgcagaaaaagtttgccttacccctgttcaagagctcaggaatgaagtcggaaataggtagagcctgggagaggtgccagggtgcccaggcaaaggccccatgaggccgcatgcttatgttcgaaggtcttctaactgctttatcaagatacagttcacattccacaaagtgtacatttcaatggtttttttgtgtgttgtacagagctgtgaagccaacaggacaggccatgttagaacgttcttatcctctgggaaagaaaccacgtaccctttcacagtcacccccatccctctgttgtcactccccagcccctggcaaccgtgaatctcctttctgtctctgtgaatttatcgactccgcacatttcatagactgagagtctcacgctacgtggtcctcggtgtctggcttcgttcacgcggcctcgtgttctcgaggttcaccagcttcgtctccttttaaggctgagtaatcttccattattctggaccatgttttgtttatccactcatctgttgatggacatgtggctattttgaatcctgctgctggaaacattcatgtgggcaccgtgctta

SEQ ID NO: 17088 - DNA, 372 bp, Homo Sapiens
gcacgaggctacaaatctccttatgtataatcttggcagctacattcctgctcctgttttacatcttctttgaccccacccatatgccgcccttggctaactgcgccccaggagatggacttacaaaagacctgaacgtgagcccatgcctcctattctactgcctactgagctcccttcccctactcatcgcactaatttctctcacaacaccctaggctcactaaacattcggctacgcactctggctgcccgataactattaaactcctgattcccattcttgatatgaatagctgacacagtggattttactgcaaaaatacctcttaacagactcaaatttacattcccaaactcccatggaaaagc

SEQ ID NO: 17089 - DNA, 890 bp, Homo Sapiens
  misc_feature (131)..(157): n is a, c, g, or t
ggccagaatatgtaaattatgagaactaaattttgtagagtactttttatagactgcaacactgttaagtattatatgttttttttatgtattagattgtttaatcatctctacttacttattggataggnnnnnnnnnnnnnnnnnnnnnnnnnnnaaaaatattcacatatacaggaagaaagtggggtctgaagaaattaagaaacatgatcaagatcatactgttagtaaaatcttaaagtcagcagtctaactcccgagcccatgtacctaaatacatggatagtacctaaatactattctctctttctgatatagatatgtcacaataagaggagcaataataaagtatcaagcaattcaggtaaaaaatgttgaaaatattaacagacatccaaataaggtgatcatataataaaataaaggtaaaatttacttagagttaataatttccagccagatggagaaaatgaatatacactttaaggaaaaaaatgaaaatgaaagtgaccaaaaatacacaagtttctacagttatgggattttccagttatgtggatccatttagaagacaaattatagaaggatagtagttgatccctttatgactgattgtatttgtctgctacgaccagcataacatggccacatagattggtgtaaacaaccaaaatttattgtctcatagttctggaggctagaattccaagatcaaggaattagcaggttggtttcttctgagcactattggagacaatctattgcattattttctcctaatttctggttgtttgctggcaaactttgctgttccctgcttgcagatgcaaatttctccttcatctttacatgatggtctctctgtgcttgtgtctgtgtccaaattt

SEQ ID NO: 17090 - DNA, 810 bp, Homo Sapiens
  misc_feature (232)..(373): n is a, c, g, or t
tttaaaaatcccccgggctgcaggaattcggcacgaggtatcccccctaacacacaggtaacttcattatccaacttctcaagtagagatcagatcttagtaatcaagcaagagggcggttagctgggcagccgcggacatgaggctcgtggtgaaagtgggcatgcagtttattctcccagatattacgaagaagaagaatagatgttgtaacctcctttagatcagggannnnnnnnnnnnnnnnnnnnnnnnnnnnnnnnnnnnnnnnnnnnnnnnnnnnnnnnnnnnnnnnnnnnnnnnnnnnnnnnnnnnnnnnnnnnnnnnnnnnnnnnnnnnnnnnnnnnnnnnnnnnnnnnnnnnnnnnnnnnnnggttggacaagcttttgctttacatatttcacatgtccactggggtttcttttggttttgcttgttggttttagggcatttcattatgtcttgggatcgctggcatcctcccttcgggacactggcagaatcaggcccagcggtcacatctctctgatcctacatttaaatgtacgacaggtcacagagcagagaaaatcaagacgtcagaatcgaaccgattgagttctgagtctggagaggttctcatccctcttctgttaaacatggactagtaaatagatgggtggcgattgttttattgtcagcactcaagaagcataagagaaaaacaggcctgctctccccagcccaaaaacctgatggacacagtagctatgagcgcctgaagcgtggggtcagtgaagggttgaagatggatgtgtccagctcatttt

SEQ ID NO: 17091 - DNA, 744 bp, Homo Sapiens
gcacgagggttctctccattttggtttgtacagtgtttcctcatgattagctttaggttgtgccattcgggcggggctttcacacaggctgagttctctgcaatgcagcatctggaggcatctgctgtcactcacttccattactggccaatgttgactttgattatttgatttgttgaaataatcaaagtcaacatcctgccatgtttgtccatggttaagctactatatactttgtatttcataaatatcttgtataaagatactttgaggctttgtaaatatctggctactactcagaacttcacccacaagataaagcatttcattggtgatttgtgcttgaatcaattattattatgatggttgccaaatgatgactttcttattccttcatcccttctatattgataaatagaacaaaatcagtgaacaaatagggggagaagggaaagcttactaatttggtgttcagatgccccctggacttggccagtagtagccatttcaagctgactttgtgtccttctgacctgtcccccttattctttgagcacttcaagggtcaactgtatttttaacttccttttctgacagcaacctggctcccttcatcctgaatatatattaagtactcatttaatgccgtcgataggctttggaatctgactgtaagtgaaatgacatataacagaaccaatttggcataggctaaatgatacaaataaaacataacgttcctat

SEQ ID NO: 17092 - DNA, 723 bp, Homo Sapiens
gcacgaggggactcttgagtggctttgaggacattctggaaaatgccactgaccagtgtgaacaaaagggatgtgttatggggctggaggtgtgattaggtaggagggaaactgttggaccgactcctgccccctgctcaacactgacccctctgagtggttggaggcagtgccccagtgcccagaaatcccaccattagtgattgttttttatgagaaagaggcgtggagaagtattggggcaatgtgtcagggaggaatcaccacatccctacggcagtcccagccaagcccccaatcccagcggagactgtgccctgctcagagctcccaagccttcccccaccacctcactcaagtgcccctgaaatccctgccagacggctcagcctggtctgcggtaaggcagggaggctggaaccatttctgggcattgtggtcattcccactgtgttcctccacctcctccctccagcgttgctcagacctctgtcttgggagaaaggttgagataagaatgtcccatggagtgccgtgggcaacagtggcccttcatgggaacaatctgttggagcagggggtcagttctctgctgggaatctacccctttctggaggagaaaccatttcaccttaataactttattgtaatgtgagaaacacaaaacaaagtttactttttttgactctaagctgacatgatattagaaaatctctcgctctc

SEQ ID NO: 17093 - DNA, 941 bp, Homo Sapiens
gcacgaggggacgaagaggcggcctcggtggtaagtggcggccgctgggacccagccaggtaccggtccggctcggccctgcccctttccggccgctctcactccttccctcggcctcgagttcctcgtgggcccgtgggggccgccgcggggtcggggctgcgaggcagcgcccgccgttccatggtaagcggtgctacgggacgttcggaaggaaacctcgctagagcaggggacgcctgggctcctggctgaccacggggcctttgcacggccagggctttgcgaccgcagtgtcttccttctgtccccggtcgtgcgccgtgcccctcagcgcggctcacgtttcggaacacgtctgcctttcatgcctcccgaagagcctccccgcatcccgtgccccctgctcgctgctgccgctgacccttgggcgctgcgctggtccagagcgtgttgtcctctgacgccgtcagaacctgagctccctgcgagctgggactccgccgtgtcttcattgcctccagtgcaaagcaactgcttgcaagagaacaaaagtgtgttcaggtgcacagagtagaaaattcaaggagcctgaaagggtatttggtgaagacttgatgtgtttttcccagtcctaacctccaaggcccagttctcccctggggcagagggaaacccgtttcttacgggtctgcaaagaaagtctatgcaggaacatctacgtgcgtttctgcaaaagtcagttactttacttggggctcttatacttaacgtagctcggagagcgccccatgcattcagatacaggtgggattcctccggaaacggagttttatagccaccagactttatcccctttcctgtagaaatttagggtttttgctgtcttttataaacgaaccatgctagcttgactattgcttgtacaaccgtttttgccc

SEQ ID NO: 17094 - DNA, 481 bp, Homo Sapiens
  misc_feature (94)..(102): n is a, c, g, or t
  misc_feature (368)..(414): n is a, c, g, or t
aacgggaaaaaaaatttattcaaaggggccttaaaataggggctggggcttgcccagggggctcttgaaataaaaggcccggactttctgccannnnnnnnngaacaatgaccccaaaaatttgacagcccggggaatgttatacacaagctcatcttttgtctttttcccttgaccaaaagttaaccccaaaaaaaacccctttttcatttggaacttgattggggacttcccctcctcccttttggccaccatgttttttttgtgtgggaacagggaagggaattttcctgccttatttaaacctgggccaaaaatttggggaatctgtttgatcaaaaaatctaaggccaaaaacgcctcatacnnnnnnnnnnnnnnnnnnnnnnnnnnnnnnnnnnnnnnnnnnnnnnncacccccccaatgtccctgggggggaaatccacggccttaacctcctcaaaggggtggtggtccccc

SEQ ID NO: 17095 - DNA, 867 bp, Homo Sapiens
  misc_feature (179)..(295): n is a, c, g, or t
  misc_feature (624)..(644): n is a, c, g, or t
gcacgaggcagagttttgagattaaactttgagaggtgagaagccttcctgatgcccctgtaatcttaaattggcaggtgcctctaagtgaggccatccctctttgcctgcctatcattttaatctttatactgtaactggttcctttcaactctggccttttattgtagcacttttannnnnnnnnnnnnnnnnnnnnnnnnnnnnnnnnnnnnnnnnnnnnnnnnnnnnnnnnnnnnnnnnnnnnnnnnnnnnnnnnnnnnnnnnnnnnnnnnnnnnnnnnnnnnnnnnnnnncctttaggtttttgctatagaaaatatccaaatagagtctggacaatgctggatgtaaagaaaactgtgaagctacctctaagcatattgtttgtgaatactgtgtaccatttagaggataacatgggggattcacatgaagttatgtgaaaatattttataaggaataatacctaagtgcctctcttaagttctccagtagaatgtattttcaatttttgccacaagggggagaagttatttttatagtaatatgtacatttttttattttaaaaatagaattcacacaactttacagcatctatgaacattttgctatcccaattannnnnnnnnnnnnnnnnnnnnaaacaagattctgaaagtcttgcatgagaaaaattttcaaaggaaattaataacaaaccaaaacagttttgaagaacatgtggcacagtgggacacaggaattgaacaaagtttaccatgattaacattatgttttcttatttatattatcacattgaattcctttatcaactctaataagaatctactgaataatggtcctacattctgcttttaaagaaaa

SEQ ID NO: 17096 - DNA, 919 bp, Homo Sapiens
  misc_feature (278)..(382): n is a, c, g, or t
  misc_feature (405)..(550): n is a, c, g, or t
gcacgaggatcatgtttaaaaaccacatgtgcagcagttctgtgactccctcaacatccggttggccatatagtccctttgcaccacagaggttggagtatagaatatgcccaaagctgttttgttttgttttaactatgctgcatcatctgaggttgtgttaacatagtttgtcctaatagtcttttactggaaacttgctatatttgatcatgttcagcaagtaaactaattttatctactttcatatattttgagacaaagtctggccctgtcannnnnnnnnnnnnnnnnnnnnnnnnnnnnnnnnnnnnnnnnnnnnnnnnnnnnnnnnnnnnnnnnnnnnnnnnnnnnnnnnnnnnnnnnnnnnnnnnnnnnnnnnatgcttcatcatgcccggctaannnnnnnnnnnnnnnnnnnnnnnnnnnnnnnnnnnnnnnnnnnnnnnnnnnnnnnnnnnnnnnnnnnnnnnnnnnnnnnnnnnnnnnnnnnnnnnnnnnnnnnnnnnnnnnnnnnnnnnnnnnnnnnnnnnnnnnnnnnnnnnnnncagaaatccaatttagtaaagtcatgttgtagcaagcatcactttaatataaaaagtgtacagctcatattattagcaattgtactgtttaattttatattagttatggtcttgaaggacattgaaaatctgttcagaaagactatgtttttcaaccagagatgacatcactctaactttcctttggtttaaatgcttgattctttgcttacaaaacttctgttttgaacaactatggtgagaaagtatatttgtgatactgttttcttagaacactgttgtcagatagatcagccataatgttaacacatttctgatctctattataaggctgtaattttccaaaataatatagaaaaggagaaaggg

SEQ ID NO: 17097 - DNA, 929 bp, Homo Sapiens
taacttaacccttgcctggcatggtaatttgttatgttgctgccacaaagaatctgttctgtcaatcttaggatctctattttaactttaatgcgggtcaattgtctgtaaaccagaaaagggaggggagtataacaagtcgtgtctaacctgctgtcctgtcatggctgggaactccgtttttaagaattttctggggtccccttggccaagagggggtccattcaatctgtaggggaggagtcttaggattttatttttagtttacattctccccttttagccaagatgtgccagaggcaacactgatgaccaaacatttattttgtctcatgtcactgccagggtggtgtggttacctgccccatgctcattttgttctttggtgggatccctgtggccaagggacttggaaccaaaagacttaaaactaattaaacattggaggccagatgaagatggaggttcacaggcacgcattaacccttaaaaaccttttgagcaacataaccaaaaagcagtgttacaaaagtgacttgtctatgagttctgtgtgttgagccatgagctgtttggtaatctgtatgcccatctttaatttggagggtctgaactaattttatctgttgaaactggcccttacaatctcatgtgcccaccccttctgtgatagtccatgggcctactgggagggtgcttgatactgtattgctttagcagtagtgccttggcaatggaaagcagattggcctagggggattgaatagttttcaaattctagagatactaggtagagagaaaggtaatcttcaatgttttacccaatttctgtaagctgtaaatagtttaaagaaaaaaggttttattggactctgaaaagcaaacatgaagaattagcaatgtttatttgattttgaggacattgtcaa

SEQ ID NO: 17098 - DNA, 321 bp, Homo Sapiens
gcacgaggtcagtattccactatgatttgacatctctgcaccgctgaaacaatattttggggtttttgaagtttgaatagtttaataaataggttatatgtactaattccaaataatcttaaaatataaattacatgtatttctattctttgtctttgatagagtgcaaatggaataatatctaggtaatgaaattattacataatcatgttactaaatacattttatgtgcactgaagataatttttaaagatcctcaagtgactacagaaaaataccattttacctatatgtgtatgtaaataaaaaatcttaattctt

SEQ ID NO: 17099 - DNA, 560 bp, Homo Sapiens
gcacgaggctcatttgtcccttttaccctatatagccttacctgaagaaaggtgtgcaatatgcatggtttggcagttaccaaaaactgaaaaatccaaaggtctctgtccttccctagatctatgtcttgctttcaaaaccagagctagccaaatcgcaggaaaagaaaacatttgtcttcattacctgtccgctttctcttctctgccctagttcccccattccctcccttgtccaccatcctgggtgcccaggaacccagaaccttcatgcttttggaacccacatgttttatcctaaggccacggctgcatcccaagacgctagtccccatcccaccagccacccgccaccaccgaaacttggcaatccttgcctgttctctaataccctggaattggctattgatgaattaaacctaaaggactatttctgcaaatgccagttactgtaacaggcaggggaaataaacctgttcagggaggatcccgggttccagcatggttctttatttcatatctttataaggccaacttttgcctgaaagggactgatttgg

SEQ ID NO: 17100 - DNA, 879 bp, Homo Sapiens
gcacgagggccaagagtgattgtcgcagtgctgtgaaagctcactgagtctgctgaaatttaagtcaggtgctgttttgtagggtggaagcaaatatcctttatctaaaaagcttctatttagggcagcaggaaagaggccctaatctgtcacaccataggtgcattgaatgcagatttccctgtgttacacaagtaacaaagtgaaatacaaatacagtgttttgtttcagacacccaaagtgtccacatttggatagaacaatgctattaatagattttggtttccagccgtttgtggcaatttagctaaccctaaaactaccttggtgacattgatagatacaagctcagcaattacaacttaaacaagagcaatgagaatagtaaatggctaaagtatgattacattgagccatataaaattgccaatattgaacaattttgactagcaaaaatggcagtttcattagatttgccatgaaatcagaataatgcattttatttaaaggaagtagaaaataagtaggagcataatatttattgagcatctactatatgccaaacacagtgtttagcaccatttatgtattaaatcatttaattttcataaaatgtctaagatgtgttatccatctcattacacatgaggaacctgaggtgtgaaagttatgacttccctaagctcacacaactagtaaggtaaaataggtaagaccatattagaggattcttctaaactgggtttaggcaaactttttttgtaaaggaccagataggagagccatttggctttgtaggtcgtagggtctttgtcacaactgctaaactccatgtttgtagtatataaatgaaaggaagtggttgtattccaataaaa

SEQ ID NO: 17101 - DNA, 610 bp, Homo Sapiens
gcacgaggctctagtagctctggcaaacccaatatctgacaccactttggactcaagagactcagtaacgtattatcctgtttatttagcttggttttagctgtgttctctctggataacccacttgatgttaggaacattacttctctgcttattccatattaatactgtgttaggtattttaagaagcaagttattaaataagaaaagtcaaagtattaattcttaccttctattatcctatattagcttcaatacatccaaaccaaatggctgttaggtagatttatttttatataagcatgtttattttgatcagatgttttaacttggatttgaaaaaatacatttatgagatgttttataagatgtgtaaatatagaactgtatttattactatagtaaaggttcagtaacattaaggaccatgataatgataataaaccttgtacagtggcatattctttgatttatattgtgtttctctgcccattttctttaaattcattaactgtatatatgtaaatatatagtacttgtaaatagattccaaatttgcttttctattgggtaaaaaataaatttgtaataaaatgtgtgactatgaaac

SEQ ID NO: 17102 - DNA, 911 bp, Homo Sapiens
  misc_feature (729)..(737): n is a, c, g, or t
gcacgaggaaagaatagatggtagcacaggccatgagggctgggggagagaagcagagtgaaccttagaaagatggctcagctatttggagcactggatattttactgaagtatatttactgaggcaccatcactgttttgactgtacagtatagtttttcataaatttcatcacatttactttgttcagaatctgggcttgaatctttgagttggacaaaagcctatggtttcttttaaaaagtttcatcttgagctaatgctacagtttaaataaaatgtatgaaaggtagttatcaaaaacaatttgtatatttaaaattctattttgacatccattttttacagcgaattatagcaggttatgtgaaatttaaaaataaattttaggaaatttttttatcttgtaagtaagaattataaatctatctcagttaaaagtaggatctttgtttttattcagatattttgaaagtttagaagcattttgtatgctactttggtatttcttaagtatagtcagcaggaaagggtaacctgttttatgcaaaatttttttaatttgtcaaatgtttttagtgtgtctactttctgaaatagtctcaatatcctgtctgtatcctaggcagataactacacaagaacaaaacgctatatagaaaagaaaatatttgaggaaatcttaaattccataagaaagtattcttgcaagaatgttgggctacatannnnnnnnnctgtcctgaataatttacatcattagggtctgttgaagcttttgaagctacccactattcttttctgggataaaggctaattactgatttatctgccctcaaaatcccagagttaattctaattgagtactaaattaacagtaaagtagtaaacacagagaacaaaatttaccc

SEQ ID NO: 17103 - DNA, 538 bp, Homo Sapiens
aggcttatttagagagggtagctcctccctgttgctggtcgtcccaccctctgctcagttctggctgagcctggggcattttacgggcctcgggggaggaagtgcatacttactggcctggaaaaggcaccagttcccactcctacaggtgggactggcagcctggccctcagccttcaggccctccctgttcatggcttccaggcttacccccctgctttgatctgagagctggtgccaatagcagggagaagccaagctgcagaggcaagcacttccgagcctgcaaaagcaggcccccaaaagtgcagggatgcctgagtctgcacccgcacccaggagggtggagatcttgcctgctccaaggttgcattcggaatgatagcaggctgactggagcacctgccaccatctttagttcaagagtttatgcagatttaagttgtatacggtatatgaatgtgtgacagttttccttatggttgtgtggccttctgtaagagcctacgcctgtttgttacaccggtagagtgctgtg

SEQ ID NO: 17104 - DNA, 740 bp, Homo Sapiens
ttgctggtggtaaaaatgtcaagcatagtaacaaaatagatgaagaaatggttatgttcacaggaaacctttcagcatacttcaaattatactctgagctggctgttaagaaatatatatacacacacaaacacacatacatacatgtatatttctcttaggaactaaaggaagatgacatccaaaacgttttcagaggtccttttaaatataatttttactcttaagtttgtttggcttagcttgcctttgtactttttgtttagaattcttatagcctaaataaagaggattttgaaagattatttgaaacaatgaaacagtagattattgggaagtatgccaagttttgaatttaaatgtgaaagaaaaatcataattataattctcataaaaaattgccacactccaaaaatccctagaacaaaaattattctagtcttgagtcaacatggtattttttccccaaggaaaactgccaatgcaaataaatgaaattatgttttatttgagattatacaatcttgcattggcttgtgtgtttaactcttggtgatgaaccagtccaaggtagtgagtgtgactcattattcccatacagatggcatcctaactcacatggtaatcccaagatagtgttccgttactagagcaagaggattcttttcatccagtgtactgggatacctacatttgtttcacataggccatacagataagaggacttttgttaaattaaa

SEQ ID NO: 17105 - DNA, 603 bp, Homo Sapiens
ccccgggctgcaggaattcggcacgaggaatacaggagatccattagggcatctcttagtattaccatgctctgtgattaaggtcaatgagaaactgtaaaagcccaacccaggcaggactacaaatggcccagacccttcaggaatgaaggtttaggtcactcaaccaggaaaaataaaaacacaacctgttgaggtgcttgctgaaggcaaaggcaatacagaatgggtagtagaagaaggtaaccctcaataccatccacaaccacgtgatgagttgcagaaataaggactgtaattgtcatgagtatttcctccttttgttaaaaacatgtcggtgcatgtatataattgtaccaagaaaatatcttcattttatttcttttctcctttatgtgacataatatttattgacttcatatcatcatttaagtattgttaactttatgtaatagcatttgggttggggattggtgtgtttccagttgtacaaaagatagttgttttatgataagtgtataattatgacattattgtctctatttgaagattatgcatgatctcaggggatgtgcatgggttcaaattgacaaggggtggact

SEQ ID NO: 17106 - DNA, 916 bp, Homo Sapiens
gcacgaggcccttctggaacactaggcaataatttcatcaatacagtcaggtctcttgagtttcaacagatactcagttgaaaagtcgctgtcatcttgctgcataagtattttgaaaggtctgtataacgaagccatttttatatccaggcttagaaggtcactactatatagtaccttcattgatctatctattctgcttggaacttttcatagctaagtataacccccaaatgcatggttcctgggtcaggagacaccaaaatcaattatagctgttcccactcaagttaataaagtaaatgatttcctccactttgcatggaggggtgtaaggaaagcctattttatctgtgcctgggagaactgtgcctattttcagtcttttagaggaaatttcaactcaaaatttttaagtgtgaaaggtttactggtgtcacataaacattagcagtgagaccaaataatgaaacattgctttataccttagtgctttccagttcactgttacctctagtcatggtagatgacaattttcctccctcatcttttgtagcaaagaagcaaattaagagccttttgcaagttagattaggggactgaaaaatccagggagataacctgattcttctatactatgactggagtaaagctgccaagagttaggttgaatttggagccttttaaaagttggttccataagtgagaaggggggctaacatgtgaccactgtgcccctgagaatccatgagatggaaaagtacagacaagaagcacttaacgctgttctcagttggaaaatgtcagccctccacacctgttttggatgtgaagtgcattattaattttaatgacaaaatgaaactgctaattagtttaaatgtaatgtttaaatggtattggatttcctattgcc

SEQ ID NO: 17107 - DNA, 852 bp, Homo Sapiens
gcacgaggctttagacccatatataatcagttcagagcacaaatcaaaataaactggcctaaataactgaattctaggaagcaaagctacatcttttttcatatgccaaagcttctgtttcctcatgttgttcctactttttaaataataaatggctctcagcatcttaggaactagatgggtcccatctgggtagaacctgctataatttttagaatcactcttgtaattcttacctcacttaaaatattaggaaacacagtaatagaaaagacagggagaactcgtctgcaggttttggcagtgaaatttgtcttccagtgaattgctattattttcaaattgcctatagtcaaaaagcttttccattgatggagacttactttcaaatgagcttgtgttgaattcagcactctagattctctctgacattttcctgtcttttgggaaaaaaaagcagatattccaaaaatggcagaaatctaatttttgtaaactttttcatctataggattgagccaaaaaacatacatactattttaaagaaaggtaccatctaattcttttattaaagatagctacttctgaaatgtcttaacagagtttcaagattgcaaagtagtattgcatagctggttttcttacatgtgatgatggatgagagaggaagacctagacttaggcatgtagtgaaatatgtacagtttctggcatcagtgtactatttatagtctatagcatacattacttgcaaatgggaaaagtattttataattatttttgtactcaaaataattattatattctactgtattatattcaaattaaagtttattatttgattcttaaaaa

SEQ ID NO: 17108 - DNA, 529 bp, Homo Sapiens
gcacgaggctctgttagattcccttcctcactccctacagaactgtaggtggaattgactccacttcccttctgggatgtgcatgtaaccaagttttgaccaatcagagtgtggtgcaccccccatctctggttggttgacagatagtcacatgataaacagcagtgagagggaaaccttcagtttagtcaggagagactgggaaagtggccagaaatgcctcattttcctcgaggcttggtgcagtaaggatgaaaacctggagctgctgacagctgtctgactggtggtcacatgcaggggcctatctgagggcagtggcagcacagagggaggcttggaagagagaagaaagtagggagagagtcaggaccttgtggcactctttaaccagtgaatgctagttgaaggcaatacaaccctctaggaggagtttggaaagttgtcaaggttttcaattgtctggaggatgtggttccgactggaactctttggaaaacagttggcattttctgttaaagccaaacac

SEQ ID NO: 17109 - DNA, 952 bp, Homo Sapiens
gcacgaggctttcccccacagcccccagcttgttcctttttgcccattgtgaataagtagagaagaggaaactggggtttgggaagagaaaatgggagtgaagctgatgagctgacatagatggatgtttctgcaagaagtgttggaataaaggaaactgagtcaaacaagctttaaccctagaaagcatcctgcatgtttgatggcacaggtggctgacatgcttgcaaatatgacctgtctcacctttcagtgtgttctgtcatgccctgacctggtgtcttcatgggcagaattaaaggtctctgtccatgtcccacatgcctgtggcactcgtcgctcagtgagttgcaataatcacataggcatccacatactatctccggagttgctttgcttccctggactcatgatggttgagcctgggaataagcaacatgatttgtggattttattttatattggcctcatgttcttcttgttcataaattttttagaaacagctgtggcctgtgatgtttacttggcattaaagtacctcagttataaagctgtgaagttgtgcagcattgtttttaaaagaaatgatttattttgcacattttgacatataaaataggaaaacttctgatatgagcagtctgttacagattgaatcataaaggataaatataataaagaacactttattgcttatttgtcatgtaatacctatcctgactatcctttgtatattatccagccagcctgtagctccacagaacttttgtgagtagtgtaaagaacatttatttcagacaaggattgacttatattgtgaaaattttgctgagatccaccctccccctttgcttcaccttcatctggtacaatatttctattgtgttagtagacctgtttcctaagagaatacataaatattgctttatttcataattatatagaatgggaa

SEQ ID NO: 17110 - DNA, 599 bp, Homo Sapiens
  misc_feature (117)..(165): n is a, c, g, or t
  misc_feature (175)..(189): n is a, c, g, or t
  misc_feature (334)..(386): n is a, c, g, or t
aattggcagaatttggtatggaatttctttacctcctcccaaaagaggggaaaggaaaccccaaaaccatttaaaacaatttagcggcctgaaacccaaagaaaaaggaatccgcgnnnnnnnnnnnnnnnnnnnnnnnnnnnnnnnnnnnnnnnnnnnnnnnnnttttttttcnnnnnnnnnnnnnnncagttgtttttttgaaaaatatctccaacaaaaagaaaaactccctttgttaccctaaggccaaataaagtgagttgggaaacaattccaaaaaaatggtgaactggaagggcaaaaaatatttcctaggggtccctccttttgnnnnnnnnnnnnnnnnnnnnnnnnnnnnnnnnnnnnnnnnnnnnnnnnnnnnnctgccccttctttcctactaaaaatgggatatccggtgaaaaaacaaaacactgttttaagtcctttacatttaaaaaattttaattttcctccccccccaacttcccccggaacgggtatgttttcccccttcccctcctaaagggaaaaaacctgaacctaaaacacccagagaaagtgccccggggcccctcccgtgaaaagggcaataa

SEQ ID NO: 17111 - DNA, 577 bp, Homo Sapiens
gcacgaggaaatgtttgataaaatacagaggagatgaatcatgttgcacgtaaatctgactacagcaaaatgtacttgtttcttattccactttgctagttgtaaaatcaggaatgtagcctttaaacttttgttggtgtttgctttcgagcatatttttgctttctcaatttagattttcttaatattttgttcaaatattagagttagggtagtttgttttgttttgttgtggaaagtgattcatatgccagtttgcctcctctaaagacagacaagatattggctaccatgatattaatgccttgttttgatgaatcgactggaaccttattgaacactctttattacagaactcgtaccctttattggaagtgtcatagacccttctgaaatatgatgacatatatggaataacttctgtttaaagatgcacagaggcaaatacactgcttgaagtccttggaccccagatttacaatctagctgtaaatcaatctcccagttttcagataagccttagatattagatacttcactctaagtatggatcaagaaattgtattaatgtgctatt

SEQ ID NO: 17112 - DNA, 625 bp, Homo Sapiens
  misc_feature (92)..(120): n is a, c, g, or t
  misc_feature (238)..(261): n is a, c, g, or t
gcacgagggtgagtttctgagaggctttgaatatgtatgtgcaaactgtcctattttctttatatgctctcttaaatatgtatgtctgtaannnnnnnnnnnnnnnnnnnnnnnnnnnnntcctagacatctagtgtttgctgtcattagtgaccaagagaaagtagttcttttgtgcacgcgtgaatacatcaaattagcaattaccatagaaatgtatttcattgaataaatagcnnnnnnnnnnnnnnnnnnnnnnnncagggaaatttagaacaattattagatgttattgtgcctcttctcgtgttgatacgtgtatttgggtcaaaagtgcaaaaacttttttctacaatgtacagttattttgacttttcccaggggaagctagcaatagttttaaaagcacaaagtgatgtaaaatattttgacttttataataatgcgaagtagttttatttgcattaatcaataatgttcaggatctttttgtagtaagtatattttaaatggtgtaatttgtgtgtttatgatatgtattcaattatttaagttaagtatcagtgtatttttaaaaagttgttctcaggtgaacaaaagttttgcttttcttcaccattctgta

SEQ ID NO: 17113 - DNA, 878 bp, Homo Sapiens
  misc_feature (353)..(367): n is a, c, g, or t
  misc_feature (694)..(706): n is a, c, g, or t
gcacgaggtttctctcccttccatcccttcccctgcctttcctatacacgctggtgtgcttttgccctcagaaattcttggtttgggagttatgtatttttgagtgatcgaggttatgacatacttggagcggcatgatttcaagaagccattccaaattcttatagctccttagctctggttttactctcgtattttccccaagaaaattttttggctattcaaagaaagcacaaaatatgtgatgtggaactcatgaaaatagggacttttgatatctctttaaatattccctgactcacggaaaagatgtcctcttttggtgtatacattgtgaaaatctacccatttannnnnnnnnnnnnnntttcttttaaataaattatctgtgagccactgcacctagccagaacatcgttaatgtagttcaatatgagataaattattatcttcaatgaaacaagctctaaaagcattccattcctaaattgtatttcaaacttcctattttgttgatatttcttaacttctggccagttttggaccataatcttttaatgtgaaccaaagatggtacgtatttgaccaaagcagttagttttaaatgtataaaattgaaccaaatggaaaaaataggttggggatgcagtatagattagtgactaagtgcataggctctggagtaaatctgagnnnnnnnnnnnnnaaaggaactaaaaaatgtactgcattttctttgtggaataaaagccttgcctgagttgtgctattttcatatggcttttgaagtggtcttgacccactgtgtgtaacagtatttcaggtggtcctccccatggctgaatatgccatccattattctttagtttttattttaa

SEQ ID NO: 17114 - DNA, 922 bp, Homo Sapiens
gcacgaggacgttgccttatcctcagggagtgcctgcacctctgcatccctggagccctcttatgtgcttagagcaattggcactgatgaggatttagcgcactcttctatcaggtttggaattggccgcttcactacagaggaggaagtggactacacagtggagaaatgcattcagcatgtgaagcgtcttcgagaaatgagccctctctgggagatggttcaggatggcattgacctcaagagcatcaagtggacccaacactagaagaatagggccctgactttgtgctggtctggcccctcctgcctcaccaacccgtgcacaaccagacaccttgttacacctagtggatgctctagattggtatagaccagttgacttcagcatcagtccacctctatgacagaaacacaagaaaactgtctttccctagcttcagttccttgggtgtggagcactccccatttcttctcgggtcttaaagtgtgtggacattttcatcccgaagccatagagacatttgctgtcatattgctgctgggcacatctgtgctcttggtgaggagagcaagaggaaccagaagaagtctctttggtcagggaccatgatgctctacatggacatttgagtcttcgtcttctgctgctgctcggctggaccagcttctttaacagcaagcataatccacttcaatgtaatattttctgtagctccaaaggctatctcttcatattgactgcagacagactgaatggacagtttcttagagggcttgtctcctttctacccttgtcctctttcctttcctttgacctaatggagctagaaatatgtctgtgactccaccagttattctaataatttgttttcttgaaattgttaatttcaagactggagaataaactcacttctattta

SEQ ID NO: 17115 - DNA, 700 bp, Homo Sapiens
gcacgaggtacgctggctatctttggaggccgttattcaacctgccaaagtgagatccattcttattgttgcatgtatttgtagttcattcattctcattgctgtatagtcttccgtttgtttatccatttttcattacatccaaaagttattcattctcccattaatagtcttttgagaatttttcaattctgagctattatgaatagtactgtgtagaacattcttatacatgtcttttggtgagtgtatacatttccattgagtataaacctaagaatggaattgccaggttgtagggtgtgtatattttcagttttagtatttactgtcaaacagttttccaaagtgactgtaagaaggcaccattttaatgtgtagcataaaaatgaattacgctaatgatcttagtgggttgaatttctcgaaacacctaaattgtaccaaatgagttatattgcagcaggtatgttgttaatttcatataacaggaaaataagagcaaaagtaattgcccttattaactgacacattagtattacatactcattaggttattgctccttagaaaaaatgcgaattttaagtaatcgtaagtagtatgttgaattagtatgttgtgggaaaatctgtgatttaattttttaattgaattttaaattttgggttataacctcattaaaatgcatgatattttctt

SEQ ID NO: 17116 - DNA, 1101 bp, Homo Sapiens
  misc_feature (79)..(88): n is a, c, g, or t
  misc_feature (138)..(159): n is a, c, g, or t
  misc_feature (267)..(276): n is a, c, g, or t
ccatgggaaacgtaattctatccccccgaatttaggggcttacatctatacaaaaacaggaaatacggcggaggtggannnnnnnnnnagcggaaaatcactttcaggtattctgggataaaggaactaattaggatnnnnnnnnnnnnnnnnnnnnnncttttaaccacccaagaattaatagcgttttctttatatcccaataattaattacaataatagtggttcgggacgagaataacaaacaaccccttaaggcgagagctnnnnnnnnnnttcccatttatatttttggttgacaagaagtaagggggtgaatgataaaaagatgtcgggcataataaattactttatgataggattctgggcggaaaaggggtagggaaatacagaagaaaaaaagccaatttgaaaggtttaactactaaagaactacctcatttatttttataaagagaggaagggtgccaaagtgtggggatatttaaatggcgctggataggtttaaaatagtgatgtaccagtttttattttaaatcccaatatttacccgcaccccggcaattacttccgtggtcacctattacctcccattgaaaattttagataccacttgaataaattttgaatatcaacttagatggggaggatacatgattttcaaaaacttttggggcacatgagcaataacttgtgacctactgctaaaacacggattctccagttacaggtagggacactacaagatcactgggaaggggcagatgaccttaaaaatgcaattcgtggggcaatcccaaagtggggttataggtggggttagacccaatagttttacacaagtaccaggttggctccatgcaaacaattaggagactcatacttaaattttcccctcgcctccccggttatgaaaggcctgcctggagaaggaaccacactccaaatggtcttggactggaggtaaaatggaataaagtctaaacggagcggaaactccaaaaattccgaccgctggggagaagcttaaacctaaggggaaggtccccccggggggggagaagctcccctccctgaggatattttaaattgaggggtaag

SEQ ID NO: 17117 - DNA, 481 bp, Homo Sapiens
gaaggtaaagactcttccttgagatatggagggaaaatattacaggggcccctgggaaaaacatgatcccccagtggaaacaatctaacccgaaagcttttacatctgtcagttaaactggaaccgaaattctgggagcctgacatggtgccgggcccaaaggagaggataattaatatttctctccttctttctcaccctcctccttaaaagaatccacaccaacctcctcataattcttctcaaggggagccctatcctcccgggcctctgaaaaatcggcttccttcctcccctcccccctaccaatgaacaaagggacgcttggcataaatccaggcaaacctggggtcaggccgagccagggctcctcagggtggggggggccgggtaccaattcccccaaagggagtcgtatacgcgcgctcactcggcgtcgttttacacgtcgtggaggggaaaccctgggcttaccccactt

SEQ ID NO: 17118 - DNA, 653 bp, Homo Sapiens
  misc_feature (223)..(235): n is a, c, g, or t
  misc_feature (250)..(341): n is a, c, g, or t
  misc_feature (591)..(600): n is a, c, g, or t
ttctccttggccttgttggtaaacctctgaggtgacaaaattggggctttttgaactttttcggtttggaaaactcggcttttcccaattgggcgaatagggaaaatctctctattatgcgcgtgtcttaaaagtgaaagagctcgacgcgtgagggtgtctcattctgtgcggggctgtgagtgtttagggggggtgcggttacaccgctgctaaaccctcnnnnnnnnnnnnnttttaattgccgggnnnnnnnnnnnnnnnnnnnnnnnnnnnnnnnnnnnnnnnnnnnnnnnnnnnnnnnnnnnnnnnnnnnnnnnnnnnnnnnnnnnnnnnnnnnnaaataggggcctcttctttggaaaaaaatttttgggtgtgggggtcccccgccgaaagtttttgttggaagattttccccttgtgttttaggaccaaattgtgttttccccttttttcaaaccccaaattttaaatttaattggaaaattgtgagttaatggcctttggggaaaaggctgggaataaaaagagattttctaatttccttgagggaaattttaggtttggggccttttttgagagtgttgnnnnnnnnnntttcagatttccgggcttttttggaaagggcccgaaacatattttttgagagg

SEQ ID NO: 17119 - DNA, 872 bp, Homo Sapiens
gcacgaggaggataaaacatttatttaaatggaaacactaatctttattttcatcatgctgaagtgtgtggttacaatttccaataaaacactatatataataagcaaaataagttagtacattgtaaacttatgcacagtttcatcaattaacagtttaagaacaaacaagccatttaagactttggagctacatttagtaaaaaattgcaaacactcaaatcttatcaaccccaagtaagacagtaaagagctattcaagacttcttcaaaccaattacacaaatacatgtttatttttggttacagtcccctgctatgcacaagaccattggaatgctggaacaattacacattttaaaacggcaaaaagcaaagcaaggagataacatgccagccttagagaagctgtcttgaaagtgcaaactgcgttttctcttcctgaaccactaggataagaacgggtacctcagacgacacggcagggtcatgagcatgctttctataccccactggtgggacatttactggaaccaggtctccatgcctttgaagatacctccggttttaaacagtgaacaggcttcaactaaatatagtgcaaatcaaataccaaggagcaaaacgacagaatagagactgtcacaggtgattgacttcctgtttctctacctggcacaacccacatgggacacattggcacacggtaacaacaacttctatttaggttttgatacggaaggcggtgcggcggagcgaatgcagggcaaccacgcaacagcccctgagcaaggccccgatgttatacacaggatccgttcccctctctgagtactgaatgcccacagaaccgtgggggaccacggggcagc

SEQ ID NO: 17120 - DNA, 961 bp, Homo Sapiens
gcacgaggaatacctcacaggatctaatagcgctatcttttcaattcatcaagccgtttcatcatggcttcctcaagaacccagtttctactatgtttctgaaagaatttttatggttgacattatattgaatatttcttgttttacagtggtatgttttagttcttaaaaggacataaatgagagttattagttacttgttaaaacagttcaaaggttcagcatgttttgtcactattaagtatccagtttttgaaaaatagtaaatttagaaaaataaaatgtcaactgaaaagagcaaatagtatacttctaattttgtacagtgtttaatataccccacccccccatcatgcgtgcatgaacgtacactaaagtagatgaaactataccagagtattaatttactctgggtgatggttttattggtaaggattttgtttgcaggtttattgtttctgtaacaagcacacattacttacataactaggaataaaacatttattttaaagggttaatgctacttaattgcagttttttccccaacaagttaatagttaagaaccctgatctcaactcttcgtttttccaggttatttatttcataagatgactatccataaatcttccgatgaacgaacctctttatgaccagagctcctggggttaaaggagaaaggttttataatggctgtcttaatttgtttggtggttttccaggtattaatgccaaatttgcctttgtttagtttctgtttcttatcacactgttttcaggttacatcattatcttaaaaaggcagaggctttattttcttcgttgtgatataacctaattcttagaggtttcttaccaagatcactttgcttgttttgcttaattttattttctaaattttacaaattaatattttccaccaaaagtgaacgaaacaaagacagcaaaatattcaaactgttt

SEQ ID NO: 17121 - DNA, 403 bp, Homo Sapiens
  misc_feature (239)..(247): n is a, c, g, or t
atctcaaagaaacggcctttaacaattggatgtggtggctaaatctttaacctgaagggacaatggtatgagctggacgttgggcaatcaaaaaagaaaggaaatttccgaaaaacttcgtggcttacaaaaccctggctttaatgaattccggcatgcgggattcattattctatcttgtagtaaaactccagaaaaataaataatgttgggaaagattctcacatggacaaagttgnnnnnnnnncacagggggaacctttgtctcagtaaccccaattccccccgaatggggtttccacaataaacttcctgttgacattatacatgggcacatctaactggggaattggccatttggaccaagaatcccttgaacaggcctgccctttggaatggtttt

SEQ ID NO: 17122 - DNA, 577 bp, Homo Sapiens
  misc_feature (144)..(152): n is a, c, g, or t
aaaagctcggatcccccgcggtgggggccgctctctaactcttgggtccccccggctgcgggaattctgcacgaggggatcttccccataacttgtttggatactttattctcttcttatttctagaaaaaaagaatggagacnnnnnnnnngtacggaaattgcgcgagatttgatgcctgtgtgggtgacttcccccaaaaggactgtcctgtgggggggagagcgggcaacagtgagctctccctgcggctccgcctgtctgggcagcaactccgagaaagctccttttggggcacccgcatgcgatgctgtggggtcacctcctctgtgccattgtgcactggaaacacgagaagcccacgccggggccggggtgaggggcgcctgtaaatgtgttttgaatacctcatgagcacggaccgcctacactgggtcaccctcactataccccacgctatcttgaggagaatctgcttgtactccatgggtgataaaatgagggggaaaaaatctgggggcagtatcacgaaaatgctgtgccggcgggtggggggtactctgagacactcacaca

SEQ ID NO: 17123 - DNA, 590 bp, Homo Sapiens
gcacgaggttcttgaaaggtgacctgctttcttgtattcctgcaagtacacggcagggtgggcagttccaggcttatagtcattattccctaacaaacggtcaagacttaggctgcccaagactctactacccttgtagtcaaaaatccaaccaccttgacctttacctcattatctgaccctttagcatggagtcctaaaatggtcctgaatggacaaatatctagaactctggtaaattaacttgagtagcatgggaaataagtatcacctcatagcaggactgaaaaacctccagttaggaaaggggactcagaactgtactgtattctgtagaatctttatccgtaagtgctatgtatatactaatagttaaggtgaataataaaacaattgtgagctaaggaatgtgatacagaacacaaggagtcaattaatgcatgagtcttaagggaaattcttagacttcagtgggtctaagctcagaactctgagcttagagaaacaggatgccccagtaaacatgatttgtttgagagaaactaccatatgtaatagatgattcctcaataaactgttttcactaggtc

SEQ ID NO: 17124 - DNA, 634 bp, Homo Sapiens
ggctgcaggaattccgcacgaggcgggagcaggctgggcccgatgcgcgcgctgtctccgcgcccccgcccgccgatcgctcgcttgctcgctcgcacgcactcccggtagtaatttcactttgccacgcgagctccgcagcccctaaaaatcccgccccccggccaggtgcgcgagtctgcgcgctcctcctccgcctcctccgacgggtccctggcgcgccggggccggggcccggctggggcggctgcgcgcacggcgcctctccaccaacccgctcccctgcaggtccctcgcttggtctccatccctctccggcgctccctcgctcccccccgccctttgattgaccggcaagatgtcggtgtggagcgaggcaggagcgattgcatcaaccgtcacccctggagcccggcggcggcagcagcagcagcagcatcagcgcggggaggagacagcagccagccgcaatagccgccgcagccgcgggagcaatgcagacagcaccttgagaacgcgctaaagcactccaaaccgtggaccatgccgtgtccctgcaactgggaggggggaaaaccagattttttttgacatataaagcaagctcagccaaaaatatataattttgtccttc

SEQ ID NO: 17125 - DNA, 468 bp, Homo Sapiens
ggaaacaaaccaaaaactttattttccaaagtaaatttttacctggttttatatggcatataccggtaatgatgacagccacagattttaaatacattgagggttgtggagctcattttcccctagttataccataaaactttataaacattgctttaaccttgatggttgggcccgttttgtgtgcagaaatcacgtttcaagggaggttcaccgcccgaaacgggcccatcaccatttggtgtgggtttcccagaagccaaggagcccatctcaaccagctcgcactgggatttttaactggctaaatttgaagagcatttccaaagcttgtgctcccttctaggtctatagggggggaggtgcggggaaaataaatcataaaatctttgggcaatttatggcaaacaggtaaatgctgataagtttttctgaagcagcaatcggaaaccccgagacaagcacggg

SEQ ID NO: 17126 - DNA, 508 bp, Homo Sapiens
gcacgaggggaacaaagagagaaaggcaagagccaggaagtgaagggtcctgtgtatactggcttacttgttgagttggagaactattgccgtattcctctgctaagctcagggtgcattcgtggaaaccctactgcaactggcccattgtgcatacaaagctggaactgagatgtgaacagatttgcattgccttgatcaccttccgtgggaaatatagctaggcccacttattggtaggagctactgacatgttaaaactaggttaaactgaattggaagtaatggtgtatttggaatcatggctgactgattccattacatgttctagcatgataccagtctgaggttattccccttgaaccaccgacttagtagagtttaatgcacaatgtgatggtcttagttccttgtactgttcttcagtgtcaaagttgttcaactaccagttaagttttttgggctttgtttctcagtagtgacaataaatttgtgttgatctatttac

SEQ ID NO: 17127 - DNA, 769 bp, Homo Sapiens
gcacgaggagtcactccacctctacccctcacaaccttaacctggccatttacaaggaccaagtataaagatacagaggcggaagggctgagcggcacaaccctgctgccgaaggagataccatccggtgcaggccgggagtggctggagcgactccccccgaccccttcgccctggagcattttctagaaccaactttgcttggagaggccccgctacctgggacagctgtgcacgagcctcctacgaacagtggagtaataccacagcaactatgtgttcatgttcgggggcattttcatgtacagggtagtgacctccccaacctggcgagaggtggtggttgtctatttaatcgcctgtcaacttctctattgccgcagaaccctctaaatccccttgctctttggactataggtgaaaccaggaaatcctctttgtatggttggaaaaatctccttccccatagtctggctggctggtgcatactaggcctacttccgggcgctgggagccaaagtgttggtctcaacatcccctacctacttcatcccaaatatagcactgaactcctcggcctattgaaccaatctatcacactagacaacaactaatgttagtataactaacatgaaaaccttctcctccgcataagcctgcctcagattaaacactgaactgacaattaacagccctatatctcaatcaacgggagagtcattattactctcactgtcaacccaacacaggcatgctcaaaagaaaggtt

SEQ ID NO: 17128 - DNA, 529 bp, Homo Sapiens
tcccgcccccgccccaaaaaaaggcattgaagttaagatagactatatagttagatcctggacacacacatggattttgaggaatgatgtgagtttgtttatgtatgtacattttagcagttaacaggtttggagtaaattgaatatttataaaacaacagtaattgccatgtaggtttactgtcatagtggaagatgattaagttgatggtacctacaggtattttgctatgaaaatgttttgacaaacaggatgatcgtgtaatttatgttccaagctctagtttgagaatggaagaatgtggtaaatttttgccaactgaacaggcataaagcgctgataataagggacttggccttaaggtaggaggttgttagcatttctttctaaacgtgtaagagtttatttaggtgacacccagcgttttggaaaaatgggtgtttgtttagaacaataatttggaggggaagtggactaaacagggtttttagattaggtttgtgtttatgtatctgtatctgcaaatac

SEQ ID NO: 17129 - DNA, 931 bp, Homo Sapiens
  misc_feature (463)..(477): n is a, c, g, or t
gcacgaggctttattcactaataaaatttaaggaaatattatggtaagttcaaagtaatactcaaaagaatagaagtttttcagttgtaatgttatcagaaatactaaaaatttaaaaactaaagtttaaaaatgactttagaaacatcaatgaatgtatcttagtaaaaggaagcattaacaatgaatgttatatgagtgaattgtacaaaaacataatatgactttcttaagtattataataacaaaagcaatgataatggaaacagatctttgaaacactaatgttatccccacagctttcctcatcttcttatgctattatcatcctgcaccctacagcttctgtctgactacactttctccttagtttaaaaccacaatgagattaatatgcatttttggaggcaagagtagggaggatactgagttctttgagtcatttggtagtcttttcatggtnnnnnnnnnnnnnnngtcatttaaagaaacttaagaagaagaaggatttctggaaattacaccacaattatacaatcttgctgtattatttagcattttgctggtagctacacatagtgttcaatagtgaacaaagaataattcctaggcaagaaattaagaaaacagtgtgatacctacgtatctccttgtcaatgtgagtcctatggttcttcattcagaatgaaccctcattgagataatacagactgagacaatatctagcgcaagctgaaagttccttggactaaacaccatgggagaagaagatattcttgctgtggaaatttttatggggtagaccaaaccatatctatataaatattccgttatacagctttccttacacatattttcagatggttccatttatttagttataactggagaactgactttaattaacaaaaatataccggcatactggttt

SEQ ID NO: 17130 - DNA, 818 bp, Homo Sapiens
ctttcacctaatcatgaggaagtttctttgtctagatatcctacttctcatttgatgtctttacattcctagagccacttttctcttgtaataccaggtacttctgcttatcccttatcttaccattttaaaaagaaaaatacaatttaccaggttataacaaaaaccttactactacaacagagttgtttttgtctgttattgttttttttgcctttcatcaggtacgtttacatggctatactcagtgtccacatttcctttttaaactttattaaaataaattttcccatttttgctacgcagtcttcttagtatttaatggctgcatcatatttcatcacactgatatatcaatttactaaattatattcaccaacagggagatatgccatttccaggttctttgactttattctttttcactattgcaataaatgatgaaattatgttaaactcttgtatctattacataatttccacagaattccagagtaagatgatcataatcctaaacacaggtataaaaaaggctggaaaatcataatcccaattatcttggaaactttctaaataaactggcatgctgcttttcatcccactttcttctacagtgagattttatttttgatttttcagagatggggtatatgttgcccaggctgagactttatttttaaatttacataactattagttgtaaatggcatctcacttctgtagtatgagctactgaaatagaataaagctttgaaatcttaaataacctaattatatctatataaaaacatgtacaccataaatatatacatttgtca

SEQ ID NO: 17131 - DNA, 871 bp, Homo Sapiens
gcacgaggcttaatctatacagaatcaagtagataaaatcagattcacattagtgaaaaatctctacaaaatgtctttgaaaagcaaaacgagactgcctcttaacaattcgtatcctcatgaaagacgtgggctgtaaaaataaagcagtgtgtttagcacaaactagaagatatctgcatcatttttttcacagttatttccatctacagtctgaaagaggtagatttttctgcaacacctgagaattgaattgtgataaccaggtgtaataaaggcagttgcatacataactgaaaaatactggtctcaagaccaagaaatgtactcctaacaagtctgaggatgaaatggtccatattacccaagacccaagttttctctacaccttggagtccaccgccaatataaataatacacatcacgattccatgatggtgcaacaattgcaatttaagtgaattcaacatttaaaccttttctgggccagcctagtagcattacagtgttctagaatatggtagatatggggtgcgctacaaagccacaacactgggctggtgaggtgatcactgtaggaagatgtccttctcagggggtcccatttgtttttattcacagggtaatgggaggaagggttctgaaaggacaacaaatgcatcccagacagaatccatatcctttcaacactataatagcatctagctaaaaatacaaagtaagccaaaagcagcaggccaagtactgttaatcacattgctttaaagcccttggaagtatgcaacaggcccagatttacaatcttccacacaggacaagcaccacaaagaaacgtggtgggctacacaatggctaataaaatgttaaaagc

SEQ ID NO: 17132 - DNA, 866 bp, Homo Sapiens
  misc_feature (78)..(106): n is a, c, g, or t
gcacgaggcaccaagaagccaaagctgacatagagtaaatgggctctagatagcatatatgttttattggtgaaaaannnnnnnnnnnnnnnnnnnnnnnnnnnnnacatttttacccccaatgtatatgaccagatcttaaaaatgtatgaaatggctagaagtccacattgtttgacaaatgttacgtaaccctgccaaagttctgatggccaccacagatttgctgtttgaattatgtatgctgtgcctttctgaggaggctaagaatataccattctgctattagcactgggttatgttgtgtttcttagagctcatggttgactgatggttctgctcctaaacagaaaaatgctgtggccttaatagtaactcggaaactttcctaagattcctcctttcaaggcaagtctgcgcatcatcgtgtcatgctgcagttccctcagtagctggctgggtcaagcagaaggagaatcctctgggaattaagagtgctccacactaaaggccaagatggttttgtgcatgtgtgcacacatgtgtgtgcacacacacatacaccatttggggacgtaaggtatgaaatatctgtctcaaatcagtctataaaatgcacctcggttggctacatatgttatggaaccatgtgtccccattctgtgggaacaattccaattgctgaaaaagactgaaattattctgatatgcagcaattctacaatagcaacatctagctttaaaaatatgaatcctcactcaagagataaatgcaatagcaacagcttttgtggaagttcacaaattgatgttaaaatttatctagaacagtaaagtccagaaatagccgagacagttttgcgtga

SEQ ID NO: 17133 - DNA, 706 bp, Homo Sapiens
  misc_feature (92)..(124): n is a, c, g, or t
gcacgagggaaaaatgaacggccattcagccagtctgacaataaagataatttgtgaatgttctgtaagaatgtaaaaagatgattctaggnnnnnnnnnnnnnnnnnnnnnnnnnnnnnnnnntcttaggtaaaaactcttctcccagtgaattcttttattatttaataaaaaataatgtttaataagttccagctttctatatatgtcttatgttacataatttaagttataatttatatacagacagttttcaacttaagagtcttttgactttatgatgattttattgcgatgtaatgtcattgtaagtagaggaacatctgtacttacaatgaaaatgaaattgaatatattttaatgatccattttatataattgcaatgtatgcattatataatacatatatgcatgtatatttactttattattcagtttaatcaaaagtatatgtaatctctttatatttattgactcctgattgtctttttcaactgcttataattaaatgaaatgtctgtgtaagccacatagaaaagtgcttggcaaagagtaggcattcattaaatgtcaactattatcattagtttagtttttaaatgatacatagtgatacaaagtagtagatattagagagttcagcctggataacttacaaattgattgtatgtgtgtcttcataactaccttgagtgggaaagagat

SEQ ID NO: 17134 - DNA, 618 bp, Homo Sapiens
  misc_feature (48)..(57): n is a, c, g, or t
  misc_feature (72)..(109): n is a, c, g, or t
gcacgagggtgatgcaaacatgtttttctcttctttttattaaaagtnnnnnnnnnngagggatgtatgtgnnnnnnnnnnnnnnnnnnnnnnnnnnnnnnnnnnnnnngtcataggattacatatacatgaaaagagacattgaaaccactgacagtatttcaaaatatattttttcaagtttaagttatacttatcacatatttatgctggcttgctggaattctgaaatgtgagttcatcattaaaatggctataatttcttataatacagaaataattatttttggccaatcttgtgatcattcccatgtgtgttaatatcccttcccttgtcttcctttgtgtaaaaataggtatggacttactggaagaaaagtctgtgcctttttacctctcttgggttgcttcttcaaagggttgtggatggggatgtcggggtggatattcctgttgagagtcctcatgtagctatcacaggaatctctaatggaggacaggcaggatctaatgaacagcaggatgcaataaagctgttaagtcgagccctgcatggttctggatttcaattattctgtgtggctgatgagattctgaattaccaacagctgctcattt

SEQ ID NO: 17135 - DNA, 933 bp, Homo Sapiens
  misc_feature (458)..(500): n is a, c, g, or t
  misc_feature (509)..(663): n is a, c, g, or t
  misc_feature (685)..(698): n is a, c, g, or t
gcacgaggattaaaaagaaatgttgtgtttttatgaagatccatatagcattgctagctttccaggtggagagcaaggacctccactgttttttctactaaagctttattccaacttcttctaaccctttcttcccccacttttaaagatatttgggatttgtagtgttcaaattgggttaacaaacataaaaggatgttttctggacataaaggaaatttgatttacagactttttccaggatttgttaataaacaaacgctgacatcttagaataaattaagtatcaatactacacgaactgaatttaatattctttgtgtttttttcataatttaaaacaatttaacaaatttcaaaatgtttaatgaaaaagttaataaaattctcatatttttgtacattatttaatgtaaaaattactgtacttcctacattgtatttgaaagtatataatnnnnnnnnnnnnnnnnnnnnnnnnnnnnnnnnnnnnnnnnnnnatgtaacannnnnnnnnnnnnnnnnnnnnnnnnnnnnnnnnnnnnnnnnnnnnnnnnnnnnnnnnnnnnnnnnnnnnnnnnnnnnnnnnnnnnnnnnnnnnnnnnnnnnnnnnnnnnnnnnnnnnnnnnnnnnnnnnnnnnnnnnnnnnnnnnnnnnnnnnnntgcaatctaatttaatctcttnnnnnnnnnnnnnnctgtatacccaccacatattatctttctcctgcatagatcagaaataaagcaagacacataaggcagtaattcctagggttaagtgatataaaaagtactattaaaaaatacgtctctgcacaaattatttttaacacctagtttgcattataaaggcataaaagctttatacacttttatcgcatgaaagtttattaccaataaccaggataactactcattgcttttaaagaa

SEQ ID NO: 17136 - DNA, 775 bp, Homo Sapiens
  misc_feature (414)..(429): n is a, c, g, or t
gcacgaggcttcccagcactgtccttctaggcgacccatgtgcatggtggatcataatggaaagtaaatggaaaatgtcatttatctacttactcaaccggcagagctctggtaagtgtttttaatggttagtatttgaagaataataagacctgtaatggaaacggaagaggatgtcttcaattaatttttgttctgtgactgtgccttctgaatggtaggacagatggacaaaatcaaggcataggggaaaaatagctgaaaggtatttagagggcttttcaaagagatttcatgaagaaaacaaaaagatgtgctttttaaagcatttggctacttatttgtaattaaatgccatgttttatctctcctgttgaactgctagtcttctaatgaggcatctctttgttattnnnnnnnnnnnnnnnngaaagtaaaaatcgttgttgaaatcaaacgtaaagacatgaaagtgtgctggggagataactatagagtaaatggaccccttcatcatgacagactgaatgagaacagccatatcaacaagaaggttcttaccgaaggctcctttcttccttttgccaaaataaggtttcacctacttgcctcatcttactgggcaaaatactctgagcgatcactaccatatataattctgtatctatctaccttgcctgctttcttcatctcacctcaccccacttcatgccaagatgggcatcagaagatgccaaagatagcatcaaaaggaagaactgaatttctccaactg

SEQ ID NO: 17137 - DNA, 787 bp, Homo Sapiens
cctataaaaagatcccccgggctgcaggaattcggcacgagggtttaactttaaaaccataaaacttgtttttatgttaattcaatctttgtattttcccttgaacttacgatttaccaaggaacaaataactccctacaacatgatctttcaatatgtctgcatgtcagaatattatgatttagagcaggctgtgatctatgtcgggttctactgtgtctatgttgaattggtctactgcactaaaatcgcatcttggtgatgctccagtgcacaaatgccccaagatatttactctagaagtgtagtgtaactgcggctctttggactaaggtctctgaaagggtcaattttgtactgaactctgggattactgggtaatacatctcaacctttctagctaatcttaccttgagctcaaatggttccttagatcatcctgacatgctagaaggccgagatgatgacaaagtccaagacaatgaaatgcctaagtgtggaaagctgcccttcctaactgcagcaaatcacacacagtcaccatcagagaggacagtccattctaaatctagcatatgtactcaaatttcttgaaattatgtatccataatagatacataaagacctataggataagttgcaaacatagcgtatttgattgtatatcagttgtatgagtctatgaaacacttctgggtattatcagaatcaattttgtgagaaataatatatatatataattttaaaaaattatttgtatggaatttccactttgtttcggtagaaa

SEQ ID NO: 17138 - DNA, 681 bp, Homo Sapiens
  misc_feature (244)..(254): n is a, c, g, or t
gcacgagggtttctttatgccattttattcccatacctaaaattgcatctatttgtgagctttctgcctttttgtaacgctcagtgcaccaaaagcgtctgtttttagtgcagtcacataatatataagtgtgggatacccttctgcagcttcagtgagacaaatcactttttaaaaaacattccattttattggcatcactagatgtttttaggaccctgtccttttcacttttctgtaggcnnnnnnnnnnnaaatggaagatgattattttgtttgttcttgatttcctgttattgaaaacagcatcttccttcttgcaatggccactaatagcacacaatgcgttttctttgattgtagcagaaaatgcaaatgataattgtatgttgggctcgatgaggccttgaacatagctgagtcctaatcagatgtatatactctgatgattacaaataggtacatgttgggtttctgtgatgtttcaaaaatacaattatataattatgatgtaaactctttaagaattcaattataaaagcaataatcaggtaacctctatttggagctgctacatccaatattgtgactgaaaattaactaaagagagataatttttcaaatgatgtataatttgcaatattttcccttgcaactttagcaaatacacatattccaagt

SEQ ID NO: 17139 - DNA, 884 bp, Homo Sapiens
gcacgaggatatagttctccttgcaaaatgtggatcagcctttctcagcaaatcctttgtcataaagtgctgaattgtaagtttgtcatgagaatcacatgagatcatgcatgtgaagaacctggcattatcctcctcatagaaaaaaaccagtaaatattaactacaggaagcaaggaaggagtggggtgaggggaagaagaaggggtactgatttaaaagaaccctggagtcctaaggataatctaggaaccctcagacccaatccgatacccctattctaaatgctcctagtgccctgtaccttcccctcataagccttcattatcattgtaatgatatgtttatgtaatattttgattaatgtctctccttcactgacctagcagttctagcagggcagtgattttgctgtgttgcatccccagcacctagtctggtatgtggcattcagcatatgtttattgaatgaatggccatgtggttattcagatcctccttgattattggggttaggattgtggcagaagtggcaaaatcagggagagtagtccctgtcccctctgtatcttatacactgcccacactcccaacacacatacacatacagagaattttgtctcaattagataattaacttctgcttggttgtaaaccaaaccactggttcttaaactttcattggatcattttattgaagaattaaatagtgtggttctggcctaatgtctggaaagccttgcagaggagtggattaggtctttgtgataaacaggcagccttccctgctcctgtgtctttataaaatctatttaactggagtagtccaccctccctcaggctcttacaggaatatgttggaaggctgtaggaaggtggggaaa

SEQ ID NO: 17140 - DNA, 338 bp, Homo Sapiens
  misc_feature (52)..(62): n is a, c, g, or t
  misc_feature (178)..(289): n is a, c, g, or t
aaattactttaaatttccctttttttgggaacaaaaccctcctaattttaannnnnnnnnnnacatacccccacacatttttgggggtacttttttcaattttcccccctttaaaaacacccaaatccattttaagggaaactgtatttttttctcaaaataaacactttttgtcatnnnnnnnnnnnnnnnnnnnnnnnnnnnnnnnnnnnnnnnnnnnnnnnnnnnnnnnnnnnnnnnnnnnnnnnnnnnnnnnnnnnnnnnnnnnnnnnnnnnnnnnnnnnnnnnngggggagggaatgtttaatttttttgcaaagggtaaacaattaccgtcc

SEQ ID NO: 17141 - DNA, 215 bp, Homo Sapiens
  misc_feature (59)..(72): n is a, c, g, or t
ggggaaatgtgaatttattgacaaaaaaacaagggcaaggaaaaagaatttggaggggnnnnnnnnnnnnnngcaaactgaaaatccaaatgaacagggataagggtactacagggaaaaaaacccatcaaaaactaggggaggtaaatgcatctctgcctccaggaatgggggggtaaagaaagtcatttcaatggtttctaatgggtgcacta

SEQ ID NO: 17142 - DNA, 873 bp, Homo Sapiens
  misc_feature (649)..(679): n is a, c, g, or t
gcacgaggttcagattcagagcctgtgctctacagttaagcctcttttgcacttaattaatccttcaactcaccttgagaatttggcagctgaaaaaactcttagaaatcatctagaccaacagttacccaaatctgattgtgtatttatattaccaatagtacctatggaaaattttgaataaccgtcccacagctggagctttttattcatcaagcctggcaggaggaccaggaatctgcagttttaacaaataactcaggtgcttctgatgcctttattctatgaatcaatgtttatgaacactgcttggttcagccccacctctacccccagcttctgcctgccattccattgttttttacattctgctttgcagcggagagcccctcatttttctcagctgccacaatggaatatttgatgtgcataccccaggtagtcagcactgaaccatgatattccaaaggattcttgctatatagatatataatattcttgttgaagaagtgctgagattactttgaacattatttccaaagagaaatttaccattgaaaacacttaatttgtttcagcgcttactttaatatattttagaatgtatctgtttctagtgcctgtgggtttctctgataatcgcgtgcannnnnnnnnnnnnnnnnnnnnnnnnnnnnnntattcctacttgccttacaaagccaaggccatctttttaactgtgagtcagatgtaaagggtactcaggtagtgagactttagcacatacagtctccaaaagagttcaaatataacatgtttttggcctttatcagtgtacagcttcaagaacacagcacacataacaataggagagggtcagagattgcaggg

SEQ ID NO: 17143 - DNA, 948 bp, Homo Sapiens
gcacgagggttttatcaatgtttagaaatgctcacaaataaagaatgttgaattacattctgatgaatattaagaaattcataggtttaatccaaactattgaaatatggaaaacattggagatgttttcaagaaaatataatttgttttgaaattgtctgtcttttctaattttatgcaagatttgcttctcacttgactaggtggcaagcatggtattagatttgtaaagctttttagataagctttgctttagaattgcaaaatgtacatgttttattcatatctagtgatctggtaggatgcaaataactgacatgaaacaactatgcagagtttaagcttgtaggatcagatctcaatggattagtaatggtggtaaatagagcataaggacaacatgaagaagtaaaagtgctttaaaagataaaccatagatgtcaataaatctaacacttttgattaaataatattgatatgatattcatcctagtttgtaaaaatgagccattataatttcaactgaattttacagaaagaatgtgtcatctgagtaatttttccaagtatattgtgaaaggttttgctagaaattgaactgaagatgaactacttttgtattttatccttatgtatccttaagtattttattgctaaaatatgtgtctattaaatcaatgtactcaatgtacatctctgtggaaatcttctctctgtacctaacctctgatatgttttctgaaggatgaggaagatggagagaatgcccacccatatagaaacagtgaccctgtgattggggacccacacagagaaagtgtccctcaaagccagtgactccatggatagtctctacagtggacagagctcatcaagtggcataacaagctgttcagatggtaccagtaaccgggacagctttcgactggatgacgatggcccctattc

SEQ ID NO: 17144 - DNA, 713 bp, Homo Sapiens
ctaaactcagccctcagtcactttctcaaattatttgaagaccttccaagttgcttcagaagcattgtccaaaggagattattcccagtagtgaagaataatagatggatgagaatgtctaaggaatcctacttctgtcgcagaagtggcactctccagaacctcaagggcccatggagttcatgggctttggagtcaggcagagttgaccctgagtcccatcccagcctcttaatagactagttacttgacttggaacagttatgcaagacaaagcacaatgatactgattgcagtaatgggaacaattcattcctctctgtatccatgccctttgcaatgcatgtttttagctactcccatggagggaaagattctgtttttccagtccttggatctgactggccttatttgctgtggccaattcatacttactgttctagtgaaacaattaggcatgttttgctcctcattctagactttaattaaaattaaaattttatgatattttatttctactgtattttgctgtattcattctgctcagtattctagttcactggtcctcttatctctgtttaatttagtggtgaacctatacattgtctggtaacttaattttgtattttcgtattctattgggctgtcgttcaaatgtggctttttaaacttcagttacttgttctttctacaaaaataaacattgattttct

SEQ ID NO: 17145 - DNA, 759 bp, Homo Sapiens
ctattttgttaattactctatctctagaaactacaatggtgctgggcacacagcagatactcaatacatttatgtgtagaatttgattcttgcaaatattctttcatccagtttaggtggctggcgaaaactgaacatgtcttctagagtatctgggcccagcattgaaagacaataaatattagtgtgacatacaggggtaaaccattccatttttggctttaaacataatagaaggggacattattcttgagcttttttatgcctttcagtcatttatgtgcaacattaaaatattttgctacttttggcattcttccaatcccagcttgcctgctggactgcttccaattttcttctctctcctttcctgttctttttcacccaacagctgccatgtaccgaatgtgtatgccagactctttatacacattatcttatttaatccttacaaaaccactgtgaattagggagcattatctctgtttaccaaatgaggagacagttgcacagagaggtaaagtggcttgctcaagatcacatagttaacaagaagttgaagcagaatgtgtcagatcctaaagtccacgcttttaaaattatattatgatgtcaccaatatgcataatatatcttatatgtccagtttcctagtatttaaattttggcttttcaccctcaattatttttggagattatactggaaatgacttaatgacacactagatagtaaacttcatgtggatggggttacaggcc

SEQ ID NO: 17146 - DNA, 906 bp, Homo Sapiens
gcacgagggtaatatttctattgaacatattaatggaccactgctatcatgtagtttttaatttagaaggctcaattttagtttttattagaaagaatattgtttagtatcaaatgactattaaaagtatatagtgcaataaaaagaaagacgtgaaggaatgtggaaacattaaaacaaaatcgaacctccttaagtagtagttatatcagatgtaattaaaagatgggatgtaatttgactatcaaatacttgaaccaatgcttttatttgtaatatatatatgtgtatatatgtttttgattaccaatattaaacacaaagtgaaacactattgatttgaagcactggcccatttaaaaataatttaaatggttaccccagaaccttgtcgtaattttattggggatttttgtacaatatatagccctagtttcgtctccaacgttctcacctttaagaaagcatttacatttcctatcctctcccaactgggagaatatgcaaatattataaaataaaattctcttttagaaatagttcctaaaacagtactttcctttaatacatttgcaaggatgaaatacaagttcagaggattaagatccttttatttgacagtatctctttaaatttacagagaaaatagtggcagattttctaattcccgctctttgttcttacctcttctactggaggttttggggtctgtgtctgaaaccttattattactaaggtaatttgttaaggctttttgcttgggtgtacaccactgggattgagatgctttgtatttccactgctctgtgaattccttttttatttcccccagcttctggggggaggcatattcaaactaggaagtttgaatagcagtaaaacacacatttgtatactcgttacaaa

SEQ ID NO: 17147 - DNA, 582 bp, Homo Sapiens
acatatgcagatagcactaagcaataggatttcatcattaaaatgaaagagaggagtttccctgaagcaccttttcttttatcatggagttgctgatgtcaagggtggcttcaagggagagccccaccctgccccacgccctgccctccgaccctggcaatcgcagcatcactgccctttgctgatggagaggacagaggggcaggggctgcgtggatgcgttctgtctcacctccatcgataaatgctcacagggcgggtttgcagtggaactttatagttcacctggggaaacccctttgcagggaatcactcatccctggcttggttgcaaaagctgagcttttttcctccccaacgctgtgagcaaaggcaagcagagccagtgagaatttgctcccagcctgcgtaactctcactggccttcccttcattccattttcccagcccaggacacagggattgtctgagttattaaagcagagaactatggcaattaggtagctaattttaggcctcagactactcttctgccaatcacttgagcattttacactaatattttggaggcatggttatccc

SEQ ID NO: 17148 - DNA, 934 bp, Homo Sapiens
gcacgagggtgcctcttacataccagctattttgggtactgtaaaatacaagattaattctcctatgtaataagaggaaagtttatcctctatactattcagatgtaaggaatgatatattgcttaattttaaacaatcaagactttactggtgaggttaagttaaattattactgatacatttttccaggtaaccaggaaagagctagtatgaggaaatgaagtaatagatgtgagatccagaccgaaagtcacttaattcagcttgcgaatgtgctttctaaattataaagcacttgtaaatgaaaaatttgatgctttctgtatgaataaaactttctgtaagctaggtattgtctctacaaaattctcattgtatagttaaaccacagtgagaagggttctataagtagttatacaaaccaagggtttaaatacctgttaaatagatcaattttgattgcctactatgtgaactcactgttaaaggcactgaaaatttatcatatttcatttagccacagccaaaaataaggcaatacctatgttagcattttgtgaactctaaggcaccatataaatgtaactgttgattttctcacttggtgctgggtactaggtttataaaattgtatgatagttattatattgtgcaaataaagtaggaaaatttgaataacaatgattatcttttgaatacgcatacgcaagggattggttgtctgaagaatgccactatagtagttatctattgtgtgccaatctcattgctaggcatttggggatgcaaagataaaccatctttattgtgtcttgggtagcagaagaaaatatgtgtaaaatcaatttataatttgtaaactgccacccatatataagctatatctgctgaatgatcattgattactcttattcttagagatacaactggggg

SEQ ID NO: 17149 - DNA, 906 bp, Homo Sapiens
gcacgaggcgagtgacttcacccgccctgtcccccacgtcaggacaggcttgaggcctctctgggcgtgagcgaggaaaccaggctgctctaacttctgaagagtgggctctggctcaagactccaatcggccagaagcccacagagatcaaagcactagcaagttcagctgtcctggccctcgggtagaacccacgggcgtgcctgggtgcggctccacccacatgccccactgtcagcccaggcaggagccttcctggccgggctcaggatctgcctgcagcccagccaggccatcacccagccccgatgcatcctggcactgcacgcttactcttcacaagcacttatacgcggatggcctccgagaccctgcctccctggtctgctgaggtcaggccaggtctcccacggagccgggcagctccacaccccaccacctggcaccgttaggtttcagatctcccgtgtggtgtttgatgtcggcttttgttcctaccttgggagtttggattgtttcctctggtgtctttgtttaccttcctcactgttctacctcctggccaggtctcagcttagcttccctggtgtggggtgtttttcaagccttccagccacagctgtctcccctcaggctggacggctccggggtgacagggcttcaccctctgcctgcagacccctggtgggcacatctcacaggcttccgtcttgctgagttgggtacggaggcagaagtggggtgtggaggaaagtcagaggaaatctgcttcagaaaggagggtcttttagacacaaagactggaggccctccccgcccgcacgggagctgccatcgtggggtctcatgcacgttcagaccttcccacatccaaactcagcttccagcagggaattttgacttgg

SEQ ID NO: 17150 - DNA, 848 bp, Homo Sapiens
gcacgaggagagaatatcattcaacactgtcatctgtgcgcccggaatgagcctaataatcatagccgagggcagcctgggcaacaagaaagaggcagtcactcaccagaaaaccagcaaatagacttcacacagatgccaccagcccctgggaatgcaaataccccctagttctagtgggcaccttctctgactgggtggaagtgtgcccatgtcactccgaatgagcaactgaagtaaagttttgctcaaggaaagcgtaccacgatacgggctccccgacgtaatccaaaatgataatgggcctttgtgcacctctgagataactcaacaaatgaacgaagcattggaaatgaagtggacgctgcagtcagtgtggagacctcaatcttctggacaagctaagagaatgaaccgcagcctaaaaacattcattgccaagttgtgtcaagaggctccgttgaaatggactcaggtacttagcattgcactgctccctgtaggtgggattaaaataagtccctgcgaaaccgtctttgggagaccctttgcagccaatctgtctcgggccaccaaagtgcccctaggtagggagtcggctattcagaatcatgttgctcacttaggacaaactcttaacgttttgcataagtttgcttccaacacggatgcggtgaattccacagacacctgccacccactcctacctggcgatcaagtgctgctgagggaatggaaggaagctgctgcgatgggaaaaatgggaggggccctaccacgtgctcctgaccatggacgcagcattgaagctggcaagcatcaagccttgggtccatcacacatgagtg

SEQ ID NO: 17151 - DNA, 893 bp, Homo Sapiens
tctttaaaaatcccccgggctgcaggaattcggcacgaggctggtttaaataaatgtccaatttggaggatgagtctgtctttttccttcttctgcgtattggtctccagattttccatttcttcagttagttttcgtaactgtagattcttaaaagaaatgaacacttctcccatacttgtaaggtgttgtaaagatgtgtaaagttttcactttttgcatcatattcacatgtggctatatgcccttttgtcttcaaagttttctttatcttgatcacttatcagaggcgtgactgttttattatcttagtcttttgaaagaatcctcccttagttttattttttaaatttagtgggttgttttcacattttccttgtgtcttaattatttcccctttttgtttattttgctttttctagtttagtggatcaatgtaatttaaactgctttttaaacaaacctgtaatggtatacattttctttgggtgctgtttgactttattgcacaagttttaaaatctattttctaaatagtttgtattttccaagtcattttattgcatcctctgttcacattgctcttactattaaaactttttatttgctgggattacaggcgtgagccaccgtgcccagcatggtatttatgattctaagtgccatttcaaaaatctgtttgctcttttttattctctggtccactaaagagtaatctttactgtgggctttatttcatatttttatttgtcccaatactaagtggtagcttctcatttctctgtttcttgatttttggagagcaagtctatgcttatctatagaataaatcatttgtaaacttatgttctccttgaagagtttttgatttcctggggcacttatttttctgt

SEQ ID NO: 17152 - DNA, 918 bp, Homo Sapiens
gcacgaggcttggtaattcattaaggtaaaattatttcaacaagaacctcagtgctcttatagctgttttacttctgagcttttatttgaagtacacgctaaaccatgaagtaaaagtatggcgtgttactccaagcacaatgcaagtagtccttaaaatattcctatctcccttgaatatacctctaatctacaagcagccaccctgggacaatccctgtgtgtcttttatgcaaagacaataaagcattcaacagggaagggacatgagacaggacccaaacaaatagagtatatgccacatagggttcctaaaagcaacgtttgtcttctggaggcaattagtaatggcatcatgctgaaggcaaatgcctgttgcacaggcacatacaggtggtgttgagtatacagctttgtttctcaaagtagaatacttgggctgctagttaaaatgtatattcctcctgggctctctctcagattagtcaatcaaaatttatggagtagggcctaaggattgaatttttaatgagcttcccaggtgacgtgcactgaagatgctcaccagcgtatacaaagaggatggaatgacataagtaaaggtgtaggagtaggcagtacacccattcaaccaaccatatttataaagcatcttattaatgttctaaatgctgtgagtgtggctgattttttttcccacaagaagataagtttaacagctgacagaagtttcagtagcattaaatctcttcacgctatggtggaaaaaagaaataacagacatttcccaaagtaacttgcaggatacttggtgtgtattttcagctctccttgaggaggcggcagatgcttctgttagaaaccctgaaggtgaaacagaccattctggagccaatccctacttcactgaagttgccc

SEQ ID NO: 17153 - DNA, 769 bp, Homo Sapiens
cctaaaaaaaatcccccgggctgcaggaattcggcacgaggtgatgatatacagtttcggatgttaatgctagttgaaagagagaaaaaatatcaagtagaagcagaggacaggatcattggaagggacctgagaaattgccgcttcatccattttagcacacttattagcatggcatgtaccaatattaggatattgagtgacagtgtgtgagtttagctctgcctaatatattactgcttgtgggatctttgggagactgtatcctctttgagattgaatttcttctataaaatgagcataatactaccttacttaaatttaagggtcatcatgaagataaatgtactacacttataaacagtaaagtactacaaaggaccaagcaaatacgaattattttttgcagtggagaaacaagcgcccggtgagaatatatgacctaaggttctgtagtttatgacctaaccaggcccagaatgaagtttttcatatcctagtagtgtgttttttctgttttgccaaaaaacagcatacctcagagaaggaaaaaagtgtgaattgtgggtatattggggttatcagtgtgcttctgagggaagacaggcatcactacttcccagagatgccctggaaatgatatagaagatgctgaagaattcaacgtgataacagaatgaggcatttgtagtattgctgagaacagaaaaatggactaagtggaaaatttgtttgcatgtccttgaatgtagatttgttatgtgaacaa

SEQ ID NO: 17154 - DNA, 395 bp, Homo Sapiens
gcacgaggcaacaactcaccagactatattccaatctccatggaacctgattcttgcacacagcctctttcaggaatggagtcagaagagcagtcttcagagaccacctcagtttggaaaagcctcctccttcagtggttcccagccatggagtcatcgtgaaggggctccatggtcaataattttacggtactgcacttggttatcacagacagactttttcatgatagcatgccatctctgtctatatcattttcctctgcttaggcaggctgacaactctgacagccaggggcccgaatctacctggcaaatgtgcatgctctactctcagtgcaaaaggcctgtttgggagttctgactagtgtcacaataaatgccgccattgcctagtg

SEQ ID NO: 17155 - DNA, 808 bp, Homo Sapiens
gcacgagggcgacatgtcgacctgacgctctacacggccctatgatgccaagtagagaaatccagcaataaaaggcagatatgcgacctaaagtcatgtggcacctccttcgaaggtacatggcatcccggctccattccctgcggatgggtggctacctgttctctggctcccaggccccccagttgtcccctgctctgttgagagccctgggccagaagtgccccaacctgaagcgcctctgcctgcacgtggccgacctgagcatggtgcccatcaccagcctgcccagcaccttgaggaccctggagctgcacagctgcgagatctccatggcctggctccacaagcagcaggaccccaccgtgctgcccctgcttgaatgcatcgtgctggaccgcgtccccgccttccgtgacgagcacctgcagggcctgacgcgcttccgggccttgcgctcgctggtgctgggtggtacctaccgtgtgaccgagacagggctggatgctggcctgcaggagctcagctatctgcagaggcttgaggtgctgggctgcaccctgtctgccgacagcaccctgctggccatcagccgccacctccgagatgtgcgcaagatccggctgaccgtgaggggcctctctgcctctggcctggctgtgctggagggaatgccggccctggagagtctgtgcctgcagggtctcctcgtcaccccagaaatgctctctcccactgaaatcctctcctcctgcctcactatgcccaagctcagagtccttgagctgcagggctggggtgggagggt

SEQ ID NO: 17156 - DNA, 1051 bp, Homo Sapiens
  misc_feature (315)..(998): n is a, c, g, or t
aataaaaatcccccgggctgcaggaattcggcacgaggcttcgaagttcctgctgttgccccttcctggtgggggagacactgtcctgtttcagtcattccgttgctttgctttatagttttattaatgtgtttgtgttggctttgcatgttttcaaatatatgaatgaaatcatgcagagtttattcttttacagtttgccttttcacttgattatgttcctgagatgtatccggattattgtgtgtagctgtatggcattccttttccctgctgcctagtgatccattgaaaatacaataattgatttttctnnnnnnnnnnnnnnnnnnnnnnnnnnnnnnnnnnnnnnnnnnnnnnnnnnnnnnnnnnnnnnnnnnnnnnnnnnnnnnnnnnnnnnnnnnnnnnnnnnnnnnnnnnnnnnnnnnnnnnnnnnnnnnnnnnnnnnnnnnnnnnnnnnnnnnnnnnnnnnnnnnnnnnnnnnnnnnnnnnnnnnnnnnnnnnnnnnnnnnnnnnnnnnnnnnnnnnnnnnnnnnnnnnnnnnnnnnnnnnnnnnnnnnnnnnnnnnnnnnnnnnnnnnnnnnnnnnnnnnnnnnnnnnnnnnnnnnnnnnnnnnnnnnnnnnnnnnnnnnnnnnnnnnnnnnnnnnnnnnnnnnnnnnnnnnnnnnnnnnnnnnnnnnnnnnnnnnnnnnnnnnnnnnnnnnnnnnnnnnnnnnnnnnnnnnnnnnnnnnnnnnnnnnnnnnnnnnnnnnnnnnnnnnnnnnnnnnnnnnnnnnnnnnnnnnnnnnnnnnnnnnnnnnnnnnnnnnnnnnnnnnnnnnnnnnnnnnnnnnnnnnnnnnnnnnnnnnnnnnnnnnnnnnnnnnnnnnnnnnnnnnnnnnnnnnnnnnnnnnnnnnnnnnnnnnnnnnnnnnnnnnnnnnnnnnnnnnnnnnnnnnnnnnnnnnnnnnnnnnnnnnnnnnnnnnnnnnnnnnnnnnnnnnnnnnnnnnnnnnnnnnnntaaatttaggtgcacctttgcgggagatgtgtgcctgcgaacccctatttgtt

SEQ ID NO: 17157 - DNA, 887 bp, Homo Sapiens
gcacgaggatagatttaagttacctaaggtcaaaagaggcacagggtagactctgaatagttgtggaacctgaatattttgtcatcaaaaacaaagttaaagtcagagtgaccaggaatctgcaaactggctgtgggaatgggttgacttaaaagacaaacaaagaactagcctgtggggtaacatcaggctaggctcaccctcagcttctacccacaatatctgtatgatgaccatgtggatctaatgaaccaggaggggcccaaactcttccgactctgtggaggcctaaaggaaactgttgccattggaaggatgccataccactacccagctggagcttcctgaaggaagcagagcccagctggtgttccatggtttgttaagcatatgccatacctacaatcacttttttcatggtctggttgagcatatgatttctgaaccaaatagcctttctggtattgtgtcattggtgactcattatgattctttaaaaagacacattatgtgagctagaatggtgatgatttgggtaccttattcaaattgcatcatcatttaattcaagagaaaggccattcttaaagtaaaagtaaatgaggtttgtacacctgggtattggaattgccagtgggctgatctgacaatgtttgattcttgttttttctggaattattatgtagaagattcagtctataatcttcaacatgatgcaaatattcagtgtcataggatcaaaaaaatgctgggaaagtatctaaaaatcttttaaattcatatcttaattttcagtgttatcctcttactgcctacattcccccactaaactcttagattttctctgcttttgttaagaaagtgatgttagtaagcctctcaagtta

SEQ ID NO: 17158 - DNA, 670 bp, Homo Sapiens
gcacgaggctggggtaattttaaaatgttggtatttggatagaactgccagcccaggattttgataaagatcaaaatatatactgtatctaaagtttcttttttaaaagttatttcacttataatcaaaaggtttaaataagtttagtgtatattttatgattagtattattttgtatcgattcagagagaggaaaactgcattcccatagacagggagacttggtgcattaatatccaaagcttagtttaagctggtgatgattagaaaagtggctttcatttgtgttctctggaagattctcagtagtcctgtgggcatgtgaacaagagcatgtgtaatcttcataatgtatgtcttgttagcagaaatgtctgaggcattgctgagatgtaggatgagctgaggtactggttttgtctttcatggttccctattatgttttttgagaaactgagcttttcctgacagtgtttagtttttcttggctatttactaatgctattaatagtaacagtttccattatggagcctcagtaggttcttgacatacattaacccattgctattatgtaattttctaataaaatgatgtgataaaacatattttctgtaatatactcatagaatatgtgattataagtaaataaatagatgttggggtagtcct

SEQ ID NO: 17159 - DNA, 956 bp, Homo Sapiens
gcacgaggcttttaaatactctcaaattccattctgtgcaaatgttgtacaagtttacatcaattggcattctcactgtagttgactgtaactgtgattctgtacaaatctttgaagtctccaaaaaacctttgaaataaactcagaccaaaaaaagttatttttatgaggcaaccaaaaactggtgtttccatacttctgaagttctagttcattcttggctcttgagaaatcaacctaaaaaaacagataaatttaaaaacaaattgacactaggacaaatctggcactcttgaatttgctaacttatctacccagctaatctaaatcctataatacaaggtacaggtaggccacgaaaacggaagcaccactccttgaaaagaactatttgaagtaaactgataaatggagtattttaagtcattaataaaaacattcttttaaacaggaaccagaaaatatgctcttccctctttaattgaaatatctagaattccacccaatttacttgactttttctaaaaataaaggctatttcttaaacaaaaaggaattagggctgtatttaactcaattttgttgctgagctgttgaaacaaataagtgcctttccttcattctgtgataagtggctccatactttgctagtggtcacttcttttcttatttacaagtgtcaacactattctaaagttggctcctctgagacttcaatcacatcactaagatacaaacctctcatacgctgccaaagggtccctgtaggtcaattcaggcctcttttcaattccacaactttaaggaattcttccatcaagagaccttggcattgcctatgcaagaccgtgacaggtgaggttcagataccttccaatttcaggcattttaccacctataagtaataggacccaaggaacacttcaaggaagggcacacacccactcaccctcagg

SEQ ID NO: 17160 - DNA, 814 bp, Homo Sapiens
  misc_feature (112)..(120): n is a, c, g, or t
ctatctgataggaagagtattccattattgattttctttttctaaaatttcctggctcttcttgctcatttgatgttctatatgaacttagtataagcttgtctatctaccnnnnnnnnngtcctgtgaatactctcgtgggattgagttaaatttataagtaacttggcaagaacttataaaattatgatatgagttatctttccatttgttcatgtcttttttgtgaccctcaggaatattttacactttacagcacatagatctagcataattattaattttattaatagatatattagtttttgttgctattgtcaacaagatattttccagtttatcattctactgttgtttgtatatatgaaagttattgatttttgtgtggtaattttgtacccatccattttattaattcctctttgttataaaagtttttcaatggattcccctgagttccccccatatatacaatcataacacctgcaaattataactttactttttgcttttaaattgtatacctctgatttatcttgtctccctggtttcttttgtttctagaatctccagaacaatgttaaataaaagtagtgataattatttccttaatatattcctactcataatgagaatgctgctggtgtttttcccagttaaccatgggtaactggcttctggggtgactgagatatattttatcatttggaggaaatagccatctaattctatttccgtgagagtatttttatccccagatggatgttggatttcatcaatgtcttttcgcatcttttgagatgcctgatttttt

SEQ ID NO: 17161 - DNA, 877 bp, Homo Sapiens
  misc_feature (587)..(599): n is a, c, g, or t
gcacgaggctagaatttctaacaggttgtcattcagcttctgctaagccatgttcaaacagcttattccatttggaactgcactgatattaaaaaaaattccttatattgagctgaaatctacctatcttctaagtggtcttagttctgctctaatctctccttccaaaatctttggatcttttgaaaaaagttcctcccaagttcttttataagtgacatgacttttagaccccttcccatctttgtcaacaaaagtagggtgccagaccagtcacagaacactaaatgtcatccatgtttccttcagtagaaaccagcagttttaaaagaggtaagctgtgttcactaaagactgttccagcttgacaaatgcagagatataagtctctggtctttaatcactgtgggggccattttgtaaaacacacatactgtccagcagactcctttggtcatcccaaatacctccgaactccagggaagatgcattctaactccacgaacttacctattttgttaaccttgattagaccttctggagaagtaaccaatttgtccatcttaggagcaatttggaatgagagnnnnnnnnnnnnnctgtaacgcccatcctgcctgcagtagaccctttgggcttaagaggtcctacagattctaatagtttcctctttgtagatgtgttaacatatttaaaatacttaggacatggcctggtacgtgacagatggtgtttaacatcattgtcatatgaagaacactctctgtgggccaatggaggtgtgccttaaaattcttcatcttgcctgattttgtttgcataacttctggagagtctgtgtcctcctcatctaggccacctttcattttttgtgaaa

SEQ ID NO: 17162 - DNA, 947 bp, Homo Sapiens
gcacgaggctgggaatgaagccatgttcgctgctaacacttttggatgttgtgaggccacgtggagtgtgtgagagactaggttttatggatggtctggttcaggtaccaggtctgctggaaggttcctgttcggataagctggtagctacctagctctgagcctgccttcaagaacacctgtgttcatcctctgattctctgtgtgtacctcttgtggcgtttcctctcccgggtgtgaacatcctaaccgttattgtgcaaacccaagaacgtcagatcccaaagcacaacaacctggatggactttgggaacatctaagcaatgtaagagagaggtgcactgagagtacgtcttggtcccctccaccctgagagcatctgacggtcctcagtactgaactcccggaagctgctctgagcccggtgacctcatctgggccaggtgtggtgcctgagctgaatgctcaggtgcttacagtgttgcaatccctaagagagtagagtctggaggagaaaccgtgaaaaagaccttacacaccaccaagaacttccgaatgggcgtgaatccaccgtttcttctctttgcaaaaagaaccaccacagctgctcaaagaacacagtgaactcatcacttttggttcatcaaaaaatcatcgcccatgcgttattcctgagtgcattttcttacaactttttgactgcttccttttcttcttctcttaagagttgtgggcttaagaatgggatagagtcataatggcaacctccaagccctctcatttcttgattaagaacacaggtagacatgaatcccaattgtctattgctatcttatttatatgattcggggaaatacagcatgtaaaatattgctgaggagcctcagtgattgggttacagaagcagagtacgaaattatttttgccaaattaatttgtaatatga

SEQ ID NO: 17163 - DNA, 853 bp, Homo Sapiens
gcacgagggagagtttagagacattgtttggcaacctggcagcagtggccacagcaggcatcgtagtctcaggtcagagattggagcacttgctctggaatgggagatgggactccatagccagcactgagcagcaagtatcaagagtgccccagcagtaggtgctggagttaggctctctcctgtcgcaggactgcagtgggaggagagttgctgaagccaaggtttctcccaggtggtgagacttgcagccagggacagctttgtgacctggaactggtctgtgcatgtcattgctgggtgccccggtttgctcccttggtcacttgggagacggtgcgccacaagcattgaggagcaggagggtgacgaaccccactccccaagagatctaaccctcagcacggactgactctatgggaggggaaagtacagcctccccaaagccccccttgggccaaaggaaatgtgagtgtggtgccagccactgaaggtggcaccactgaagcctgggaatggacgtggagaaggggttctctctgtcatccctggcccctctcagtgcattgtcactgaggcctggggagtgtgggctgaaagagttcatttattgggtttctccaatggcttcacccccactgaaggcgaatatgcattgggggaggacgcttttcactcttctccattgctttcacccctacccctacctgttggctgttactcttatatgtcacctactggcctgcagtctgaactacaccacctaacaaaatagattgctacaacaagcaacattctgagataaccactgttaaacctatctgcaaccaaggaacttgtacagagcctttgg

SEQ ID NO: 17164 - DNA, 1134 bp, Homo Sapiens
gaggggcactgagggtttatttacatggctcaccctctcttttacaaactaaattaagggtttaagtggaatacacaaggcaatatctacaaacacccagggaagttaagtactgcctctctatttcatttggaaagggggagaatccccaatcaaactggttttgattcttaaaaaaggcgggaaaattaattcttggcaacctattggtaaacaaaatccctctaaaaatgccattagatagtgttcgcaatgaaaaaaagaagaagtgcttcaaatcaaagtctcaactggctgactctccgtggttaaatatgggcacaccccatatttagttctagaatatatgggatatggacaaggaattgaaacagataaaaatgtttttacagatactgtatacagaattttttttccattcatgccacttttttcttaaaaaaggtaaacatgtgtagcgcaaaatggcacatacatttttttaatattaactaatttttctggggcctctcacacttggtacaatatcccatgtacataatgtgcgaggacgagtatcaaagaaagactgattgtcggcaatggagatattttagaagaataagtgagcaacaactagtttttaaagccagcgcacactaaattcgggatgtgcaggaagcctcttggataatcttctctaagaaaaataactaacgatactactaaacaggaggaaatattccttcctttacgctgcataaagtaactcctagattaaataaatatatcccttatatgggcatcgtctccaagactcttgggaaggatagttcgtacaaactcacttcctatataaactcgtgctccccgcgtctgagagaaggtacttttctcacctctactcggtaatgcaattccacacaaaaaaatggggggcccgggatccaaaattccctatagtgaggcgtatatacgcgctcactgggctgtttttaacctctggagtaggaaaacccctgggttaccctatttatagtcctgtctggaccctaattcccttttttgccggggggggttaaaatgaaggaagccgccaccccaggtgacgtctcctccaacttggtgggttctagccccttaaggagttgaggg

SEQ ID NO: 17165 - DNA, 895 bp, Homo Sapiens
gcacgagggtccaatccagttagaataatcccattctccttgctaattcaattgattcaggaagcaggcctaagccatttatcccatggctattaccttgatagttattcattcataggtggccatgtgactgaagttggcctagtcactctgaaggaaggaattcttatttgtgcttgtgggagagatacactgaggagacccagattgcttcttattatggtaagagataagctttaatgtgaagtcaacattaggcagagcggagctgtgataaatgaaaacaagagtgaatatttggtctttgatgatttcactgttactaagtcacttaggcctgaagtttaccctatatatagacttcattttatgtgaaataatagttcaaatttgtatagtttaggagattatagtttcttagttgaagctccatttttctctgctaaaacaagttagacttcattaatacaagtataatttcaattctaagtcaggggagttggaagctgtatgctttatgctgttctgacaagactagattaatttggggtatcatgtttcattgaagcacactagccgattaatatgcccagagaagatgacagaatgatgaagaaagggctagcaccgtgaaagaagtattagatttgttttgcataattccagaggttagaactattcccaatcagtagaaattgtaggggaggtagaacctctagagaggttaagaaagatgcaatgggcataagaaataattttctaataattagaactgtctggaaatgggaaagaagggtgccacagcacagagctaaaattttgcctcccagagtcttgtaatagagggcttccatagctatacaatattgtggaaaattgttctgcataggtagga

SEQ ID NO: 17166 - DNA, 372 bp, Homo Sapiens
  misc_feature (62)..(78): n is a, c, g, or t
  misc_feature (123)..(139): n is a, c, g, or t
  misc_feature (153)..(274): n is a, c, g, or t
gcacgaggttttgaacagagacttcatttatttatgccattttttcccaagttgagtagggnnnnnnnnnnnnnnnnnaaatatattactctttataccatcgttcaactaaaatagatcacnnnnnnnnnnnnnnnnngagacagagtcccnnnnnnnnnnnnnnnnnnnnnnnnnnnnnnnnnnnnnnnnnnnnnnnnnnnnnnnnnnnnnnnnnnnnnnnnnnnnnnnnnnnnnnnnnnnnnnnnnnnnnnnnnnnnnnnnnnnnnnnnnnttctatcctgtaggagacttcctggttcgaactggttgctgggactcccgccatcacgtctttatcccaggcagggtcaggatgaagcaaagaccaat

SEQ ID NO: 17167 - DNA, 518 bp, Homo Sapiens
aaatccattccaatcaggattttgttttcccacccttctgaaaccaattgtcaaattcaccaaaaaattccatcttgccacaaatccaatggtcaattctcagtctttattttattgaacctctcaacaaacagctgcatttggcacaagtaagcacttcctcctccttcaaatggccttttctcttgttttctgaaacacaacagctccttttagccttctttgctggctctcctccctctttttgcacttaaagtttaggttgacccaaggctcagttttccagaggctctcttttcttctcactgggtttggatgacttcacctagtcccatgcctttaaatagatctataggctaagaattaccaaattaatataggctttaaatatatctataggctaagaactaccaagttaatataggctctaaatacatctataggctaagaattaccaaattaatcatcaacactgacccctcccatgaaccccagatactgatacccaactgcccact

SEQ ID NO: 17168 - DNA, 760 bp, Homo Sapiens
gcacgaggctagacaaacttttcttggtcatagtcatatattctttgtcttatattctttttatatgtttatgagtttggtttgccagcattttgttgattatttttctgtctatattctgagggatattattctttagtattattctctggtactgtttttgtctggttttggtataaggctgatgctgaatatagtctatcctggtgagtatgtaatctgcttttgttgggttggatgttctataaatgttaactagacctagttggttaatagtgctattcaattatatttttgctatttttctgtgtacttgttctatcaattattgaaaaaggaatgttgacttttctaaatatgtttgtagacttagatatttctcttttcaattctatcagttttggctttatatattttgaagctctgtcgtcaggtgtatgcacatttagaatagttttatgttttcttgtaaattttttttaaatatgcaatctctctcttaatcaccagtgattttcctttttttatagtttactgtatctgacattaaccacacaagctttcttttgactaatgtttgcatagtattttgcttttcatcttttaaatttaacctcctaataaaattatatttgaaggagatttcttataaacagtatatagttgagttttaaaaaaagttattctgacaacctctgtcatttactttgctttcttggactatgtatatttaataaattcattaatatgtttgaaattt

SEQ ID NO: 17169 - DNA, 549 bp, Homo Sapiens
  misc_feature (289)..(297): n is a, c, g, or t
gtgtgagccactgcgcccggatgaaatacaagagatttttaaagaagttttctaactattcgggttacagacccaaatttatagaattaaggagatttatagtgtacatcaaagttcataacttatttatttgcaattttggggttcttaaactaatgaagaattatactaaatgacctatatagtctcttttagctataaactttcaattatattattctgctttaaaataattaagaccatatctcaaagttgtttaagtagataatgttggccctgaattaaggannnnnnnnncatcccctttctgggatttagtccttcctagtcagttattaatggggaataaatattacacattttactcagctgattcttaattcctagctctattggccccctcctctctccagagcccacagtatcccaacatatgggaaatactcaatacttatttgaggattcttgaatggagtagcaatatatactatggatggatcaataattttaaagaatctggatggaggtgacagtagttgcttttataaa

SEQ ID NO: 17170 - DNA, 869 bp, Homo Sapiens
  misc_feature (99)..(155): n is a, c, g, or t
ttggggttcacacgggaaaaaaccatatcaaaagtgacattaaacttgtaccttgttggggttatagggggagggggtttccggaaattttgtttattnnnnnnnnnnnnnnnnnnnnnnnnnnnnnnnnnnnnnnnnnnnnnnnnnnnnnnnnngcccccctacttaaaaactctcggtgggggtgggagggacaaaaatatacaaaccaaacctcgggagatggtaaccttggatttgataaaatcccttgggattatttgttaaactctgaaccaccaaacctctgctatcaagccttgctacagtcatggtgttccaaaagatttacagttatttttttgaaaaaggatccggggctttaaaaacttcaaacctttaagaacttcaaaagttcttagttgctgagcttcaggtaacgaagttaagtgcattcaaaaaagatacggggagtcaggtgttgagagccattcttatcctaaagtgactgctcaacgtgagcagactattatatactgataatacaaaagacaagggcaattacgcctttattcataaatcaaaaatctcttgttggaataaaattgaactttccagatcagactgaataatcggtgacaccttttgcgcatgctcttgcaaaggggggcccgatacacatcctcttaagtgagtcatatacaccgcctcggtgctgcttttacacaggtcggatcgagaaacctgggcttactacattaaatcctgtgaatcatttccttttcccgagctggggatatacaaaagccccaacgatcccccttcccaatattgccgccgcgagtgtgaatggactgtcctagaacggcccttataccggggtggttggg

SEQ ID NO: 17171 - DNA, 893 bp, Homo Sapiens
  misc_feature (150)..(206): n is a, c, g, or t
  misc_feature (612)..(714): n is a, c, g, or t
gcacgaggcctgtactcacacttgatagaatgtatctgacttgggcttctccatttacttgtgtatttagttaacatttgtacactcttcatgggaacataagcttcacaagagcaagcctgtgtcctgctctgctggagtctgcatacnnnnnnnnnnnnnnnnnnnnnnnnnnnnnnnnnnnnnnnnnnnnnnnnnnnnnnnnngggtcattgctggtgaaacatgctcctggccaaccactggaggagagagaagcatgactttgttcatggctaaagccccactggtttttaggaaacttgttttgaggaaaaacaagtgccaggtttatctagaaaaaaaagagaaggggctaggacctccattattaccagtcgcccttgctgagtcctttacctgcagctctcagagcatctaaggacactgctgcactgccttgttcagtagcgtccacatttcactttccttcaggtagatccccagtgcttagcttaatggggccctaaatacatgttgaatgattgaatggcttttgcagatatatcatctagttttgcccagcaggaaactcataactaaagttagtgttcatcattggagccccattgnnnnnnnnnnnnnnnnnnnnnnnnnnnnnnnnnnnnnnnnnnnnnnnnnnnnnnnnnnnnnnnnnnnnnnnnnnnnnnnnnnnnnnnnnnnnnnnnnnnnnnnggtctgcaaccccctgatttaacgttgtgggcccgtcattctcatcttctactccgtgctattgtattttaagaaatcttacctcttattgcaatctgcttcctaatctttgttggaattataaaatataaagagatggctacatctagtcaaggtctccccattatacagagaaaaaa

SEQ ID NO: 17172 - DNA, 434 bp, Homo Sapiens
gcacgagggcagagcttcacccggatgggaaatcctcactcctgggtggcactccctcctggacaggcccggtggcagagtgtccgtgctgctgggtgctgtccccagccctcctggtccatcttcttaagatgcgtccactgctttatatttaaaattctctttttcacaggcaaggaaaggaaaccactgcttagagacactaggtacagggcatcaagagggtgcagcccagccccgccaggacgaggcgccgacttctcattcagggttgacggagccaagagtttgtgcaaaatgtatgcatggtggttgctgccagcctccctcatgactaaatgcatatctattcctgtcaaaacgtgtatcacaatgtacttgaaactgttatctttgtgctctattgtttgaataattaaagaaattacagagac

SEQ ID NO: 17173 - DNA, 647 bp, Homo Sapiens
  misc_feature (109)..(128): n is a, c, g, or t
tgttactcatcctctctgaaagcaaaaaggaaaccctaacagctctgaactctggttttatttttcttgctgtatttgggtgaacattgtatgattaggcataatgttnnnnnnnnnnnnnnnnnnnnggtagaaatgcaatcaccagtaaagaggtacgaaaaagctagcctctctcaaagaccggggaggcagagtactactagaggaagtgaagttctgatggaatcatgcctgtcaaatgaggtcttgaagcggatgcccaaataaaagagtatattttatctaaatcttaagtgggtaacattttatgcagtttaaatgaatggaatattttcctcttgtttagttgtatctgtttgtatttttctttgatgaatgattggtcatgaggcctcttgccacactccagaaatacgtgtgcggctgcttttaagaactatgtgtctggtcacttatttctctaaaattatctcattgcctggcaatcagtcttctcttgtatacttgtcctagcacattatgtacatgggaaatgtaaacaaatgtgaaggaggaccagaaaaattagttaatatttaaaaaatgtattgtgcattttggcttcacatgtttaactttttttaagaaaaaagttgcatgaatgg

SEQ ID NO: 17174 - DNA, 789 bp, Homo Sapiens
  misc_feature (478)..(492): n is a, c, g, or t
gcacgaggaatggaagtctcaagatttcagtggtcgcacactttctgatgatgacaaagtctagtatgtgatcatattaaaaaggattggttgaggtagaattgaaggaaagtggggcaaaaacggactaggttgttggctttttggccacatagatgttgctgttgctgagaacggtgacagtaggtaagaggagaacaagaaccaggtttacaaggaataagacactgagagtttggctgatgaccaaaaggcagtggtcaagctaaatagcataagcttcaaagaagccagcattatttttttagaaaggatggagagaaatagtctggaactagtgatgggcaataatatgaagttctcccacctctttgagcagtttgtaagggaaatgatgtgttcaggagtagctacaatttagttaagagaaaaaaggtgaaggtaactctaaagagaagaactttattaatgccagacnnnnnnnnnnnnnnnaacagacttaagccagattgggttttgagaagagataacatggaagaaatcacaaatcctctgcaagctattcaaatggtgatggatacgcttggcattccttattagtaaatgtaaacattttcagtatgtatagtgtaaagaaatattaaagccaatcatgagtacgtaaagtgatttttgctctctgtgtacaacttttaaaatctgactttgttttaaaaaaacataaactgttcattacatttcttcatttttatcatttatagttttatgcatgtaataaactaatatgtc

SEQ ID NO: 17175 - DNA, 546 bp, Homo Sapiens
gcacgaggaaatattgaaggaattcagaaagttgtgtatttatcttaaaatgttccttctcacttattctactggaattgaccatgaaaaagaaaatattatgccttatttatatctaattattgactgtgcaaactgtgactcagtggatatttgtatgccccccaaaaacattttaaagctgagcaatttttaataaagatgtataaataattttgattattctcattgtagttaagttactgttagtttggtgcaatacattctttccttcctcatccttttaaaattaaatatataagatgtatgttttgttttattacattaagtgctatttttaaaaaattcattgtgtgtatatgagctaatacttgatttgtttctgtatagcatgattaaagataattgaaaattttgcacttattttaggcccttggaaatttgtattctaatactttttaagaatgtccatttattttgtacataataaattagctttgtatatgaaaatgggtttgaatcaaataaaaaaagtgatgttacttt

SEQ ID NO: 17176 - DNA, 810 bp, Homo Sapiens
ggtggaaggggagaaaaggaatgcttaagaaaaaataccagaaccttgagctgtgtacagaataacaatagtatttaaacacaagtggttctggtttctggcccagatatctttaaatagaacttgtaaattcttaacaagtttaaacaaattcaaaagttgattccaaaaccaaatataaacgaccttttttttaaatgtatacacacaaacacatatgtatacccagactgggttatgatcatcaagtgaatgctatcctgtgtttccttactttcagaagtgaacctgacttgtatgtacccttggtaaaaaaatattgcaactagggcaaatttgggaattgttactcctagctaagtaaatcttccttcccaatggacaataaaatcctgaatcaatgcagggatgcaggtcaattcatgaaacatttataaagaacctagtttatgtctgtcactggctggcaaatactggattcagatccaattttaaactctgtggggttggctaagagtagagccaaacaagaactccaagattggtactaaaatagattcaaattcttaacaggtgcagactggaatagagcctctcataaccgatctggtctagaattataccttatggggtagaaagcataaaggcaattcacctggacattttctatgggatttttaggtaataccaacctaatcggtaagggtaaagggatgggaagagagagggtacaaagtctgatggagataatgtaatatcagaataatctcacaggcgtgagtgtactgaaacaagcttatggtttccttt

SEQ ID NO: 17177 - DNA, 627 bp, Homo Sapiens
ctgggatgtgtccctgtcttttaggcagatatactttaccattactaaaattgagcttcagaaacattaagcatgctacacaaacttagctggaaatgaatactgaaatggaagtttgaatccaagatgatttcttttgaatcccatgctaatgctgttaactcctatagacccttctcaggtgcagccagagagacactagcccactgatggatggacagatgtgggcagggtccgtgtcactaaaccacccaccactgccacagctgcctacaacagacacatcagatgacactccgggcaaataaatgattttcactgaggacttactggttttaataataggtcctggtgtagagaagtccctcaacctattgtgcaatgagttttgagaagcgggtaagctgtatgttttgtggttttgtttcataaatgcatctacaggaagaccaatattgactgaatgaagctttcatttaaagagctaaaatatgctttgtgtttttatatgtggatactactttaaacctaaatgactattcattgtatcatagcttgtgatgtattctgctcatggcttttaagtaaattgtgccatgatccactgccattctaattgctttaaca

SEQ ID NO: 17178 - DNA, 596 bp, Homo Sapiens
gcacgaggattaaggccaaggagggaaggccattacttggcccgaatattgaaaactttctttgtaattgcactctgctgtaggtcatcattttttagtttaaaaactgtttcaaccatattttcatgcttcagtaggactatgataaatatcattgtatgtattaacagtgtctgtcaacacgaaaaggaagaatggatccaaaactctccatctagctcttaattcaatcaaactgaaattgctccatttaaaaaataaatgtgttttcttttagttcttacttatagcagatagtgatgggagacagtaggcagtacaaatagtacctgttttttggttgccagatctcctgtgatgggcagggctcacaaccagaatgccaatcttcttgtggttcaccaaaagaaggagtgtcagtgatggaggtggaagcctgtactccatttcataataatctgtggttgagagagattaggaaattcctcattcattagaagcctcacctattacaactaataacattttgtaatgattccatgcccgtttgagaactagaaatcctgtttatgattattgattattgcatatgaaga

SEQ ID NO: 17179 - DNA, 696 bp, Homo Sapiens
cttaagcggcaaggctacctttgactgtccccgtgctactacttataccgctatcactgggccttaataacctttttctgggaatttcttcgacgcactcatgaggaaatggaccatgagcgtaattggaggctttttgggaactcattacgtggacaaatcttcctcttcgataaaagaaaaaggtacatccttgactgggaaagaaggatgagagcgctggaatgtgaataacatttgaaagaaaaagggaatcaaacactaaagtaactgtgaaaattgtattatgactctaatgaccctggattgtgtgacttagttgccacacgtgaagttaatgtttgagggaaatgaaacgaaaaatcgggtgatgaagaaacggtctttgtcaaaacgggagcaccgtaatatggattgggagaatatctctttgatgctaaaaccctgggaggaagtgatggaggaactgcaactggaatctaatttcctcaaagctgaggggtgacttccctggtctaaactgttctgctttgataatgaagggtccattacttttctagattcctaccaaccaatccacttaaggcacgtacattgacatcattccggcgtatcacacaaatgtgagtatcccgagatagacttgcaggctgctatccttaacatgctgcccctgagagtagaatgaccaggttc

SEQ ID NO: 17180 - DNA, 356 bp, Homo Sapiens
gcacgaggagagagtgaggcctcttggtggcacctgagtcccacgagtctggggtagtttcaacgtccagggttatggtgggggagtccagctgcccccagctcatagctcattctgagatgctgcaggtccaaagacactgtgcaggtcttcaattccttccagttgccaaaaccacactgtctggtttgcatggctgcacactgccatctccccatgtcattagccacccatacaccatgtaaagtgcctggttggcacttagcaaatggctgaagccactcaaggttttggaaacctcatctttgaatcttgggactttagtgtggtcttggattggggttatgcaatgaaca

SEQ ID NO: 17181 - DNA, 686 bp, Homo Sapiens
  misc_feature (162)..(224): n is a, c, g, or t
gcacgaggcttcattgttgccacaagagtgataacttcatttatttactgcttatgttttctgcttgtgagactacaaagtttagcttgtttgcttcttcccaataatgaaattaatgctgtaactatgcatctaagaatgctgcttactaccaattatgtnnnnnnnnnnnnnnnnnnnnnnnnnnnnnnnnnnnnnnnnnnnnnnnnnnnnnnnnnnnnnnnttacaactaattgtaattacagttagttattgcagaagtgtttctatcagtttctaatccttgataatttcaattattctggatttttgtaatatttaatatagcttttgtaattttgaggttacttccctcaaatttctttgtattaaatcacaactacatacatgtaattgatataatttaggaattgttatttgtaaaacataaattacagatgaccccaaattctccaaaactgcaatgttcagttcaacttgcttaccacacaaattgatggagaaagaaaagaactgatcatagtatgtttataaataaaacatttaacaacatttgagtcaggaagttgaattgactggtgagaaccagagattttatatgtaataacaaatgaaagtaaaaactggtttttatagttacaagctcatttttttgagaaactagctgggtttctgagaatttgcc

SEQ ID NO: 17182 - DNA, 654 bp, Homo Sapiens
gcacgaggggagcccaaacaccttggtcttcctgggtgggggcataattaagggaagggagtgtataaggaaggaaacctcataccctccattcccatccctggatatattgccttttcagcagcctcgggttcagtgtgcttggggtcaggagtgccaggttcccaagagcagcgtaaaacatccctgtaccccttgacagttataagcatttctgcgttaaacttgaagattccagagattccccacgacctaatgatctaagaatgcagattggattctttgatgttcaaatttctcatttacttatgaaaatccctaattatatagttttatataatgtgtatacagagtaggattgttgatgaaattgagcggttggaacaccctcatggaacactggcaacatggaatgtagagagctgatgtcttccccctcatagaggccattggcttcctttgtataaggagagggagaagtgattctggaaggagaagttggtatgtctagcttcattgcggcccctcgggctacccagcaagaggattctgcatcaaggaactggacgagccgctacccaaactgccaccatctttactctttacaaaatggacccatcgagaatgttgaaaagcttggaagtatcacttttg

SEQ ID NO: 17183 - DNA, 924 bp, Homo Sapiens
gcacgaggacagatactacaaatattacaaaatatgctttaaatactaccactcctgatagtacagtacatacctctgctactgcacctacttatattgcaaatgccataaatgctactcaagttccatgattactactcaaggcaggatagttacctcagataacgcctacaaacaactattacagatatagaaaatcagttacgagacactctatctatcttatgctacttaagttttcacggatattagtactctagccataaaagacacagctactccaaacactctcgtcattgcagacatgtttaggaaggtttacaaaccttataggtttcaccaaagaagctgtgggtacttattttgcaaccatagtatgtgctcttattcttttaaattatagttattactcctataacctcatcagttaaactacagatgttttatatatcctatatatccttgctacagatttcacaggtaattttggtatctcagataacaccacattaggctctgtaaatactattgccttagatttagttactgaaatagcccaacttgtttcttgggtcacatgacgtaccataactgagagtactggtgatacccccagcactcaaatggtttctataccaacagttattgatattacaggagagtatgtaattagtaatgctaaaaaaatgcactttattatcctatggacttttccaaatgccatagctaccaatagagtcatttgcattacacatactaatagtattatttcttctgaggagatcctagctgtagctacagatatagaaaattctaccattgaagatcttgtataaccttacttcagccactgaaatatttaaattataaatattacatgtgggtttgactatcacagaaaataaatgattatagatcctaaaa

SEQ ID NO: 17184 - DNA, 737 bp, Homo Sapiens
  misc_feature (43)..(171): n is a, c, g, or t
  misc_feature (458)..(668): n is a, c, g, or t
cccgtcagccaagaatattagaatattaaacccagcaaagctnnnnnnnnnnnnnnnnnnnnnnnnnnnnnnnnnnnnnnnnnnnnnnnnnnnnnnnnnnnnnnnnnnnnnnnnnnnnnnnnnnnnnnnnnnnnnnnnnnnnnnnnnnnnnnnnnnnnnnnnnnnnnnnnnaaaacttgctgctagagccaatacacaaaggaaaaagagaaagaaagaaatctttcccaacagaaaaccattcaactataagaataagcaataaggaagtaaggaacaaagggtatacagaacaaccagaaagcagtcaataaaatgacaggtataagtcttcacctgtcaataataattttgaatttaaactaattacatttcttatttaaaagatagacttatttaatatattaagacaaataaacaaaacaagacccaaccatatgctgcctaccagaaacttnnnnnnnnnnnnnnnnnnnnnnnnnnnnnnnnnnnnnnnnnnnnnnnnnnnnnnnnnnnnnnnnnnnnnnnnnnnnnnnnnnnnnnnnnnnnnnnnnnnnnnnnnnnnnnnnnnnnnnnnnnnnnnnnnnnnnnnnnnnnnnnnnnnnnnnnnnnnnnnnnnnnnnnnnnnnnnnnnnnnnnnnnnnnnnnnnnnnnnnnnnnnnnnnnnntcaacactcaatatttaaagcaaatattattaaatctaaaggtagagatagactctaatacagtaatag

SEQ ID NO: 17185 - DNA, 653 bp, Homo Sapiens
  misc_feature (247)..(260): n is a, c, g, or t
gaactactgcgcctggcctacaaatagcaaattctaacgaagacaggggaacagggatggttcttccattgttaaaagccatcctcattttgtttatattgccaggtttgtgatttttctgtaaaggaaaaggcagggtgatttaaccagtttgaccacctttcctgtactcttacaggaaaatcgcagcactaattctaattttgtccactttacagcctgggcgatagagccggactgagtctcnnnnnnnnnnnnnngttacctttttttggtaaggttgtacttcttaaataatggtcattgtcactaccaacttgcctgcattgtaatagagtcctattcactttgctcccaaccccactacggagatgactgatgactagttgtatacacagtgggtgtgccctgagaggtctgttgccagcagtggtgatcgatcacggcctccccctgctggctgatgtgatggtccttggtcctcctctgaaggaggtagaaggggcacacggccaccgtgggaagtacgcagaaaagcctccctgggtgcagattctctgagaaaagaactttggcctcatagttaacttactccaaaagctttcgtgtgaaataatttataattttttatataaataaaaagattaaaatgt

SEQ ID NO: 17186 - DNA, 671 bp, Homo Sapiens
gcacgaggctttaatctttatctgcacttttttcttccataaactcaattgtcctattttctcagacagccatatttcacttcatatacaaaatttagtgatacaagtaagttatatctttttaaaaatttatccaacaaataaatattgagttcctactgtgtgtcagccactgtgagagcatgatgaatggatgaaattcaggcaggaaggattgattccatttagtcaagggaaggtgtgtagtcattaaaaatgaatgtgcaccccctggcctttccacattcatcaataattcctcttcattgtcaagcttcctgaggggtgctggaagaccctaaatcataggaaccttttcaatctgacgaggggagaggcaagtatgccgttctggtgaagatcatggggcaaagtgaattttgattcttgagtttctgtgggccagaaatccaggtgggctgaactgggtcgtctgctgcttagggtctcaaaacactgaaatgggatgtcagcagagctgtgtgccttattagaggttttggtggggaagaatccacttccaagctcacttaggttgttggccttgtggttgcaggtctgaggtccttgttttcttgcaggcagttatccaggagctggtccttgctcctgggggctgcccccatttctta

SEQ ID NO: 17187 - DNA, 823 bp, Homo Sapiens
  misc_feature (490)..(526): n is a, c, g, or t
  misc_feature (554)..(615): n is a, c, g, or t
cccgggctgcaggaattcggcacgaggaaattttttactttggccttttctgccaaaaattgcatctagcgtccttaacaacccacactttatggaaacccttacactctttggcagtagatcttactcactatcaattcattggcattccccatcctaaaaataatagatttctgatttaaaggggtgagtagcctcttccaactatcattaaaatacaattgtaagtatatgcaaatgaaaatatagaactagcaaaatatgtaaatttaggataaacaaaaattggaaaataatgtaatcaaagaaaaattataatatttatattgcaaatggagccagatgggaagacactccccattccattcttctattcacagatgcagagacctaacacctggaaaaccaaagcaataagcaattctcctatggcattatatttataatgcttactttatttgcttggggaaattgtgagtgattttgaaannnnnnnnnnnnnnnnnnnnnnnnnnnnnnnnnnnnnagtctaaatagcttttaaaagagaacannnnnnnnnnnnnnnnnnnnnnnnnnnnnnnnnnnnnnnnnnnnnnnnnnnnnnnnnnnnnntcgtgaattaccttataattaggggaacaagatatagtctttaaaagacagtgctttggaagacttataagaaattgggttttattacctcttattttaagtcagatttgcaataaaatattttcttccctacttggtatgttttatcaccgaggtgaagattatcctttttgtaatgaagaaggttatttatatagtgaattttgtt

SEQ ID NO: 17188 - DNA, 380 bp, Homo Sapiens
  misc_feature (276)..(284): n is a, c, g, or t
gtaaaaaaaattcaattttttgggctttggggaaaaataaaagcatcccccatatattaccaacaaaccctttatcttgtaacttccccaacattaactgggttgtgttcctgaacccggcgaaggaacaatttcttttgcaaaaggttcaggagaaagctttttggcaaaagtgcaaattccctttgtaaatttaaaaaaaccttaattaatccggtaaatttttcccccctcctaaaggttaacttcttaaaattagtgggaaaggggtttgcnnnnnnnnnaaccctaaaagttttttggccgggttagggaaataccttcccggaaatccccccccttaattttttcctgggcattggccaaaatttaacccctgc

SEQ ID NO: 17189 - DNA, 572 bp, Homo Sapiens
  misc_feature (74)..(348): n is a, c, g, or t
atccttgcaaaggacttgcccaaattgcgttctagtgttttgtggagtatagaaattgtgagtgaggcagtgcnnnnnnnnnnnnnnnnnnnnnnnnnnnnnnnnnnnnnnnnnnnnnnnnnnnnnnnnnnnnnnnnnnnnnnnnnnnnnnnnnnnnnnnnnnnnnnnnnnnnnnnnnnnnnnnnnnnnnnnnnnnnnnnnnnnnnnnnnnnnnnnnnnnnnnnnnnnnnnnnnnnnnnnnnnnnnnnnnnnnnnnnnnnnnnnnnnnnnnnnnnnnnnnnnnnnnnnnnnnnnnnnnnnnnnnnnnnnnnnnnnnnnnnnnnnnnnnnnnnnnnnnnnnnnnnnnnnatgctgccagcttgaactgaatagagaaagagacaggacaaaaatgaaggcaggctgttagacttctgggattctacgggaaggtacaatagagctatccagttgcaaacgcacgttaatcttcaagaaaagggaagaatgtgattctcaaaggttctaatgggcccagaaagtacaggtctagagggcaagtgtgtctcctcctcaatttcagtgggccagga

SEQ ID NO: 17190 - DNA, 243 bp, Homo Sapiens
gcacgaggatcagaatgaggcgtggcgtccacctccagcccacgatttcaattctaaagtcgttattattcaaagcccaaaggaagttttcccttccctggcctgctagcatcaataaaatgggggaattcggggtttgggagctgtgtccaggatgctgatgtccaggataccgacgtccaatgtgccctggcttagatatacataaatcgcgttcatttgttatgagaagtgtcagtgttc

SEQ ID NO: 17191 - DNA, 607 bp, Homo Sapiens
tgagccatgccacctggccaaagaatcagattgttaacagatgggaagagcattagttctgtagcccaaattctgccccaaagaggaatcgtttctaaactagtaattatctggtttccacttgaactttactagaaatgggttgtgggttgttcagttaccttttatgatggctcattctatgtttggacagctgtcatttttagagccttatgttaaagctgaaatctgtttctttttaacatctcatttatagttggtcctaaccatagtctctgaacttatattgtatgaggtatttgagtacagatataatgtctcctccatctttttttcaatctttgtgttagtttcctagggcttctgtaactaattacaatatgggtggcttaaaacaatagaaatatattctatcacagttttggaggctggaagtgtgaaatcaaggtattggcaggaccgtgctcctccttaaggttttacaggagaatccttccttgcatcttcttagcttctggtggctcttggcaacccttggcttgtaactacattgttccaattactacccctgtcttcaacaggctttcttcttgttcatgtctctgta

SEQ ID NO: 17192 - DNA, 248 bp, Homo Sapiens
ccccgggctgcaggaattcggcacgaggctgcattggaccttcttttcttttggacaagataatactgtgagtttccctccttccttccctcgaatttgttttccttttttccccagcctcttgcatccccttcttttctaccctgtcctacaactatcatatgcacagtcttctctctttgtgtgtgactgttacaaaatttcacttttcaaaatcgaaatcatgtgtttgctcaaatgaggggaga

SEQ ID NO: 17193 - DNA, 233 bp, Homo Sapiens
gtagatttaaaatatactgatactgaaagcagaactgtttgaactaattgctaattttaaggaattcagacattcatccaaaggatttaggccaaatgttgcctaaattgtttctctatttcatatgaaagtgatttctgcggcttaactgttctcttctatttatgtgcatggccataactgatgttgtcacatgagtcctgtttctttcttattaaacatgtgtccggctc

SEQ ID NO: 17194 - DNA, 982 bp, Homo Sapiens
  misc_feature (73)..(91): n is a, c, g, or t
  misc_feature (241)..(303): n is a, c, g, or t
tcctctgacatagagtgcgccccgggctgcaggaattcggcacgaggtgcactcattataagaaaaatcactnnnnnnnnnnnnnnnnnnnataattgcttttattagattaagtcctttataaaaggatgcataagaaaccaaaacattggtgatccttagggagaactaaggtagctggaggaaggagaggggggcttttgaattttgaaccatgtgaatacaagaacaatttgaaacnnnnnnnnnnnnnnnnnnnnnnnnnnnnnnnnnnnnnnnnnnnnnnnnnnnnnnnnnnnnnnngatggaaaatagtaagaatgaggcctgaaaataggctattccatttggcaagtaagaggccattgctgatcttagagcaatttccacagaatgagaggcagaagcaagataatagtgactgagaaaaaaactattcagtactctcaggaagcttgctaaattgctaaaattttaatttgcacttattggataaaaatataattttcctaggcatctaaaaattatttttagtatttagtgcaggggaaagcatactgagaatactattttggacaattttttgataagcactttgaccagttcatcaaaagccttaaaatattcatccgtggctgggatcacacctgttcatttgttaagcaatttgctaaaaactgacgaggtttattcattgctatacagcagtgtttgattcagataaatatcttaatagagtcacatttcttcatgtcatgcctttaaggttgttcccaaatagtcataaagaacagaggatactcaggtatagcaaaagggagtccaaggagaagaagtctcagtggggagttttggaaaaccacgagaggcagcaagataccggaaagagcgtagacggtacaatgaacggtaagcaaagcatatttcccaaaatagtcttgatcagtatttcttgtaaaatgtttgattaagcattttgccc

SEQ ID NO: 17195 - DNA, 832 bp, Homo Sapiens
gcacgaggctttctctccttttctctgaaacatcttggcattatttccttcatatctccttgggtctaggttcaacacacctgacgaggtatctatatgtattgtcattctgctttttcttcagcatttgctgcaatatcagttttaaccattgagatgaggctatatggataacatgttttaaaattctttcaggctagtttaattcaaaatataatgtttgaattagagtcaacagattggatgtaggaggaaagaaaagaagaataaagaatcactcctaggttgtggtgtcagcagttgtgtagagagacaagaggaatgatagtttcttttttatccctaccttgttctttgttcagaacctaagagaaatgccagtagtcaggttgttgtggaaagaaagatggccgtattccataattcaccctttaaggaaggagatgtaatgattcttcgaaagccttaaactacatttcttttcttttccggattcattcattcagtactgactactttactttgtgttaggcactattctaggcactgtagataacagcagcgaataggacaaattcctgccctcatggagtttacagactagtgtgagagatagaaaataaccaaataaacaaatgaagaaagtaaagcagagtgagggtatagaaaatgactggggggtaagtgtgagggttagcaacccatcatccaaaggcggagagacctgagggagccagccatgcaaaggctggaagagggaacaggtggaggaaataccctgggttttcttccctgccactctttcatctaggtcttaaaaagaggaacccta

SEQ ID NO: 17196 - DNA, 537 bp, Homo Sapiens
  misc_feature (55)..(141): n is a, c, g, or t
  misc_feature (266)..(274): n is a, c, g, or t
  misc_feature (337)..(383): n is a, c, g, or t
ccccattaaactttttaaaggggccccaaaattctgggacaattttttggccaannnnnnnnnnnnnnnnnnnnnnnnnnnnnnnnnnnnnnnnnnnnnnnnnnnnnnnnnnnnnnnnnnnnnnnnnnnnnnnnnnnnnnnctttcccctttccttctgaaggttttacaatgctttgttacctttaaccctctttttactactaaacttaaagggccaattgaaacaaaaagttctaaaaccgttcttcccccccggataaaaannnnnnnnncgggtattaggaaaaaaattcttttacccttctaaactttcggggcaaacttggggaccttgnnnnnnnnnnnnnnnnnnnnnnnnnnnnnnnnnnnnnnnnnnnnnnnaacggtttgtcccaaatcacaaaaagaaaagcaacccaaagggggaaagtctaaaaacctcccaacacccaggggcttgccagaaaccaaatcaacaagggcggcctccccaaactccaaaaatttagggccatcctccacctttttaccaaaa

SEQ ID NO: 17197 - DNA, 587 bp, Homo Sapiens
  misc_feature (57)..(134): n is a, c, g, or t
  misc_feature (163)..(224): n is a, c, g, or t
  misc_feature (315)..(330): n is a, c, g, or t
  misc_feature (404)..(413): n is a, c, g, or t
tcattaaaaatcccccgggctgcaggaattcggcacgaggctacccttaaagagaannnnnnnnnnnnnnnnnnnnnnnnnnnnnnnnnnnnnnnnnnnnnnnnnnnnnnnnnnnnnnnnnnnnnnnnnnnnnnaaggtttgtgttcaaggcaaaccatttcnnnnnnnnnnnnnnnnnnnnnnnnnnnnnnnnnnnnnnnnnnnnnnnnnnnnnnnnnnnnnntgtccacctttcgggaataaagaaagagggtcctttcaccccaacataaccttcaaaatgggtgaattggtttgtccccgggtatttttcnnnnnnnnnnnnnnnngaactttggccccaaaaaataggggggccaataaaaataacgggaacatcaaacccccggggggggaccaggcnnnnnnnnnncttcggggagggtctatttttaaaaaggtttaggggggccagggcatttgaaaaaaatttacggcaaaaccaacccctctttaagggttagaaccaagttctaattaccaaaaaatttggacggaaaacaaaaggggttcaaaggggggtttttccgatccaagattgtttttt

SEQ ID NO: 17198 - DNA, 756 bp, Homo Sapiens
gcacgaggctgacatgtacctgtagccacggtccttgaagccctgagaagatttgtcagcatccccacggtgctccagcagtgctctcatcttgtggctctaaatcgagtccatggtcctctctcactgtcctatggttgcataagctcagaactggcttcgtctccaattccaggagccctggaggttgtggcctgttgacatttttacctcctgagtcaatgtggctgggccacaggtctcagttgccctcccaggcatcttgcaggacttggatctgtgccaagcttgtgggtgtgaacaagcccaagaatgctgaggctctcagttgctcagtgctgcccatcactgggatttcagagtagtgacccccctcctccaagatacaacagaatcttgctttggggccatgaagaacacaatcaatattacagttttaaatcttgaaaagtacagttttaatttttttaattccaaaaaatttcacacatgtgcactgcaaattcaggaggtaaattcagcaaaatcttgcctggtggaggtaccagaaggcacagtgagtcaatggggcatgtttctcagtcggtggggagagatgagaatggaacagggatgtggagattttatgcaggaagaggggcctgaccacagattttttgccctttgaaaggagaggaaacaggcctatgcctcactgcctcttggattcagtgggagatctgggcatcatactggatgaccaggcatgtagtcaca

SEQ ID NO: 17199 - DNA, 840 bp, Homo Sapiens
  misc_feature (65)..(187): n is a, c, g, or t
  misc_feature (645)..(736): n is a, c, g, or t
gtttaagcgatccttctgccttagcctccaaagtagctgggactattaggcgtgtgccaccacgnnnnnnnnnnnnnnnnnnnnnnnnnnnnnnnnnnnnnnnnnnnnnnnnnnnnnnnnnnnnnnnnnnnnnnnnnnnnnnnnnnnnnnnnnnnnnnnnnnnnnnnnnnnnnnnnnnnnnnnnnnntgagccaccacgcccagcctgtaaatcttgacaaaattcccagaggcaaaattattagaaggctgggagccaggattaaaaaacataaaatccttggcttttccatttatttcacattgcctcttcttagaatccacttctacaccaaagcagttaaaatcaatgtggatttgtattttaatagagggtttatggagtagtgggaaagatagcaaataataactatgtttattgaatactactgttcctaacattttgaacctatccaatcatttaatcctacaacaatcttttggaagtgagtgctattattattattgccactttgtaacagagaaactaagccaaaaagaagataaacatttgaaaagtcataaagctagttagccgctgtgcagctgaacttgacagcctatagcccacagagtttaaccatcatgctatattgcttcattagnnnnnnnnnnnnnnnnnnnnnnnnnnnnnnnnnnnnnnnnnnnnnnnnnnnnnnnnnnnnnnnnnnnnnnnnnnnnnnnnnnnnnnnnnnnntttctttaatctctaaattctataataataatacctttattttcaaagtaattctgctttttaaagactttatgacatctgatttaaatttcacaaaaaaagga

SEQ ID NO: 17200 - DNA, 470 bp, Homo Sapiens
  misc_feature (82)..(144): n is a, c, g, or t
  misc_feature (181)..(192): n is a, c, g, or t
  misc_feature (209)..(227): n is a, c, g, or t
  misc_feature (255)..(421): n is a, c, g, or t
ccccaacccaaaaggctttttattgcccctttaaaaaaccaaaaaggggttaaaagggcccccgggctcccttttttgggannnnnnnnnnnnnnnnnnnnnnnnnnnnnnnnnnnnnnnnnnnnnnnnnnnnnnnnnnnnnnncccccccaaaaatttcccggaaaccctttttttaaannnnnnnnnnnntccctttttggggggtnnnnnnnnnnnnnnnnnnncccggggccccccccaaccccggggagnnnnnnnnnnnnnnnnnnnnnnnnnnnnnnnnnnnnnnnnnnnnnnnnnnnnnnnnnnnnnnnnnnnnnnnnnnnnnnnnnnnnnnnnnnnnnnnnnnnnnnnnnnnnnnnnnnnnnnnnnnnnnnnnnnnnnnnnnnnnnnnnnnnnnnnnnnnnnnnnnnnnnnntataccaaatttaacccctttaccaccactcccccttcccccggggggg

SEQ ID NO: 17201 - DNA, 739 bp, Homo Sapiens
  misc_feature (58)..(74): n is a, c, g, or t
  misc_feature (357)..(366): n is a, c, g, or t
ggtccccaggtttattccaaaaaccctacaaaaatttcccaaaaaaagagaattaaannnnnnnnnnnnnnnnntcctccgcccgggtaaaccggaagaaaacgaaatcctaaatccccttggtggtaacaaccacccgccacccggcccggaaaataatcctcctccaaaaatttttggggagaaatttccaaaaacctttggagaaaaggacccccgaaggcccggggaatctggtcctggtcccttccaagggcaccacccctccacccaaggtccccacttttccggtcactttggatcctttctggaaaaaatggtccaaaatgggcgcatccctggatccctcctctacannnnnnnnnncatccaaaaaggacctccaaactggctcttttttttggcccccctcacccccaacttttttccaagggcccgggaccccaatccccctataatgagtcgtaatacgcgcgctcaccgggcggtctttacaacggcctgaattggaaaaccctgggggaccccactaattcgcctgcagcacattcccccttccccgacttggggatacaggagaaggccgcacgcatccgccctccccacaatgcggccacctggatgggcgatggagcacgccctgtagccgcgcaataacgccgcgggttggtggttaacgcgaagtgaccgctaacatgggagcgcctagaggcccctctttgctttccttccctctttt

SEQ ID NO: 17202 - DNA, 856 bp, Homo Sapiens
gcacgaggaaaactgtcctgggtcgcatacggcccatgagccatgggtggttggacaagcttggtgcagagcttaggcatttacaggtatatgagatttacctattcactatttccaatcaactcttgtggcctatcgtagtgtcatttaaactgtgtgtcccagcccacactttttgagtcccacatgctttgaggctgatgcagagaagcagcttctctagtgctagtaatgtgggtgacattctcctctgagctctactttgtaattctgtaagtccatgtttttcacattcacagaaaagagtaagtttgcttttcagtcattctttaattatatgcttcagggcaatatttaactgtgcaatctctcaaaacctttaatgtgccaatggcctctgaagctgctagtgtaatatgtggcctttcctacaccttccttcctatggaacacactttggaaagcactttcagttggatttgctctcagtaccatttttggggctgtgaagggggaagagtaagttacaagaactgatctaattagaggctttgaggggaagcaaatgctcatctagtggcctttcttctttgcaaaggtctaagtcaggtcatctgctaagagaaagactgggagtgaagtggacaggtggtttggaggagagaaggcggctccatacagttgtggagaattgggagtcctatgtgcattttgtgtttgtcagccatcctgagtgcattatgcaatttttcccttttattcttaacaaaaactgagcaagggctatgcccttaccctttaaaaatcctattactaccttttgttgaaactaagggtgcttgaataattcaaaccc

SEQ ID NO: 17203 - DNA, 817 bp, Homo Sapiens
gcacgaggaaaaggacttagtcctcataggaactttttaattctagataatctaaaacatagatttttgtcattgtctatactactttcaagtttttaaaggttttgagatgaaaccaggtaacatattttcacagttttaattaggatatgtgaaaagaaaggagtcagtgtgaattcacttggtataaaattttttccctttataccttctttcagatcccttaggttggcctaatacaaaggtctcttctttgtttttttaaattacaatttatactttgtccaacgtcatgatagtaatttgtttcagtgtatgttttccccagatttctccattttaaaaaactaacattctcgtttaaaatttagtttcttaaacatagtattgtctgctcctaacgtgggaagaaaaagatggaggtgaaatatgtccatactcaaataagcatgaaagacaagggtgctgcaagttaacccctaaatatcagagtattagtacattctgaaatgggttctgactaaattatcctctcctgtggagtggagttaaatggaaaaacacaagaagttccttaataagctgtaattttttagtttggtatttctcagtgatagagcataaaacttaacagtagagtttattatcagtcatgacttagttatatgctttgtcatttattaaatggatttaaatctattagtgttgcatagtttttctgtgctttgccctagttgattccatttgttggatgctcttaatttgtccaatgtaaatataaaaagaagggcataaaccgttttgccctataatgggg

SEQ ID NO: 17204 - DNA, 375 bp, Homo Sapiens
  misc_feature (43)..(53): n is a, c, g, or t
  misc_feature (317)..(335): n is a, c, g, or t
gaggacaaattttaattaaaaaaaagggaaaatggattttccnnnnnnnnnnnccctaccacctttaaaggttcccttcccggggggggcgcgggaccccattccccccataaggagtggtattacgccgggtcacggggcggcgttttaaaacggccgggctgggaaaaacccggggttacccaacttaattcccttggaagacatccccctttcccccggttggggaaaaacgaaaaaggcccccccgattgccctttccaacagttgcccaccctgaatggggaatgggaaccgcctcggaagggcgcattaannnnnnnnnnnnnnnnnnntaaccggagggggacccgtaaacttggcagcgccctaacg

SEQ ID NO: 17205 - DNA, 940 bp, Homo Sapiens
gcacgaggactcaatccaggccaacaaaacgttgccttccggtacttactttaatgaatagaaagcatgtaaatgctcttccaaagagaataacacattttagcatcttaaatatgtaaaaataaaactcctgtacaatcctagttgcactaggaagtctacttatcaaaaaaagaaacttctgtttccagccacattatttcaaatcatcccaaaacttacattgttactagtaaaatttttcattgtgattaacactttttttccagtatggttttcctctttctgaaagcaaccttagtttcataaacagttggacatttaagtactggtcaaaaaagtactctgaaccagtaacctcgtccttaattttgaactgctgttgactaagcgctctcttttcctaagctcatagcagcccttcgttcagtgcttcagtaattcaataaattactttttgccaaggttgcaaacatcagctaaagttcagtcatctactggagatgttatcagtctgtccatttaaattcttttgcgcaaagtccagatttggacccaaagtaatataaaaatgcaagagccagaaatttaataattttgtactgtgttgtgccaagccaggcctattcttagctagccaacaacattctttcaaaggatattttttggttttcatcaaatgtaaatagtgtttaagagtctgtaatatcatttagaaggaacaaatggaagtattaaacctttattgactacctacagtatatagaggatctataacttatgatggttttattatagtttctcaaccttacaatgggtttattgggcattggtacattttaaacttatgatatattctatttacagggttcatcagatatgacctcactgtaagccaggagcatcgtacgtacagcactgtgctaacgctggagtacag

SEQ ID NO: 17206 - DNA, 813 bp, Homo Sapiens
gcacgaggcccaagccggggtggttccagcccagcacggagtagccggcctcgagcggtgcagacagacagcccatctcgtagaagcccgcgttgccttcgcagcagatgacgaggcgcggcccgtgcacgtggctgcccgggtgctggcggcggtccatgaacatagtgtcgatctcgttgccgtcacaggccaccagcttggcgcgccggccgtggtagcgctccacgaggcgctcttggccctgctgcagcagcggcagcagcgcgcgcgtcatcagggacacggagccggggtacacgagccagcggcccagcgagtgggccagcgcgtagctagcgagctggccgggcagctcgcggagctgctgcaagaggcactgcgcctggctgcgcgccccacgtggaggccgccccagcgcatccccgcccagcgtctcgtcccgcagcaaccacacgcccgccgcggctgccgcgcaggtcagcgcccggtggctgctgctccggccccacggcgcgcacgtcatcccagcggaaggccacgggccagccgcggaatgggtaggtgtagctggcggtcaggtagatcttgaacacgcgcacagcgccttcacgaagcagatgacgcacatgagcggtggccctaacgcccagccgctgggccgggatcgccgcgagaggcacagggcagtcttaggggataccggctctcggacaacccctgatggcctttgtgacctggccttccagggcggagggaaggctgcatcctgttgcaggtgatggtgcaccaagggtcccagagatgatgaac

SEQ ID NO: 17207 - DNA, 325 bp, Homo Sapiens
gcacgaggctatgatggctgcccaagaacttgaccattagggaaacatggctgtttctgtggattaactagtcaagcccatacaggaagagtgaggtcagctcccaggtggggcaggatgtagtggacgcttggaagaatttgggaccacacacgaattgctaccatggtgagccagtgaaacttgaggaaggcaggactggattgtgattacaactgagtaagtaggcagagaattggagtgtgggcaacataaagatgatgtgaatcaaagaagaatggtcaattaagaccctaaaaaaaggacgttcaaaaatgcagaggtt

SEQ ID NO: 17208 - DNA, 398 bp, Homo Sapiens
  misc_feature (325)..(346): n is a, c, g, or t
gcacgagggtgaacttgttaagtttaagtcaaagtacttaaaaagtatgtatattatccatacaaaaagttatgttttacgcttataataagaaatactggtatctcatatcgagatacaattaattttaaaaaatcatacatcatttaaaaatcttcacacatgaacaggaaagatatcatttctatgctttaaaaaaccctctattgagcattttcaaatattaattttattttgggggaaaatgcccacaacaataattgcaagatctttctcaatagcttcagtttgctgttggatgcctaccttaactattgttttaaannnnnnnnnnnnnnnnnnnnnnttaaaatagttttccaggtattttcttctaccttttttaaaaataaatttcc

SEQ ID NO: 17209 - DNA, 876 bp, Homo Sapiens
  misc_feature (203)..(306): n is a, c, g, or t
gcacgaggatatactttaaagatttcaggcttaaatctcttaaatctttaaggtacaaactgtatgtatataatctttagaaatgtgcttatcacaatgaaaatcagggataacattttttgagtcacgtgttatattttatcatgagatgttatctttttcagagagtgatacagataaattatctttggcataacggggannnnnnnnnnnnnnnnnnnnnnnnnnnnnnnnnnnnnnnnnnnnnnnnnnnnnnnnnnnnnnnnnnnnnnnnnnnnnnnnnnnnnnnnnnnnnnnnnnnnnnnnaacaagaccccatctatatcaaaaataaataaatattgacatttaaaccatagaatactgctgttgttttgcgtgtactaaactgttgctttgatagttggttagatctacattatgcaagaacaaaatttttggaatgtaatgcatgttcattcttagctgtgacatacttttgaggagttttggaatttatttatccacttacaagtactaaaaaattattattattgtctcattttagttacaatatatgctctgactttcatccacaattattatgggctttgtttacttctctgtagttgtgatacattacactaaggacattttcatggtttactcttcttagattcgggaagaggttggaggaatggtctgtggtcgaaaaagagaatgaagcagactaattcttaaagggataagccttcattagattttgagaaagagtccacagatagttctttatagtattctaataaattaaaaattaagagatattacatgaccgtcttccctggaaattacattataacacactctcttgttcacagcataaaacaaatgtaaaat

SEQ ID NO: 17210 - DNA, 941 bp, Homo Sapiens
gcacgaggacatattcatagtcttgcctacttgcatgagcatgtttttattgcttctaacctggattgaaatctatgactttttataacagtcattgagtctgtttcaaaggaatcttgtggtaagtatttttgcatgatgtactcaaggtatcaagtttaacaattgactttttttcattggaaagcatatgtgattaactagcatggattgcttcttgacctgcttgttttgtgtttgtctttttcttctaatataataaccagggattaatgaaaatcaagttccatcctcagacaagaggtaaagttcacacattcttcccatgtctgttcagaaaagaaacctattcagatataagttaagctaatttagtaatcctagaattgtcctctgagagatttagatggatgggccacttcacagtagcagccaactcacgggagcacctgggcaacgctagtggacttttttgtagtgagtgtgttgatcatagaaaatgtagatataaggaaataaactttgaggatagagaattaacattattttgagatattatatataggttgtgaagagtggtggttgtcacactttatggtctctggaccccttaatgtctgattcatgtagcagaagccagctagattttcatctgtctctattcattttgttgtgatgtcatggatcatgtggcctctggaaaactctactgtatactcgagaatgagaatataacaggcaaaataacattatcatgaaaatagttttgacctcatgaaccccatgaaaggttccccagaccaaaatttagaatcactggtatagggtaacactttattgtgtaaattcagttctctgtaccccacttaaatatgtattattatcttcttgacattattttcccaaaaaatgctgtttgatttcttacttggtctgtactt

SEQ ID NO: 17211 - DNA, 694 bp, Homo Sapiens
gcacgaggtgacaacccagtgagatatgtactatcatcatctcctttttacagatggagaaactgaggctcagagaggttaagtaacttgcccgaggccacaaagccagtaggtggcataaaatgtccaggactattaaagaattctacatattccatgctgtttaccactgtgcagtattctgccttgcaaatgagaactataagccccacctccacacaacagagaagttaattcaggagtgaattctaaacatttcaaccagaattcttcaaaaattgtttcaggactagatgctaagtaactgctcctaaaggatatttacaatcataaacacagtagaatttgcataattatgctgctaaatatacacatgccattttaaatataactgccctagctagtatattagcacaattatgcagaaataggggaagaaagaggacagcattcttggtagacttcatttttttaaatgcatctgagtactatgtcaaagaaaaatgttaaaaacaggaacatcagaaacaattaccgaagcacaaaattataatccattgtctcatctataccatgatgttatttagaaatgcttaatctgtgtaagtattgttaaagaattttcaaccccttaaagcttaacttcatgagcacagggtcgtataaagaaccaatccaatttctgttgcaattt

SEQ ID NO: 17212 - DNA, 652 bp, Homo Sapiens
  misc_feature (336)..(509): n is a, c, g, or t
gcacgagggaaaacatgacctctcttcctatatttctcagataagaaaatttaggtctagacacaaaatgttgctttctcaaatacaacatatttcctaatgtatgacattgcctttttcactgttgattaaaagtaccaaacttattacctagtaactaaagccagacgctgaccctagtttgagacaagtagataataccaaacaagggcttgcaaatcagtctttttggtgattatgtgcttggcaaatatattcaataaacactttttctattccttctacgtcttcatagggaatctgtaccggcaaattcttttccataaacctgcatcnnnnnnnnnnnnnnnnnnnnnnnnnnnnnnnnnnnnnnnnnnnnnnnnnnnnnnnnnnnnnnnnnnnnnnnnnnnnnnnnnnnnnnnnnnnnnnnnnnnnnnnnnnnnnnnnnnnnnnnnnnnnnnnnnnnnnnnnnnnnnnnnnnnnnnnnnnnnnnnnnnnnnnnnnnnnnntatgtggatagtgaatatatgaaactagagtgaacagcatagcaactcttgtttattctgtttaggtgtgtgtgcttatgtatgctaactgatttggaaatcagtattaatgagcagttaatgattgtgggacaagaaagcat

SEQ ID NO: 17213 - DNA, 970 bp, Homo Sapiens
gcacgaggggtttcaatactgggagcatcgtaaactatcactcacaagaattgttagaaagcagttttcctcccagtgatcagaagatgacgccacatttgtgaaaaagatttcattagtgtacatcgtttattaggtctaccagctgcccattcttttgctcatctgtttaatttttaataaatatcaatgatctgagaggcattgggtagcactgaggatgcaatccgatgtgaacaagacttcaggagctctgctttcattaggcttacatttggttaatggagataaacttgaagcatataaaccaataaataaacaagaaaatatcagggagtgacaattgctattaaggaaagaaacagggtgataggatagagagggaggagagagacttcttcagtcagatgatcataaaatgcaagtatgattaagtcatggcctcaacttttaaggaatgatgggctcaccttgctttcattcttgccacctcctcaatgaaaatgaaagatgtttttgggaaactgatagctaattttctttttcttagaatatttgatttagataatatgtatttaaaataaagttatcacgtaaaataatatattgatttagtaatgcaccttttttcccctgctcatttaatgaaaaaatattatttgaactgtttacttgaatctttattgttaatgattttgtcatgaccagagtcatttaatagtttccacagcacaagtttgaaatttaatactttttaaatttgtgatgtgttgaccactgggtttttaaaaaacccagccacaaacacctattcccatgatgagctcaataatttcacatttccaaaaggtgtctcttcagtgtaaaccatgtatgtcaagcctttgcaagtcaactttcaaaaggctagtttacaagtattcgtcacttgcatacaaaaataaaaaggaattttgtataaaagtctttg

SEQ ID NO: 17214 - DNA, 516 bp, Homo Sapiens
gcacgaggcttttaaataaactctttaatggaaatattcagagaggataaaaatattcaggtggtatgatttgacctttagagtcacataagaaagatgagttaaattcattatttatctaggtattgcctattataaaataatagagacttcaagtgctttatatataaccattagaaagattcgtgcataagccagtctccataacataattgagtactgcaaaaatatctgtgagctgagtaatccagatgatatacaacactactacaaagcaattttaattgacatagaaaataaaggtattttaagaacacttttataacataagagatgataaacagaaagcctctctttctccaaagctttgtttcagtgttgctcagaacagaatattgggtatggatataatgaatttcccttttattaatatatcagcatttttcaaaaaattgtctcatattaaagcccattagaacagcaaaaataaatgtaaaagaatcttcaaacctgctg

SEQ ID NO: 17215 - DNA, 257 bp, Homo Sapiens
gcacgaggctaagatatacaatgattattacatgctaagtgactattatttccttgggaacctctcctgtgataaaaagtggatctcaaaatatccaattggacaaacattcgaagttccttctttatttataatttttttcatctagtatgtactatttcaagaagtgttcaaagtaatgatagtgaatgtgaaaacatacttattgaggggaatatgtatccttattttggacgaaatagtgttggttattcctg

SEQ ID NO: 17216 - DNA, 669 bp, Homo Sapiens
ttaaacttcaagtaatagagtgtcacaatttcacaagtatttagtatgtggtagtatgtggtctatttttcaagatgtttctgtacttcataaacccagtctcttttctacatacaaccctttctattatacagcatacattaattgcaccattggaaataatgaataaaatctgaaaaaactatttacaaaattggtaaaatagtattaataatgaaaatgaattaagcatgtattctgactttaccagggtaaccacatagttagtgaaggaacgtttttaagcaaattgttaccagttcatgacaaaaaaagaatccataagttttatataagcatccataaatttgcataacaagttgacaaagtaattttatttctgttgcatctataataaaaattgggggcttttaaaatatattggattttaaattttcatttgtctagaaatttactgtattttacaaaagtagcagtctccagtactggaaatgttttttaaatggtcttcattgcagatgtttgataagcactgaacggtggctattaaaaccattaagtaaaaggttaatgagaaacctgataatgacggataagctggtaacatctgaatcaactaatgcagcttaacatacaaaacagacacccagacatatgtaactctcctac

SEQ ID NO: 17217 - DNA, 258 bp, Homo Sapiens
aaaaaaaatgtcgttcatttattctgaatcttatattgatagataataccaaaaaatttccccatagcaaataaaataccgcaaatcctaaccagcccgggttttagggacaaacgggcccgttccatggacatagatgacttcatcagggaattacatttttgttttcctaagggtttacatttctttacggggaccccttcagattggagattttaaagggttttaagcggtataaggggctcccggggagagtta

SEQ ID NO: 17218 - DNA, 299 bp, Homo Sapiens
  misc_feature (75)..(84): n is a, c, g, or t
  misc_feature (99)..(167): n is a, c, g, or t
  misc_feature (238)..(253): n is a, c, g, or t
gggggggccccggccccctttccccccaaaagggacccaaaaaacgcgcgcccgggggccggctttttacagccnnnnnnnnnnaaaacccggggtttnnnnnnnnnnnnnnnnnnnnnnnnnnnnnnnnnnnnnnnnnnnnnnnnnnnnnnnnnnnnnnnnnnnnnatatccccttccccaaattttgcaccccgaaaggggaaagggaaaccccccgtgaaggggcatattacgcnnnnnnnnnnnnnnnnttacgcgcagggggccctaaacttttgccggccccatagccccccc

SEQ ID NO: 17219 - DNA, 711 bp, Homo Sapiens
  misc_feature (295)..(305): n is a, c, g, or t
gcacgagggggaatgtttttgcagtgaatccagatatagttgtattggtttggaaaaacatttaaatatatttattcatatgaacatgtgtgattaaacaacctattttacatatttctgtaattctgaggagtgggctgggggtaggaagaaatggcaccacttaaaattcagggcttatatgaagaggtgttttaaggttagcacatgcacaaaggaacgagttggtttaaaaagataaatcactgcaaagaatgaaattggcttattcacatcaaaactagataagatgctnnnnnnnnnnngatatgaaacagaactaacctatagtttcctgaaatcagtacagtttaatttataagaagctagaaagtaatgcaccttgattgttttaggaatgatttatgtgttgcaattttaatttatttaaagcatgtctactgtgtttgtcctaagagaaatatttcaacaaaacgtgctctgtgtttaagatatgtttaggcagtagttagcaactctgaaagtagaaactggaaatgtttattgtgaggcttgttgcagaatttccattttgtgagttactacttagtttcatgtcagcctaaaattgtaaattccctgtagatcttcaccccattgtggtgtcatcaatgaatccaaagcaggtgccattatttttttaaataaacacttgatgttagctttggtgtt

SEQ ID NO: 17220 - DNA, 861 bp, Homo Sapiens
  misc_feature (259)..(286): n is a, c, g, or t
  misc_feature (564)..(623): n is a, c, g, or t
gcacgaggttagaattgaagccatctgatcctgagattttatttgatatatttttaatcattcaatctcctcactcattatgagtatgtttagattttctattttcatgatttagtgtcggtaggttttatgttttcagaaatttattcatttactttatgttattcaattttttgacatataactttttataatagtctcttatgtcccctggtatttatgtggtatcagttgtaatattccctatttcattgctgannnnnnnnnnnnnnnnnnnnnnnnnnnnagtctagctaaatatttgccaatttagttactcttttgaaaaaataaactcttaattttgaggatattttccattatttttctagtctctcatttatttctgccctgacatatattatttccttcattttaccaactttgtgcttagtatattttttattttaattccttgagacgtaatgttaatttgcttatttgagagctttcttcttttttaaggcatttattgctatgaacttcccttttctaactgattttgctaagctccataagttttgnnnnnnnnnnnnnnnnnnnnnnnnnnnnnnnnnnnnnnnnnnnnnnnnnnnnnnnnnnnnatttgatccagtggttgttcaggggtgtgtgctttaatttccacatagttggaagttttccagtccaattgttgttattggatccaatccattgttttccaatccaagcgttattgttattgtggctagaaaagatacttgatataattttcatcttccttattcttaaagcttgttttatagcctaaatgcacctatcttgaatatgttctccgtgtgtttgataaaaaagtgtatt

SEQ ID NO: 17221 - DNA, 910 bp, Homo Sapiens
  misc_feature (137)..(199): n is a, c, g, or t
gcacgaggctttggtctctagaaacaatagctttgcattttaaaaggcatgaagtgaaatgtccttatactctgttggatttgggaagcagcatgaaatagtggttaagcttatgactccagagttagacggtgtgnnnnnnnnnnnnnnnnnnnnnnnnnnnnnnnnnnnnnnnnnnnnnnnnnnnnnnnnnnnnnnnaaggaaaaattaaattagactcaggtagagagcttaaaacagtgactggcaagtaagtgctcattcagtgtgaactgataacggtggtagtagaaataggcacactatcggaagcttaagaccgatttgatgtaaagttaatgaaacgaaaatcagtaacagctaatataatttatttattagtatgtatcagggctcgtattttaaaccaccttatttttaccctcaggagtgaaccataaattatttagtttcttcagagaattctgattatcaactcacctgcaaagagggcagaggagggaaaaacaaaagctctgttgggctgtaagcatagtttctatacacttaaaaacactttgggaaattatagctgttcacttttaggtcactttggcagttgaaaccatagcaatgatttctagaaggctaaaggaaaatctggtactgggttttaaaagttgactacctagaaactttggtgaaatacgtaatcatctgggtcctagagagctgtgtgatgttgcttcttcctctcagtcattccaggcttttctcttccctagttcggccatcagaaaaaccagcctgacccatggaaaagtcacatggtggccaggaaggaagtgtgtgaggttcttcctataacatccgggtttccattctgacagttagcagacggattatgctcacactttcacttcttgtaac

SEQ ID NO: 17222 - DNA, 428 bp, Homo Sapiens
gcacgaggggatcacccgcagctccttgggctacgcgtatgtgaacttccaggggtgggcggaagtggaaaatgctttgcactgtgacttttttgatgtgcgggaaatgctcatttgtaccatcatgggggacctgcgtgagccatcacttcccaaaagtggagagctttacatattcatgcaaaatggaggaaatgcccttgacaaatgtgcgccgtaagaaacattttctgcttgtggtaaaaacctttcatgccaggtaacatgagttccatggtgacacatgtttacattgttgaaattgatttagatgtttgcgcgacaagtaaacggtacagaaacgattatctttatttctgaaatatacctacaggccaaatttgagcattgtctcacacttctgcacaaatataaaatgaatattgaat

SEQ ID NO: 17223 - DNA, 1118 bp, Homo Sapiens
  misc_feature (472)..(617): n is a, c, g, or t
gaaacgttgcccagctttatttagggtggaatgggtacaaaaaaaacacatctaaccctaaattccggggttcccatggagtcccctaaacaaaatcagctaccctttccccccaatctcacttcttggcttcccccttcttggccttcttgccctccttgggggcctgggagggcagggaacccataacatttccaaagggttcattggtgggatccacacctgggagggtctctaagacactctggaagaactcggggtcctgcatcacgtccaaaacatcccccctcttgggtgggtcaaaagtggccataactgaactgggatcaatggctgctgattccccctggccaaactctgctccctggagggacatctgcatgggataaacaattcgcctctcctcaatcatactggttaagtcagagagcccagtgcggccaaactcttgctgggtgaaggtcatcttcannnnnnnnnnnnnnnnnnnnnnnnnnnnnnnnnnnnnnnnnnnnnnnnnnnnnnnnnnnnnnnnnnnnnnnnnnnnnnnnnnnnnnnnnnnnnnnnnnnnnnnnnnnnnnnnnnnnnnnnnnnnnnnnnnnnnnnnnnnnnnnnnnacagagagggccgacgatcggccttctcaacaagtgcgcaacctgatatgcggatgaggacgcgccctgtagcggcgcataagcgcgcgggggttgggttacgcccagcggaacgctcaacattgcagacggcctacgccgctcctcgcgttctcctttcttttcgcagtttcgcggtttcccgtcagactttaatcgggggtcccctagggttcggataaatgcttacgcactcaaccccaaacttgtataaaggtatgttcacgagtgggcatcgcctagagacacggtttttcggcctggacgtgggattacccgttccttaaaaggaaaccttgtctcaacctgaacacacttccaaccattctcgctcaattcctttggataaaaagaattttggcaatttccggcccatgggtaaaaaagggaacgaataaaccaaaaatttaagccgggcaattttccccccatttttccccccacaccacaaaaaaggagggg

SEQ ID NO: 17224 - DNA, 545 bp, Homo Sapiens
aactaattactacaaacatagtgtcttaatgcaatactcacttattaccgcacagctctgtatgctgtgagcctgggcaggttggccagattctttggggtctcccaagcctgatgtcgaggtggtggcaggttgggctcctacctggaagctctggggaaggatctgctttcatgctcattcaggttgttggtggagttcagttctttgtggttgtaggactgaggtccccatttccttgctgactgttgtaccctcaacgcctggaggcctttttctggtcctggcaagtggtcacctccaccttcaaagccagcgtggcacattgaatttttctcatgcttcaaaactgtcttgacttcttctgcaactagctggagaaagctcctggcgtctgagggctcctgtgatgggatcaggcctgaataacctccccatcttcaggtcagctgtgtcatattaacgtgatgcagtcacagaggtgacagctcatcatattcacagctttctggaattagggcgggggaccttggtggtggtgggaa

SEQ ID NO: 17225 - DNA, 876 bp, Homo Sapiens
gcacgaggagtgaagagtaaagaggaatttgtcttgcatcttggataccagctcagcaacagtaagatagggcaatagaaagagtcatgaggtccccatccattccatatcccagctcctggacaacatttctagacacactgagggccaaaaggaaatcttctgccttgaagtaaaagatccagtcttggttgttgctgactaaagagaaattggaccccgaataaccagcagtgatatgcagggaatgcgctgtgggctcttgtggctatagtgaaagactccttatgtctgagagaaacaaagcaaaaagtaaaggagactttgttttccacattaggtaccatctcagccacagtaggatagagcaacaagcaggcttttggggtgcctgagttcagacccattctcctggatagcatttctggacctgccttgggccagagaggactgcacagccatgaagatgagttccaggcctggcagcttttagcacaagatgacagaagagaccttggacttcaattgaacatcagcagtcatctggcaaaacttccatggaccagcgctggtggtggacatagggataagctcctctgcttgtggaaagaggaagaaagagcaggaaggactcatattgtggtatgaatatcagcttatccacagtaaaatagaacatgtaaattgctaactaacgtttctgactctaatccctgactcccagacagcatctctggacgtgcttggggcctgggggaactcatggccttataggaaagggttttaggcaagacccagtactgtgctggctttaagtctgacccagtgcagtctcagtgataatggccacaggggtcctttcaccagaacaccccc

SEQ ID NO: 17226 - DNA, 768 bp, Homo Sapiens
  misc_feature (125)..(144): n is a, c, g, or t
  misc_feature (447)..(457): n is a, c, g, or t
gcacgaggagggagctcttgccggtgcttaaaaccaaaactcctggacacttagaaaattccatgaatctagcacaaaatatccattcttgcccaagtgtatcccctttctctccagcttaatcnnnnnnnnnnnnnnnnnnnnaaagcccaggccaagggtacttttaactggaaactggggaggagggaagaacactagcagggagctaagaggcaggttgctgggtaagccatcctgctcctacctggtgcctgtatctacattgctgagtgctgtgcgccagtgcctttccttcatctgcagatggagcccatctctttccacctgggtgaggagaccctctgctactccaggggtaaaccttaaagaaggtgtcttgaaaagcccaaaggacactcacgtgctaaggtgtccattttatgcatctttaaaatattttatttnnnnnnnnnnntagccctgccctgtcttagtgccactaacggcccagttccatccattctgaatggaaaagcggagactgccagcactttccttggtcttccctttgtctcccatgatatgttgttccctcatccctcccatccatttcactgtgtgtggatggatagcagagggtaccacgcagtccttgaggcagtcctgtgtgattccatgatcagttgtttttgtattttaactattcttccaaaccagcagatgtttggaaattaaggaaaaaattaaattctcatcaatggttgctgttatagttaaatcagtaaa

SEQ ID NO: 17227 - DNA, 562 bp, Homo Sapiens
  misc_feature (306)..(328): n is a, c, g, or t
gcacgaggtctagatgaaaggatggcctaggacataggtctcaaagactcttggatcagaatcaggagattagggaaaacaggatggatacctgagcactaacagcagtagacgtagacctctgtcctttaccatctgaggtcttctggattctttgtggggttaattttgatttgatgtcatctgtttgcccttcatcttgcttgcaagtgtgcatggttcaatccctcacatccaggaaatgaattttgcaattgggccagatgctaatttgcacgttgattcaccttctttgcctttaagccnnnnnnnnnnnnnnnnnnnnnnnggcaaatgaatgtaccatttcaactttgattttaatagtgctagttgatattggtaataatgctaaccaagagatcaatgccagatttttctcttggggtaagttagctgaagtcatttaaagatggaaaggtgggaaaattctttgatatttgatgtcattgtatccacatttgttgtaagacatattgcataccaattataattatatcaattaaagttgataaaagcttcc

SEQ ID NO: 17228 - DNA, 702 bp, Homo Sapiens
gcacgaggggtgtctataaaataagctcatctgcacacagaaggtgtttctatttgtgcgttcgctacagtgcataaaaacttcttgcactttgtgttaggcgtatgtactttggaattactaagctaaacctacattctttgaggtggcatttgtgtaaaataacataaattgatgatttttaaaaaatggttagtaatattctgctgtagaaagccagacgtagaccttttacagaaaggtaaaactttgtttttatattttattttattatgaaatctttatagtagagccagaagtgaaagtgtttagctttattttgtagtttgttcaaattgttaggaagtaattagcagctgtattcgaaatctagaatatacgatctgtgaaagcagcttagggcctaagttttgtaagcttgcacttgtttgcgtgtatgacaagtgaatgccacctttttgcagtttaaaaattttctgcttttcaaaataatacatgatctttgtcaaagcttccaaaattcagggagtgctagaaaatctttaaaacattttctataatcttaccacttagatttggttactgctaacgcataatgaaaatatattgtatgcatatgtatacacacacacatctcttattaagcttttcttgtcattaaatatctttcatataaaaaatttttactcaacaaaaaggagg

SEQ ID NO: 17229 - DNA, 934 bp, Homo Sapiens
gcacgaggtatcaatgagtttatttttcaagtggtaaaatgtaattagaaaagaaaataaaaagcacataaagctattaaaactagatccaggaattggagacactacctcatagttggtagaattagtctgctgaaagaaattctaaaggacactgtcaacactgataggcctagaaagacgacttttgtggcaagtttgggactactctcgttgaaaacatcaacaaaatggtgaaattttagagggttaaagctctgtccagtgggcctcaccacctaggaacatatgacttgtatggattaaaatgtccacaaccatgggtacgtcactcactgttgatacttattgccagcagtgcattcagtatttcactactaaatgtgatgataaatgtagatttttaatagatgccgttaaccagattgaggaagttgttttttgttccaagtctgctaagaggttttatcatgagtgggtattgattttggacagatgcttttttgaattgattggatgctcagatggtgtttttattaatgtggtgaattacactgattttaaaatgttaggccaaccttgtgttcttgggataaactccacttggttatgatgtattatccttttttatatattgctggattagatttgttaatattacactaggcatttgttgcctgtgtttatgaggtctacaggtcagttacattcttttctggtaatgtctttatcaagttgctgtgtcaaaattgtgctaacttcataagattactcatgcgctgcataacgatgtttgggtcaacaatgggctgcatatatgacagtggtctcgtaagattataatggagctgaaaaattcccattgcctagtgacatcatagctgtcatgacatggtagcgcaacacattcctcacgtgtttgtgatgatgctgg

SEQ ID NO: 17230 - DNA, 863 bp, Homo Sapiens
  misc_feature (81)..(89): n is a, c, g, or t
gcacgaggaaacagcttacttttcggggcattcctaagcacagtagacaagaatgctccaacagactatgttgtgcattgnnnnnnnnnttttatcacatcatataattaagcaactgtgagaggcttcttcattgaatttgttttctaagaaaaaagcaagggccttttttaaggacataggttatcctttcctgcttttaattatgtcactcagatttttttaatattgacattattggcttcaattaaagttgtatcatcacacaaattaaatggaaccacctagaacaaatattagcaagtttctaaaacatgaaaaatagatactatcgaaataatagctttattttggctctaagatttggctgtttgaaaattgactcatatttggccttaccagaggaaatccaatatcacacagtaaatttcaccactttttttaagcaggaaaatatcaagttggaaaggtgaagtgacactgaaaaatggattgcagaaaaatcctctcataatgggaggaagggagagcagataatgagggatcctgattaaacacaacgctactacccagcagtgaagtgaagcacaaagtgtgcagagaaaatcagatcctgacagccagttctgcactgtgcctataatatcaatggaaaaaacctcagatgtaatccttggttggttgttcctacttcatttcctgaacaaataattcagtactcctttattatacactggttgcttaatcagaaacttggttccaaaacaaccaagagaaataggaacattgccctcacacacagatcacaatgcacagggctcctgtcacatgagtaaaaatcatgcacagttaaaaatggactt

SEQ ID NO: 17231 - DNA, 759 bp, Homo Sapiens
  misc_feature (148)..(430): n is a, c, g, or t
gcacgaggccctgggaaactggcagtgaaaacatttagtcttttcagaggaaattacacctttactcagagaaacgtggtctggattttggatctgcagccccagtaagagaattgcctaatgatctggtatcagttagtacaatcannnnnnnnnnnnnnnnnnnnnnnnnnnnnnnnnnnnnnnnnnnnnnnnnnnnnnnnnnnnnnnnnnnnnnnnnnnnnnnnnnnnnnnnnnnnnnnnnnnnnnnnnnnnnnnnnnnnnnnnnnnnnnnnnnnnnnnnnnnnnnnnnnnnnnnnnnnnnnnnnnnnnnnnnnnnnnnnnnnnnnnnnnnnnnnnnnnnnnnnnnnnnnnnnnnnnnnnnnnnnnnnnnnnnnnnnnnnnnnnnnnnnnnnnnnnnnnnnnnnnnnnnnnnnnnnnnnnnnnnnnntctatttcgcagtctgtattgtttttacaagtggggcagcaacaaccaaacccaaatgaggccgcatcaggctcagccctgttcctattttgtctccctgcactaagggtttcaagcatgtcttagggctgtggtcagcttgttaacacaaatcagccttgaaacctaacagaatgttactttacaatttcctgttactatgttcctttttaaagtaaggctacttccaaatcgatcttcatccttttcaaaatacccaatttcggaaatggaaggggggaaaggaatggggggaaatacaaagtgaaatcaccctgtattttcttagg

SEQ ID NO: 17232 - DNA, 663 bp, Homo Sapiens
  misc_feature (42)..(50): n is a, c, g, or t
gcacgagggctttattaaaatcaggaacatgcgtgcataggnnnnnnnnncactacattgtaaacatcacttcaattgtacacatcaagaaatatttcttgatgctttcctactgtttccccgtagacaaatgtctacactaaaacagagccagttttcagatgaatacctctctctcctaccccgcaagaacttcatgctatatcattacgaataaaaagaatatatctaattttgtactaaatcctaagaattactcattaagaatctttaccaatagtaagtttacgtttaccacgaaaatactcttgccagctatgtctaaaatgcagcttgaacatgaatctctcgggatgtgcgagctccgaaaatcaagtggaaagtcagtcctggagtctgttccttcaacaggagctctggggctgtgccacggaacaagtgggcactgtgcctggtttcagctgcactgcactctacaccactgtaaaaagctgagagcagaaagtaccgtgtagatagatccctgtgataaagaaacctgcaagagcaggctcagtgcatgctcagagaggggtgagcccagaaccgtgagtcagaaaacccaagtgctggtccggtatctggtctctgtcaccagctccttcttggacctcagacaagttg

SEQ ID NO: 17233 - DNA, 724 bp, Homo Sapiens
  misc_feature (49)..(119): n is a, c, g, or t
attatactttaagttttagggtacatgtgcacaatgtgcaggtttgttnnnnnnnnnnnnnnnnnnnnnnnnnnnnnnnnnnnnnnnnnnnnnnnnnnnnnnnnnnnnnnnnnnnnnnnagtagtatcattctattatagctgcatggaaaaagttaatttattaatacaatggatgcctaaggacagaagtactcaaacttttggtctcagtactcctttacattcttaaaaatcattaaggaccccaaagaatgtttgtttacaagggttacttacattgataattaccacatttgaaatgaaaactgagaaacttagtattaattcatttaaaagtaagaaaacaattacttatctacataaatgaaaaagctattttccaaaacaaaaaatgaaaatttagtaagatgaatagccttgctttatgtttatacatctcttaatgtttggcttaatagaagactgctggattcttacatatgcttctgcattcattctgttgcaatatgttgttctgactgaagtgtatgaagaaaatgggcattcacacagacacgtattggaaaaggaagacttaaatggctttttcaaataactgtggacatttttctttgatactacaccaaaacttaacaagtggtagttttttaaaggttaactataacatagactcaagccatactaatgaactttttgtggcattatattaacattcactggtt

SEQ ID NO: 17234 - DNA, 881 bp, Homo Sapiens
gcacgaggcccatttccaaaaacctgcaacaaagagatactttctcaggtgattgttcagatcattattcattacaaagtgtcagttttgtctttattgatcctcattattgtaagaaagtatgtggtcttgtctccattctattaaaacaacattgtagagattagcactgagtctttccagccatatgcatctgttcatttccgtctccagcttgagtttttctgtgtattacaaaataagaaaacaaaaatgacacaataatctattttgtctggttttgctctttattagtagaaatagacaagtgaggagttggaggaagaaattgcttctgatctgttttagatacagatgaaactctccctccctccccgccccacccaatctttctctgtctccctccctgagcctattcttgcttcttccctttacaaataattaactgctcaggtcatgttgaaccaaaaaatagcatctgtagcccctgtgtgcttactttaagtatatgttactgaaaaatgcggagtgagcacttacaactcattctcctgggaagcacagtgatactataccccaaatgcttttctttatcattttaatttttatcttctttacttacatttccaacatcagttaagagggtcttgtagttttctaactgaaaggagattgtaaaatctccttgctcaaaactcagatgcagaatattatttttactacaataaatacatctacaacaatggtattatatctggtttatttcaaagtcaagttctaatatagggtaaacaaatatactaataaagagatatgcttttctcatgaaatgtataatctagtaggaataaagataaacaattttttaaaaattctatttc

SEQ ID NO: 17235 - DNA, 838 bp, Homo Sapiens
  misc_feature (229)..(273): n is a, c, g, or t
gcacgaggatactcagtcagagtatgctccttgacttaaaatggggctatgtctagataaacccattgttaaattgaaaatattgtagaccataaatgcacatatggtgtatgatgttttcaatttatgatgggtttatttggacataactccccgtaagttgagaagcacctgtagtaattattattatttatgctcaaattgacataatgtggccagtaggaatccnnnnnnnnnnnnnnnnnnnnnnnnnnnnnnnnnnnnnnnnnnnnnaaaggaatattgttttcaggccgtaagaggatgtttaagactgaccctgtttgttggttcatgtcccccatgcctcttgtcctgagtcatggaatcaactcatgatttaataccctcttatcttagggagtcctggttccttttagaggaaaaaagaattagagaccaaaaaatctggctgctgtgagtgcacatggcagttacaggtatggaaaaaaagatgctgcttttgttagaattcttttaatagtttcagagttgaaaatgtcatcctaaggtcagaagttccctctgaattttctcaacttacatttctatgatctgctcttgtttgcatttggtattttattgaattatgttttatgtatggtgatagctgagaagtttatctccttttaaggcctggctgaaatgatacattaatctgcctcccatttttggagatattgctctgatttaaatttgtcatggtgtttctgagcagcgttgtaaagaaacttgttttagaatattcagtcatggatgttatcttgaatgttcatagactccccagaaaagagaaaaa

SEQ ID NO: 17236 - DNA, 813 bp, Homo Sapiens
gcacgagggcccaagtcagcctaaatctcgtggtgcttcagtggcactgaaagccaaccatagcttccaaacctgacgtagatactttaatgtgataaagtggagctaattttcccatttcatgtgtaagtagatgcaagagtgcactcacctcaatgtggtttgattcctatcccgcaaaagcacacttcagtctcagtattcatgatggtttcagttcacttattggtcattgtccctttgctctttggttctctggtctcagtgtaagaatgcacactgatttctgttagattctatctgggcagaggggcggggatggattatctttctgtgattgtgtatgagtttgggagtggatgaatagaggaggagttatgtagtgagaagatgggtacactctgatgagggtctccagtggcggcccaaagtgattcatgaagtagtagaagctgatttttgctctctccagccttctgctttctagccttaaagcatcgtgggttttttcccctctcaggactcgattccctacggtgaaaaccctaatttatatttttttctgctctgttcctatgtggaattaactctcagtgtttttcaaattgtgaatcttgacccattagtagttgttaaattaatgggtcaagctagtagtaaaaaatgaagtcatatgaaatatattaggaagtgtcagagcacatcttaggcagtagggaaagtattgcttctgcaaaaacttttatttcaattgtacgtgtatgagagagtactgaacagtactgtaaaggttgtgatgagaacaattgaaaa

SEQ ID NO: 17237 - DNA, 830 bp, Homo Sapiens
acttgaaaaggcagcttgtcagattggcaaagtgtcaaatgctatgtacaagtttctggcaatatggcaaattatgtatcctgaaaaactaaaaatgctgtttacaatactggggagtggctctaaatccatgagctgtaaggaaggaaggaatctttggaggctgaaaagccagtcaagctcctacatgacatgggagacagacgacgaacccacgagcttcatcccttgagtttattaggcaaccttggtctacactctcaggagaggagtgcaccagaaataaagccaggtgccctggagtccacctggagccaggcgcggggcgctgcacttaggttggcagaagcccgttagcgcgcagctccagcagcggggacagcgtgtagcgcaggcggcgcagcgtcgtctccgaggtgaggctccagagccacgcggagacggcgccggggtccaacagcaccgtccagagcagcgacagccccaggaagaggagcggcagcgtcagcagcacctgcagcgcgcccagcacgcaccgctcggtccgccctggccatctcctccatgagcgactcggtgctgtactgcactccgcgaagctgcccgtcacaccgccccaggtctgggggaggagaggcgggaggcaccttggcgtctgagtggggccgcacctgcaggactacggtctgctcctggaatatggcccaacctccgctgtctgcagcgcgtcctgctgcagcttctcctcctgcaggcgcatttggtctccgccagctccagttcattctgcagcgtccccaattgggctgcgagttgctgctccgtgctct

SEQ ID NO: 17238 - DNA, 684 bp, Homo Sapiens
aaattattcagattattaaattcatgttagtcttattgtgatcataacagtaggaactgtacagatgattggtagtggctctcaaatgttaaaatacatcagaataacatgggaaacctgctgaaatgcagtttccagcagacttggttttgtcatagcaattggtatttttaacaagcattccaaggattctgatgcagatcgtatcctgaccacactttgagaaaccattatttagtttctgaatgagctccccattaagaaatgtgaagttttatttaaaaattaataagacaaccctttctgatattaaaatggtctttatcattttatcctatgcatcccaaagagttaaggcagcaggaaatactttgttcccgataatatattcctgtgtagaaaagccccttcacattcacttgaccactttttataccttgtaggaaatgaagttatttctggctgtagttattcctttttctaatagtaaggtgaataaaattcatgttgttctaaaaggaaaataataactccaacctaacaatgaagccagcactaccatggacaattaaactgaagagaagtaaatttggaaccacataagaataaaaagccaacatttccttgggtatccagagactcagtatcttaataagagatgcctgaataacatacaagtttaaa

SEQ ID NO: 17239 - DNA, 230 bp, Homo Sapiens
ttttttttggtggggaaaccaaaaaaattttggccacccggggaaaggggggaaatgattcctttttcccatggggggggaggaccccctgggctttttaaccctcttttcctttttgtttcccccaaaaagctttcaaaaaaccactggttttttaattaaaggggaaaaattttcaggaaaaacgggaccaaaccccttaaacttaaaaatttttaaaatttttttgg

SEQ ID NO: 17240 - DNA, 487 bp, Homo Sapiens
gcacgaggcatgattctcccctgccctactcacataagttcgtactcctaaatgaccaagaggaacaacaaatctaaaatatgttaaagaaatttgaaggggaagaactataaaatcaagagagggaaactgttaaggacagtaagttcctcttcaaagttcccttggtctcttgctctgtacacagcccttcctgcttgatctgtaacaagcacttgttcctcagcttaatctgtaactagcaaacctcttactccgtaaacatctctgtcacacccagacatgtccaaacaccccttaaacttattctgtaggcaactcttcccaccttagcaacagacagtctctccctcccctcctctcttagcaaactgcgtgttcaccatatttagaaaggtttaagtcttagccaattgggttaatttagattgtttggtccaaccctagccaatggggaaaggacacagaaacaggaactgtgttagga

SEQ ID NO: 17241 - DNA, 372 bp, Homo Sapiens
  misc_feature (67)..(141): n is a, c, g, or t
  misc_feature (175)..(241): n is a, c, g, or t
  misc_feature (266)..(278): n is a, c, g, or t
cccccttaaattttttaagggggccccaaaatccggggaaaatttttgggccaagtttttccctttnnnnnnnnnnnnnnnnnnnnnnnnnnnnnnnnnnnnnnnnnnnnnnnnnnnnnnnnnnnnnnnnnnnnnnnnnnncttccccttttccttcagagggtttaaaaaagcnnnnnnnnnnnnnnnnnnnnnnnnnnnnnnnnnnnnnnnnnnnnnnnnnnnnnnnnnnnnnnnnnnnccgttttccccccctgaataaaaannnnnnnnnnnnnaaaaaggaaaaaaatttttttccccttcaaaattttgggggaaaatttgggaactttgccacccccacaaccctttttgcccctggtttgaaga

SEQ ID NO: 17242 - DNA, 924 bp, Homo Sapiens
gcacgaggtacaagaatgactctggttcaatttgattgctgattagataattaacaattttgagaaataagcttgataataatagttactagagtaaaataggtttttattgttgttgttttgtgtcttttcggagagctgagctaggctggagttgggggagaagagatgctataggtatatgctatactgttttttctctccagaccatgaatttaatcagttactgttgtgcatatgtggaaaattacaaaataaaacattctgtaattgattgaatttcatagttgactacataattatgaaaggaaataaaataggaccacaaatgtttatttctatcttcctaagtcataggacaaaaagatctaggcatctacaatagatcaaataaaaagaagaagttaacttttaattttcttaaacttttggaggcattgttcaagacagattggtgacaggaaattgcatactaatttgtagtgaagactaataatctccaagactctctgaagattcaaattccttcagccattaggaagctttaaaaatgtagaatatatactttttaaaatccagacttaaaaatggaaacttaggtggtaatttactgactttaaagatgattttctttgtgttttagataccatttactttccttgactttccagaaggcctggggaggcagaaaaacacatataactcttggctgtatctctgtgtaacttagctactataaattctggacgacacgggtcatggagcaaataaactacacttaggctactgagtttcacaaagctatctggttttatgttactgtgttattcagattcatcttaaatttgaaattatcacaaaatattcattttgcattttcattactgggtataagtctacttattttttcatcaaagcatttaa

SEQ ID NO: 17243 - DNA, 391 bp, Homo Sapiens
gcacgagggggctgttcatttccagcaggtgttaagagctgagtaaggcccatagcatggaaatacgatcatctctgcccctacagagttacatataccttttggttgtttgaaattacttatttggtagctctgtttgatgtaacaagaaacagactcctaggccaaattgaaacgccttttgtattatctctacttaatttcttctacccccagttgattctctcttaccttaatcacattattatgaataattgaagagctgatgatgcatttttcagcctaaggttttctgatgaggactaaagcatctgatcaaatttcatgttcatgatttcaacttcacagccagtatctattcactcaaaagctttattaaatctcttctttc

SEQ ID NO: 17244 - DNA, 943 bp, Homo Sapiens
  misc_feature (261)..(271): n is a, c, g, or t
gcacgaggaaaccacccagctccttacatagtttttaattatatagctatatgaaagaggtggctaagacatttgctgcacacacttgaactaatgttgggtcagtagcttcgtgttactgccctgatcccagtgtaattcaggtggaaaggtatttttatctcacagggatatgtagctatgtattttactaattgtgaaacactggaaattaatgatgcagacaacttggtgtggtctttgaacagctctctgcagtannnnnnnnnnncctgttaccataaattgtatttaagtgcttgctttccacttaagttgtactaatagaaccggtaactcccagccctccctgtttgacactccttagcttagattgatgtagttgtttttgttatccctataatgtgacttttatttttaagtcattgtgtactgcatttgtttgtcactagttgggcacgtgccaataatattctctccattccttatctgccatctctgttttgcctgatttctcttcaactgaataatggctttttgcatggaaaaaatagtttttactattagacgtgtaaagggaagagagagctaatgtattggactttgtgagcctacaaggaatattttggatctctccaataaataagggctatgtactatatgtactatatagagttatcatgtggtggaagatacttgcaagtcatagatttatgggcaggaggatttgttactccctatatctaggctgaatgtaaaatcccttatgttgtatcaatgggggtaaaaactatttttatttgcctatgatatacttggtttctaataaagtgccctaggttctagtgagaactgtctactttgaatttgcatttactccctttcctctttggccgatatgctcttggctagcttttataagtaatgtgtttccccaaaagtt

SEQ ID NO: 17245 - DNA, 826 bp, Homo Sapiens
cagcctatggtaaatatattttgaactacaaaggtgctgtggtactttaaagaaaaactatttttactagtttatctgaatggtctgtggactttatttagaaactgtttttcagtttagttttttggacatatcctttgctcagtgtattttgttacttctctagtaaaggtagaagtgaagcagatgccattgtaggttttaccagcatttaaatatattatgaattgcttagcaatgaaatgcaagtatgcatcttttacttaaagatactatttatgtattcagctacagagatgaaatagcattttatgtgttaattgttttggctataaaatttaagtccttacagcatttggggattatacacttggatttcaaaattgataaaacccttgtgaacatatctaatagatattctgtttacttgtagaaataatataatgtgtctggttctgttttgttagacattttttatgttctactgaatcagaatagtcagtgttatattccttatttcaagaattcatctattttatggctacatctcatatgtgctatgaggacttctagccagtgggtggcgctgtaataccgaagtactgcactgctttgttcctgtttccttgtgctgattcctttctagtatttaggtaacattaccgggatggcatttcccttaaattcaacaaactcttaatctttattttaaaaatggctactttttttgggtgggtggggtaagggttaaaccttaaattagtaaccgctgtttattttccagttatttgttttctgtgattatttataatattgatattgtttt

SEQ ID NO: 17246 - DNA, 589 bp, Homo Sapiens
gcacaatgtcttgggcaccagagactgagctcttttctctttcctttccacttctccttcctgggagatgcctagagacagaggtctaggagtggtgactgtcacagtgaagggctggcaggaagagcaggcagaccagaaagagatggaagcatgaggaacataaaatcattccatcgatttaagcattttcaatgtatgattcctttctaccctagaaaagcagagaccagcaccccagcactgcccccaaaaccatgttgtcctactacgtgtcacctctacaggaccagctgaaattagcaactgggtgtgagaatcctgaaacccattttgattcttgttaattgcaacctccaggctaacctttgcccctcctaatcttcaccctcctgccctggatgggttggctctggataccagaaagagcctgggcacctgggtgagctgtctggatgcaccacacaaactagaaatcaggctggagagagtgctagaatcaccagcacaccaagcacacctttcctcccttcaactctttctggaataatctgggcaacaaacacgcattttaaaaattcattatatt

SEQ ID NO: 17247 - DNA, 734 bp, Homo Sapiens
  misc_feature (262)..(321): n is a, c, g, or t
  misc_feature (576)..(594): n is a, c, g, or t
  misc_feature (607)..(667): n is a, c, g, or t
gttcaaggatttctcctgcctagatttgtctactgctatcattttgtgtaaagcagttgttctaacttgaatgagtctagaattcatcattaagattgtgatatttatagagcatccaatgtggagatcatgatactttaaatataaaaaggaaaatatgatagaactgttattgacaaatgcttataatgattgaagggaaagtatctcaacattgtatcagtcacatatatttctgttgctttcaccattttctattccnnnnnnnnnnnnnnnnnnnnnnnnnnnnnnnnnnnnnnnnnnnnnnnnnnnnnnnnnnnntctcctggcaattgattagtgttaatcattaaatctattttgacacaaggttttatatataattagatcagttttccactttattacaattaagaaatgagtaaaatatggatataaaaggagaattggattgaaaagacaaatacacatttacaaggtcatacctttggtaggacagacaattctatatagaatattctcttttgataatgaaaaaaattaaagagagcacaaactttgactatgtcaaagtannnnnnnnnnnnnnnnnnngagacaaggtctnnnnnnnnnnnnnnnnnnnnnnnnnnnnnnnnnnnnnnnnnnnnnnnnnnnnnnnnnnnnnggggctcaagcaatcctctcatctcagctctcctaagtagctgggaccacaggtgcacctcggtaca

SEQ ID NO: 17248 - DNA, 352 bp, Homo Sapiens
ctaattattgtttcttaattggttttgctgttccgagggaaaggactccaactaggaaaatagtgagaacaaaatcaaaaggaatacagcaaggaaaggccacgtggaggacacttacagataccaagcaccaggtcagcctgtacctggacttccttcagaattgatccatcccactgttgttggtggagtatgcaatctgatgtggctgcctcacaagctcttttcccagggacagtaccataaactaaccttcaggaaatcctgataaaaattttcactagcatttgaaaaaaggtcccaggcagctgttgcttttggactccaaaactaaatatacattacttttctc

SEQ ID NO: 17249 - DNA, 876 bp, Homo Sapiens
  misc_feature (239)..(605): n is a, c, g, or t
gcacgaggctcccctctccctccacacctctgtctcccttccatgtccatatttcacttttctcatcatcgggttcaagtgtgactagcacttctgagacctccttctttcactccagcctgttgccccatcttgataatgcttcctttaaaatgtctttgagtctgtctctttctctctgttcccactgcccctgctcaatactgtcatttgattagactattgtataagcctctctnnnnnnnnnnnnnnnnnnnnnnnnnnnnnnnnnnnnnnnnnnnnnnnnnnnnnnnnnnnnnnnnnnnnnnnnnnnnnnnnnnnnnnnnnnnnnnnnnnnnnnnnnnnnnnnnnnnnnnnnnnnnnnnnnnnnnnnnnnnnnnnnnnnnnnnnnnnnnnnnnnnnnnnnnnnnnnnnnnnnnnnnnnnnnnnnnnnnnnnnnnnnnnnnnnnnnnnnnnnnnnnnnnnnnnnnnnnnnnnnnnnnnnnnnnnnnnnnnnnnnnnnnnnnnnnnnnnnnnnnnnnnnnnnnnnnnnnnnnnnnnnnnnnnnnnnnnnnnnnnnnnnnnnnnnnnnnnnnnnnnnnnnnnnnnnnnnnnnnnnnnnnnnngcctcctaccctgtttctctgcctcctgcctcatccttcatgtggaatactagtttctttcacatcacttatcactgattgtagtaatacatttgttgtgtttatttgcttggtgtttatcttcataaccagatgacaggctccatgaagccacacttgtttggttcaccactctgtacccagggctgcacaccatgtccaacacataacaagtgcttcgtatgttttttgacaaaatgaaatgctgactacattaaaagtctccagccag

SEQ ID NO: 17250 - DNA, 701 bp, Homo Sapiens
  misc_feature (493)..(518): n is a, c, g, or t
gttttttataaatttacttgtctaaagtggggaaagggaaattattctgttttcttattcttgcttcaagactatgacagatttgaaagagaattctaaagcagatttagagaacctgcttctcttcttatctcctaatccctaaattgtaatttagctcttatctgtattgttgttttgttttggtaaagggatgatttttacattgagttttaaagtagaataagaaaagcttctaaaaacttgcattgtgctagggatctgccctatatctttgcctctggtgtttcgttgttgttgttattgtttgtttgtttccaaagaagttggagttaaggacacaatatatttgtacccctagactgaatgggtgagtattccatatgaggatctgggtaatcctctttgcaacccacatttggtcttcagagacactggcattttgaagaaacatatgatatagctgtttggaaataaattcatctatgttacnnnnnnnnnnnnnnnnnnnnnnnnnnatgagcaggagatcttaattgacagaaactcattggtggttggagtggccaatgggcacgggaaaaagtatccagtaatcagaagattgtatctgggttatgtaatcttatgcacattccattgtctttgccagccccagaagccatgttgtgttcatttgtttagaaatttgatagatttac

SEQ ID NO: 17251 - DNA, 364 bp, Homo Sapiens
aaacggggcaacatttattgagtatttaccgggtacccagccctgttttacgggcactactcaatgtggtccgcccaatgaccccacgagagaattattaacactcattttaaggataaggaaggaaccagaagccctgaaaggtgaacccttaggtaacaaagccagtaggggtgaaaccggcatggtgatttctttaggggagggtataaaagtcctttgcgaaaagaaacatttccctttcaaatgcctcagcacctgctttttttccaggctttggtttgtacttgtatctcagccccagttattttatagttaggcatatgaatttaaaatgaaagggagaaatactaaagatttgaaa

SEQ ID NO: 17252 - DNA, 760 bp, Homo Sapiens
ggcttcaataaaagaattttatttctcacagttctggaggctagaatttcaagatcaaggtgccagcaaaataggtttcattctgatccctctcctagcttgctggtggccaccatgttgctgtgtggtcatatcacctcttctgtatgtgtgcgccaggtaggcagagaaacagagcaagctctctggtgtttcttcttatcaggccactgagcctttcatgagggcctccctctcatgacctcatctagctctaatcacctgccaaaggcctcatctccaaagaccatcacactggaggtcagagggtcaacatgaatttgtggggatacattcagtccataataatatacataaagttattcaaggccctaataacataataagccagaacttggatatcagatgggtcaaaggctttcaatgcttaggaggcatattctgcttaaggcaatggtgtcccttgaaggctatctgtttgcttttggataaaatggacagaagggccaaagtaaatactcaagtattagggttagtgatgttatataaaacaccaagcacaaatagattaagattgagaagcaagattgtgagtaatgttctctcttaccaagctgatgagcccatcattgctgagagcaggggcagtggttaggctggctggtttgtagtagattactcctgtttaaaatgtgagaacagtcattcaacatgttttaaattcaaaacacatcctttgacctagcgacttctacatcta

SEQ ID NO: 17253 - DNA, 432 bp, Homo Sapiens
gcacgagggttgaaatcacctgttccagaaccagtcctgtcctttgacaagaaggatttaattatcagtagtggtggggactggctggagagaggaaaaacacttcaaggactctgccacctttcgtagatggagagtgcaaagtttgtaccatggaactccttctctaacagttactctgtggcagtgcctatttcaaacctcccttaacttctgattgtatagatgtttgtttcatttgttcatctgtttgttcacttagtcagagatgttttaagccttaagagaaatagtggactagaaaatgccttggaaaagtacaaagttcaatccaagtaaactgtttttaaactaggaatttatgaagcctaaaatataaaatgtatatacatggatatgctctgaagtgaggtagaggggtagaaatcaaca

SEQ ID NO: 17254 - DNA, 361 bp, Homo Sapiens
gcacgagggttagcccgaccggcttcgaagcccgcgccggttgcggatcctccgccgcgcccacctgtcagcgcctcggccggccggggctcccgccgcatgcaagcagcgaggcgaggtcgcgctgaggcctggccatgccacggacggccgggcctcaccctgccgctctctcgccgtccagaggcccctgctccacacctgggtaccctgggtcctgactcagggcagctgggtgagaagctaacggcctgaaggaacagggctacaaggggagtttgtgctgggcctggcgtcccaggctgtggactggaactggacatgagaacccccctacaccctcccaagtcaaagacactcc

SEQ ID NO: 17255 - DNA, 891 bp, Homo Sapiens
gcacgaggcacaccttgagagaaaaaaaacacttttcttaaaattcttcccttccaaggtcagggtaaggattagggcaactgacactggaatggaagaaagaggaaacaaaactacttacactttgctgttccccaaagtataggccagactatcttcctcattgtgcatgtatgtaagtttactgtaacccgttacacaaacacaaatactgtgaaacttatagtattttgacctgttcccatgaactcagggcagttcacactcacgttacccaatttattttcccaacactcgtaatagtctgatattatgaaactgtcatggaaaccaactcaaaggttaagtgacttacccaaaggtacacagctaggcgtggagagaggaggaaaatcaagcttccaacaaactttccccacaagattatgagtctaaaagcactcttagatggtgtatctaaagctcgagggaagaatctgatcctggagttattgcataatgtgctaaatactatattgaaagattgaattaattaaaattaataaaataatgaaaaatgaattccttatagagttgaggttttttccaaaagcacttactacctcactaatttagtccgaagttaaaaagaatgagggatttcaccttttgagactaatgataatcgtaagcaaagttatcttttataaaataaaaagataatagtaaatttttcctagtgatataaaacaaccagttgtctgaacaaccagattgatatgttatgcacttgaatatatcttgtaataaatacacatcaaagagttaaacatccctacttttggggaatattctctattgtctctattttgctaccaagttttacagtattttattaacattttaaattta

SEQ ID NO: 17256 - DNA, 935 bp, Homo Sapiens
  misc_feature (176)..(488): n is a, c, g, or t
gcacgaggcttcaaaaaaccagtcaacaatgagtaagtcaatcttatagattcttcttcctcgaataaaatacaaagaattagttccaataagtattttaactttgttaacaactgaaataccccataaaaaaagaactcgttgagagtatttctttaaaatggttacttgctgcnnnnnnnnnnnnnnnnnnnnnnnnnnnnnnnnnnnnnnnnnnnnnnnnnnnnnnnnnnnnnnnnnnnnnnnnnnnnnnnnnnnnnnnnnnnnnnnnnnnnnnnnnnnnnnnnnnnnnnnnnnnnnnnnnnnnnnnnnnnnnnnnnnnnnnnnnnnnnnnnnnnnnnnnnnnnnnnnnnnnnnnnnnnnnnnnnnnnnnnnnnnnnnnnnnnnnnnnnnnnnnnnnnnnnnnnnnnnnnnnnnnnnnnnnnnnnnnnnnnnnnnnnnnnnnnnnnnnnnnnnnnnnnnnnnnnnnnnnnnnnnnnnnnnnnnnngttaacttgctgtatacctcagtgtaatgtccattcaaggagtattaaatgaggatttccctgcgaggacatttactgtattgctacttaaattatggaagacaatatatcttcaactttaataaaacctattcagaaaattaccaattcagaattcggagttcttatccaggtgctctaactaacttcagggaaattggaacaataagttatgttacatgcacactcaaattctttattttctccactttaagcaggaaagggtaaaaactgttttggtactcaagcccagccttacatactgtgtttctctctctgtctgcatgcatattaaagtggaaaaattgtatttatatcttagttattaccatagtacctatgaaccttatcaaaattgcttatttgactggtgttacagctgctattaatctaagtctattggttttc

SEQ ID NO: 17257 - DNA, 865 bp, Homo Sapiens
gcacgaggcccacccgagcctcaaaccagcaagttttttattaagggtttcaaaaggggaggaggtgtaagaacagggagtagatcatgtgcttcaaagggcaaaaaggtactgataagggtctatgttcagcggtgcacatgttgtcttgataaacatcttaaacaacagaaaacagggttcaagagcagagaatcagtctgaccacagacttaccagggccgggtttttccccaccctaataagcctgagggtacttcaggagaccagggcgtatctcagtccttatctcaaccgcataggacagacattcccagagcggcagtttatagacctacccccaggaatgcattccttccccaggatattaatattaatattccttgctaggaaaagaatttagcgatatcttccctacttgcatgtccatttatgggctctatgcaagaagaaaaatatggctctttttgcctgaccctgcaggcagtgagaccttatggttttcttcccttgttccctaaaaatcactgttactctgttctttttcaaggtgcactgatttcatactgttcaaacacgttttacaatcaatttgtacagttaacacaattatcacagtggtcctgaggtgatgtacatcctcagcttactaagataacaggattaagagattaaagtaagaaaggcataagaaattgtaaaagtgttatttgggaattgataaatgtccatattaaaatgaaatcttcacaatttatgttcctctgccatggcttcagctggtccttccattcaagatccctgacttctcacaacaggtagttgataatcaataaagagacttgacattactcagacttataca

SEQ ID NO: 17258 - DNA, 914 bp, Homo Sapiens
  misc_feature (181)..(189): n is a, c, g, or t
  misc_feature (355)..(363): n is a, c, g, or t
gcacgaggaaaatattgcatggatacacaaaactttgacacataaaacaagtatataattagactatgactttttaaaaatctgtgctaaaataatagacatcataatattacaagactctaaattaggcctcaagttgataaatagatattctggaagtacaacttaaaatttttttagnnnnnnnnncacttaaagattgaaaaacttcagtagagtatacaacttttcaccaggaggccaaatactgtgttacttcataatatgaaaaaagttttacaaacttatagaaatggtaaagcaaaatctaagcacatagttttggaggtaagagtcttaaggaatattaatgtcnnnnnnnnnggattcctctcttaataaagtttctaagagcaccaggtgactatttcactaaggaaaattaaagtatgcctcagctaagctcatattgtcacttctggatatttgggatgttaacagataaaaatgtgttttttatgaagaattgacaaagtaagataatagtgacctattctataaaatttctgaataatatgaattataattacaaaattaaaaacagaaatcatctcctttattaagaaaagaatctcaaccatctttttgtcattcacaattcattttgtcagtcaaaattaaggctgaactaaaagtcaataccactatgtggatttttcttattaccttacagtgattgggactagatattcagtggaaaacctcattactgaaactctgttattaaaagtgggtgaatgaatcatttttatttatccataatatttgtacatatttatgggatatgtatgatattttgctacatgaacagaatgtgtaatgatcaagtcagtattatcgttttatgtgtaaggaacattgtaagtctcctcttc

SEQ ID NO: 17259 - DNA, 538 bp, Homo Sapiens
gcacgaggctcacattatcagatgatgaaagaagactcgcagaagatgcaggggtccctgggagctcctactgccgagtaaaggcaggaaactaggcagctggattctaaaataagttagacttccatccagcaaattaatctcttcgtctttcttattcatttccaaagtaagactgctttctgcagagtataaggataatttatgccccaaagaacctggcttcctaacatctatgcagacacaagagggcagagagacaatgttctgttctaacagcagcttggagcagatgaggtgtgtataaatgaactttgttatgtaaaaagggagtattactgtgcaaggaaaagttcaattttcatatataaaagcacctctagccaaaaggcattttacaaagagccagttttcttgaacaaaaggaaaacgctaggctcctaaaaagcctaatcaagaacagatccagaaacggagataaacaaaatgaattttaaaatgataaactgaagtattaaaatatttttgatttaatgac

SEQ ID NO: 17260 - DNA, 877 bp, Homo Sapiens
gcacgaggttgttttgtattttcaagtccttaatagttcttgaaactcctagttgttttcttgttgaaagcagacacacatttagtgcacggcttattttacctttcgggtgaaagatcagatgtttttatacccttcacttgatcaatatatttggaaagaatgtttatcaaaagtctatgtcactgcttctacagaagaatgaaattaatgcttaggtgatggtacctccacctacatctttttgagtgcattcaattatgtattttggtttagcttctgatttaacatttaattgattcagtttaaacatgttacttaattagcaaatgtagaggaaccaaaaaaaggtgaaaataatatgttttgattcaaacctaaagacataaaaacataaagacattttaactttgggttctctttagctgggatctggccagaaggaggcttaaagttagaaattgctattattttagaataggttgggtgggttggggggcaagggtgtctatttgcagcagagatattttgaaaagaagaaaattgttttatataaaaaggaaagccatgaccacctttctacctcagatccatcttcatccattgcattggaaactgctttatgctgctgcagtctgcaaagtctagagcttttatcaggccatgtcatacgcaggaaagcacctatttaaagaaaaaacaattccctgagctctcaactccaagttgtagatttggtgtcttccttgttcttactttaaaagtcatgtgttaattttttttctgcctgtatttgtatgcaaaatgtcctctatctgctattaagaaaagctacgtaaaacactacatggtaaccttctaagaataataaataaaa

SEQ ID NO: 17261 - DNA, 492 bp, Homo Sapiens
  misc_feature (120)..(222): n is a, c, g, or t
  misc_feature (296)..(317): n is a, c, g, or t
  misc_feature (326)..(339): n is a, c, g, or t
  misc_feature (359)..(368): n is a, c, g, or t
  misc_feature (428)..(439): n is a, c, g, or t
aaacccttaaaggggaggggttttaaaaacccccacaaaaaaaggggggacagttttgtatttaaaaattaaaaaccacccggccttattttaaaaggcttctactaaaaaaagcttctnnnnnnnnnnnnnnnnnnnnnnnnnnnnnnnnnnnnnnnnnnnnnnnnnnnnnnnnnnnnnnnnnnnnnnnnnnnnnnnnnnnnnnnnnnnnnnnnnnnnnnntatcccccttcttcttttgaaagggtaaaaaatccaacctgaactgggaaagggcccggggggcccgggccccnnnnnnnnnnnnnnnnnnnnnntaattatgnnnnnnnnnnnnnngggagggttcttctttaccnnnnnnnnnntattttaggcctccttgggcccaaaaaaaatggaaaaccccattgaccctccattttccnnnnnnnnnnnntcagggaggggttggggaaaatttccaaattggggggaaagaaacaaccgtta

SEQ ID NO: 17262 - DNA, 523 bp, Homo Sapiens
gctgatttaataattctcttatgtgtttaatgctaagtcttcagaacacttgtagcccacatcatgcctaaaattatcccttgacaaactttggtctttttcatactgaaaatatataaaagtgaaatgtattccataaaataggcttcctcagcctccgatctgtcctcctcttgaggaccctgatgctttagagatcatttaattttcctcctcttgaggaccctgatgctttagagatcatttaatttaggaaacaaaatagacaccatcacatgacttttcatgcattttctcctcttttctccttcttgtatccctaggaaatgagaaaaaatgtgtagctatcagggcatgagagtcattcctcatcaaaactcattttgcttttgatccctgaggaaaagggagatactgaatttggttcatgggaagttggtcaaatttcaaagatggtaagcctgtgtgttttcccatgccatcttgtttcttttccgtatagtctctactagttttctaaatc

SEQ ID NO: 17263 - DNA, 359 bp, Homo Sapiens
  misc_feature (112)..(174): n is a, c, g, or t
  misc_feature (184)..(196): n is a, c, g, or t
  misc_feature (247)..(296): n is a, c, g, or t
ccccgcgcaaaaatttttttatggaaaacttttggggaccccttcgcccggggagcccccccggcccggttccaaaattcggggcttgggggggaaaaaatttttttccccnnnnnnnnnnnnnnnnnnnnnnnnnnnnnnnnnnnnnnnnnnnnnnnnnnnnnnnnnnnnnnngaagggtttnnnnnnnnnnnnnccggttttttttccccggggacccctcccaattaaaaaacccttggttttnnnnnnnnnnnnnnnnnnnnnnnnnnnnnnnnnnnnnnnnnnnnnnnnnnaaataaacccttgaaaccccccggtttcggcctcccaggggtcccccccacccggggtgaaat

SEQ ID NO: 17264 - DNA, 931 bp, Homo Sapiens
  misc_feature (223)..(231): n is a, c, g, or t
gagggctttattggggtcaaaacaagaatccggggggcttgaggaactctgtggatttgtcaattttcttctccacgttcttctcgggctggttccggaacctcatgaactgttttttcttccgggaagggaatttgggttttctctttcctctctcctccagggggggttgcactccaaaaaaggaaaatttcttggagggttcagaaccacctgtcgtaannnnnnnnnaagccgtccaacaccttgagaaggtccaaaagcgcctggcctctcttggttttgtggggcaacattactcgcacggtccgccaaaaaaagcggcctggggccccgaaatggtaagggtctcggggagagttggtgtttcctcgcctgcggaggaaaaggcccggacaattcgcccttaagaggatcgtaataccgcgctcactggcgtcgtttaacacgcttgagtggagaaacctggggttatcccacataatcgcttgtcagcacaccccctttcgcagtgggtgatatagcagaagcccgacggatcggcctcctaccagttgcgcacctgagtaggaatggaaccgcctgtaacgcgcaataaacgcgcgggttgtgtttaccgcacggggagctaacattgcaggcgctaggccgcttctttggcttctcccttcttttcgacacggtgcggggttctgaaagtcataatccggggttcttaagggctctatatagcgttacgacctccaccaaaaaactgataaaggtattgttccgagagggccactgccctagtaaacggttttcgcttttgacttgaaagtcacagtcttaataagaaccttgttcccaactgggaaaatattaataaaattggggtattctttgaatttaaggaatttgcccaatcccgcgttatggttaaaaaagaggg

SEQ ID NO: 17265 - DNA, 924 bp, Homo Sapiens
gcacgaggagaacacagtagaccactcactatttatgaccaagcctcacttcttttctattacagttacagattcttttttagtctggaagttagggtaaataaaatttgtatgtttgatttttctcttaggaatgttttctcatcttaactcttatgttatctttatggccaacagatttgctcagaatatatcatcaaaatatatgtattgtattttgtaaaggtgaaaggatcgaaataccactttgacagttataaaccagagtagatttgagaactgattgctcacatcacacttacgaatagtctcagaagcctttaagagaaacttacttctcaatggacacttagaagaatttgatgatcttactgtcataaaatcagtaatgaaattctcagcaaaactatttggtaaacattgcaccctgtatttttacccaacatcttgttatgaaaattatcaaatacattaaaaagttaaaataattttatagtgtactcactacctagatgctaattagcattacctatgcttgctttgtcacatatccattcatcatttcatattattatttgatgcattttaaattgcatatcattaactagagttcattgttggcttttttacataaaattagcatgcaatgaagtgcatagaaatatgtgttcactgaggtttggcaaatgcatatagtgctatggaaataggaaacgttatcaccactctagaaagtttccacactgccctttccagtcaattcctgtccctacttgaccctcaaaggcaaccactgttcctttttctaccataagatttttctgttctaaaactttatataaatagagtcacgcaacatgtacgcttttctacaagcttcattttttattgctgttcttttttatgctgagtagtattccactg

SEQ ID NO: 17266 - DNA, 978 bp, Homo Sapiens
  misc_feature (322)..(370): n is a, c, g, or t
gcacgaggctggcctgtagttgctttttattatagtatttctgagattgttcttacgcttagaaaaggttgaagttacagaagagaaaaatactcagtattttctaaggtgtaaaatgagcatagatctgttgacggtggatttgttatacaaaagtccttgttggtacataagttgaaaaaacagacatttatgaaatagaatatactgcagcattgagaagcactatgtatatgtccaccattacaaaggatgtgtaagtcaccatagttccatttctcctttttttctagtattaattatggcaacttatggactgggnnnnnnnnnnnnnnnnnnnnnnnnnnnnnnnnnnnnnnnnnnnnnnnnncccctagcttcccaagcttatgataaaataacattgtacacacgagaaatatgcgagactaaatgagcctataggttatgtttacacatttgactccaactgaaatagtaccattaaaatctatttaataaacaacgagtatcctatatgcaagttacctaggagactgttttataaggtataacccctatcctcatgtttaataggaaggtgagatattttcacaatcgttaaagacgtttgataataaggggggagagctgtgtgagtgctagaagtgtagttttatgggcatatggaagcagatcacttaactactggcaggttgaaaatacggaatcagtaaggatatggaaataaattttactgagagacatcatattttatttttaattttctcccacagcctcacccctccccattatactcataaagagaatcagttaacaagtttcagcgtgctttaattttgttttaccttcttgattttaacaataattaccagctgacacatttatacttactgtatttgtaaggcatattgtaagtactttatttaatctttcccagtaccctacagagcagtactgattgtttccattttacaa

SEQ ID NO: 17267 - DNA, 246 bp, Homo Sapiens
gcacgaggtgtcttcattcaaccttaattattctcttaagggccctatctccaaatgggatcatgctgcgggctagggctgcaacatgtgaatttggggacacacagttcagtccatcatacccctgaagacatttgccaattcataacagcacggatggaacttggcagtatctattaaagctaaacatactcagcaattccattcctagctgtgggccagcagaaatatgagtgtgttatcagt

SEQ ID NO: 17268 - DNA, 233 bp, Homo Sapiens
gtaatattgtgcaaggtccagagtcggcctcagaagaccttgcagcttttgcctttgcccacttggaacactccctctgtcatggtagaagcccccgctagactactgaacaccaaggactgggcggtgaaagagcaagcagacaacaaccagcactaaggctccaggtacgagtgaagccatctgagactctccagctctgattaagcagtcaagagtactggctggggctg

SEQ ID NO: 17269 - DNA, 789 bp, Homo Sapiens
ttcctataaaaaacccccgggctgcaggaattcggcacgaggctttccaggcacacaataactgttctggatttacctgacaaacctagttgagtagcattttgacagaaaatatcacactgaaagttcattcaaatgtacttaaatgtacaatacagtgttcaatagtttttattgcagtgatgtttttccaataatttaagtaattctcttcctagtataatacagttttcataaataatgtttacttgctttctttatattttcaaataaaattaaaatgctcgagcacttcctttcataaagttataaaattaaaaataattattttaaatgctcattcaaatgtgtctgtatacttgctatgcccctttttctataattccaaactgagactgatttttcagagatttttaactttaataattttaaatctagaatcaagtgaaacagatatgttaaatactgagtctagttttcttccatcttatggagcttcatggaataagaatctaatctagtgcaaatgaagattaaatatttctgggtgatggagagatagtcaacaaatttatttatccatcctctgcacatcattccactggagcaggagttctacacattaaaaatgtaatgggatcagcctagcattgtttggtgttcttttgttgtattttattgaatgggggtggggggcctaagtgtccttatgaagctgtggtccacgacaggagcttgtttgggtgagtaccagggttctgctgctttctgcatctgatcaacacaaca

SEQ ID NO: 17270 - DNA, 872 bp, Homo Sapiens
gcacgaggaagagttatcagcctaaatatgtttttacatgctttagaaaatctctttaatacatgatgtcactaaatccctggctttctaagtttgctaagagagaggcaaagagcataaaatttctgtaccttagtttcctgtctttgaaattatgtgcctgtattagatgatctgtcttcagatctgcaatttcttgcaccctgaagaatctatgaatttaggaattattggcctagaagggactgttaggggctctcatggaaactaagaaatatcaagtctaatttagtaggttagaagggaaaattggggatttgtgacatcttgatttttaaatcaagggcaagaaaacagaggattgggaatagatggaaggacattgatatcctcttgtggtccctttgatttaattttattttgattttctcaggcttgactggattcccgtttactttgtaatatttactgatgacatgccattattacttagattctgctaatctcaagcaatattgggataagaagcctttctaagctgctatgactgtgttaatgagagtccagaataaccagactgaatgcacacaggttgataagataaagtcatatttatgggactgtttggaaacttagaggtctatatttaggaagcaaagataagaatttttgaggtctacatttacagttaagagtattagtgacttgtatgtgggagaattgggtctactctaacacaaagtgtgttcttttcattgtagtgtacctgttatataaatataaaatctgtatatcttgctctctctcccacttttaaaaacaagttcagcaatgccaatatatagttaccctcagtgtttagactgtggaac

SEQ ID NO: 17271 - DNA, 632 bp, Homo Sapiens
  misc_feature (248)..(312): n is a, c, g, or t
gcacgaggaatatgtccactttgcggtctgagaaggtgtcaggggttcctgagcaatacactggtggtctcagaatagaaaagttgaactagtgaggtgtaaaacatagtatgtttgagtatggtggtgatgtcaataggatagttatttaaattttacttttctttttccagtctcttaagttaaatttaaacagttaatgtatgaattctgcctgaaattaggggaaacattatggcctcattcannnnnnnnnnnnnnnnnnnnnnnnnnnnnnnnnnnnnnnnnnnnnnnnnnnnnnnnnnnnnnnnngggaatttatttcctcagctgggaagtgaaataatcatgcctgccctggctgcttctgtgagtggaagatcataattggagtgcatgaaagactttgtaaactgttaagtgctctataaacgttagcattttactcaataaatttttatcacacattcgatggaataaggaaagagaattgaaataatacagtttttcttcattgccttagattataattcagatataatacagttcattacatttcatagttgtggctatttcagtaaatttatttgtcaaactctatattaaataaaataaatttattatattttatc

SEQ ID NO: 17272 - DNA, 727 bp, Homo Sapiens
  misc_feature (229)..(537): n is a, c, g, or t
gcacgaggattaattatgcaatgacatttcaatgttaactctttattgcaatattaacaggcatgaggttcattagcctaaaaatgtactttggctggtgtacttttgctgttgttgagaacagcaagaaagttctaccacaaagtttcgttttctcatattcttttccagtagtttctaccagtttttttccatagccaaatgcaagaaatattggctttgccaatannnnnnnnnnnnnnnnnnnnnnnnnnnnnnnnnnnnnnnnnnnnnnnnnnnnnnnnnnnnnnnnnnnnnnnnnnnnnnnnnnnnnnnnnnnnnnnnnnnnnnnnnnnnnnnnnnnnnnnnnnnnnnnnnnnnnnnnnnnnnnnnnnnnnnnnnnnnnnnnnnnnnnnnnnnnnnnnnnnnnnnnnnnnnnnnnnnnnnnnnnnnnnnnnnnnnnnnnnnnnnnnnnnnnnnnnnnnnnnnnnnnnnnnnnnnnnnnnnnnnnnnnnnnnnnnnnnnnnnnnnnnnnnnnnnnnnnnnnnnnnnnnnnnnggtattctattcatattatttcttattttaatacgtaataccattatttatgatccactaagggttgtgtgtttcactgaaagtcactttgcctttgcatttactagctacgtggttatggtctttcactatctcctgatagcaccttaatcaaaggaagatatctctgagagtacaaaatcaatgcgag

SEQ ID NO: 17273 - DNA, 709 bp, Homo Sapiens
aattctcacaaccagtatctttattcctatctaacaaatgagaaaaaaaatccaagttattgacggcaaaggtgcctgctttggtgtcctttgtcgtgggcatgctctcccaggtagactctagaggcctgcaggacacagggtcacaccctactttggcctcagcctgatcatccagacttgtatgtcagactcggctccaaagaggcttttggtaatttccaaatatcaaattcacccttcaaaggacaaagatttgttagtagggaggattttcaaaagaatacgctgaaagcaactgcaaaagagggggtactgcaaaacctttctgagtctaagcatagccgcagcattcagataagcatttagtctccccaaggaaaaaacaaggaaggggatgacagtgacaaggatgaataagttctgctgtgtttgtattaagatagagaagaaaaaacaagtctcccaattttaccctcaccttgaataataagacaggcagaagcagaaatgggtagtggaaatgcactcagcgttttggataggaaaattcaaatgcctttcagacaatacatgactgctatttcaccccattccctttgatgaaaaagtgaagctgacttccaccatcaagaatcagcggaacagacaaattcttgggataacattttgtttgatcctaatctacaacatctgtaacatcaagggg

SEQ ID NO: 17274 - DNA, 901 bp, Homo Sapiens
  misc_feature (58)..(195): n is a, c, g, or t
gcggccgctctagacccatttaagagatcccccgggctgcaggaattcggcacgaggnnnnnnnnnnnnnnnnnnnnnnnnnnnnnnnnnnnnnnnnnnnnnnnnnnnnnnnnnnnnnnnnnnnnnnnnnnnnnnnnnnnnnnnnnnnnnnnnnnnnnnnnnnnnnnnnnnnnnnnnnnnnnnnnnnnnnnnnnntcaagctgaaattgtttcagcctagtaagatgctgccagcagcatttctatgagcaaacatggccaaattagagtcaagtagctgagcttgctaactgcactgtgatgccacactggaataacttagtagtcccttaaaattaatggaagttaaatccacagggaagtgatgatactcaaagctggatcagcagtttcaagatctgggttcttggagatccataggtaagctcagcaaatggaagacgacgtcaacacggctattttgaagcttaggtgggaatggaacacaaagaaggtttgaggtaagatatgctggaaaggcaagatgtaggctaagggaaattcaatccaaggtcgaagaataggaaattactgctcagaccacaatgactatcattctgaaaggatttcacagagtgtgcagctgcttagatttaagaacactcttcttcactatgtaaactaatttatggcagcaccttatatttagaacaagtggtaattccctttactaagtgaacagattattaataccctgtagtagcttttgacccgtttgtacttgaaaatgggggtataaggggtatatatttttcccagaaccacattttattggcgtatacatagaagccaattcttaaggcatgctgaaatttgttgtaatcccatctttactgccatgggggaaagaacgctggaattt

SEQ ID NO: 17275 - DNA, 735 bp, Homo Sapiens
  misc_feature (568)..(604): n is a, c, g, or t
gcacgaggcttttgaattgctttggtgtacgggtatgttctgatttttcatgcaagctcctctgccattccaccgctctgaggagtaattgtagcacttcacatgtgctgtggttgtgatcacatggtgacatacatagcatgtgtgttcccagctgttgtgtgtttatgtgacatttgatgccaatacatatgtcttcaaggtatgcttgttccctcccagctcgtggaatatcaaaaaaattcattgctggaaaaattatttcatagacaaaaatgttaatgttctcttggggacttagagttgaaaatatttgtatagatttggttctcaagtccacagaatcgtatctgctgtggtctccctttggtgctcatctgggagccatgtgtatggaagattctgtcacaggcggctgggatgtgggcagatgctgttagcctccctctccacgtggtggtccatgcctgacgtgtcccctagttcaaggaagcgccatctttagcatgaaaacaattgcgttcccctaggaaatgaagaaaaaatgagctgaaatttccttatacannnnnnnnnnnnnnnnnnnnnnnnnnnnnnnnnnnnngtctgctttgtggtacttataaaatttgttttccattgaaattgccatttataaatttgcagatatgtactaatttagatttttttaagtgttcaataaaataaggatatatttactgtgaatttttagag

SEQ ID NO: 17276 - DNA, 756 bp, Homo Sapiens
  misc_feature (325)..(345): n is a, c, g, or t
gtgtcaaaaatgattgcatactggcaattttatttttcaacctatattttagtcttttgagtagacaattttatcagtagttatgaatatgactttgaaatggaggaaactgaggtgtacaagagatcaaggatgtagaaaagagtcttaacaatcaaaagatccaggagggaaagtgtgtgtgccatcttgttgctccttattgatttcacagtccttgccaaattcattgtcatctgagcatccctttggtttcctgctttcttgcttctgctccatcaacatcttctctccattccacccctacgcttcaaaatctgtgcannnnnnnnnnnnnnnnnnnnnccctgaaggctctccaagtcaggttagcctatggagagcttaatttcctccacattcctttccatgaatcacctctgtcattcactaggatgatagtattgcctaaatatttctgtcagtcctttaactgcctttatcattttaaaaaactcttttggccaatcaatgtctttaaacttgaactatgctgcagtgttttccctttgataactctttttctccctttgtgattctttctaggtacaattagtgtttgtcacaatcttcaaacactactaagcgaccaattttgctgaagattttaagaggagatgacaattgtagacattatatgttgcactgcatttcaagctcagaatatctctagagaaaaaacaaatctccctcaatctcctctttatgttattctcc

SEQ ID NO: 17277 - DNA, 305 bp, Homo Sapiens
  misc_feature (112)..(120): n is a, c, g, or t
gcacgaggatgcatcgtaacttcagtagggctactcagaaataggtaaaaaatacctagttttatttttaatgttttaccctttgaggtccatatgtgtaagtcctagtggnnnnnnnnnaataaataaaaattgttagcataaaattctattatagaatgtaaattcttcattggatatgcaataagaaagtaaattacttaatctttccagtttatctgtatataatatagttgaaaaaattggggaccttttattatacaatttattttgaaacttattttcttccacccattttataatat

SEQ ID NO: 17278 - DNA, 896 bp, Homo Sapiens
gcacgaggctgaagtaaaattgagtgctggaaaatatattcaccaaactttggtaatttaagttgactaaagtttaaaattaagtctaaaatagtttacacctatactgcataatccaacaattttaatttcagttgaagacatgttactaatataactattattaaaagagtagaggatgtgtaattaaccatatcttctaaaacatggttactaaaagaatatgtaacatcaatattgaccttggtttcttacacaagtgttgctaactcaatagtgaaggagacactattaaattttctgaacccatgagagatactagagatggggagtggaaagtgtttggttcagggatatctgaagaacagaagggcagagatttcttaagtgacgcctcatctacaagctggaaattcctaaaaacaagtagaaagcttataaacaacaggtgatacactcacctcactggttttagtaaattaccaatacagaaagtatccctagtcttaaaaacaagtggaaaatttgaactgattagtcatattcctttgattacactgtttgttacaatatttttctcagtaaacagaaataactaatttttttgttcttcattctttgatagaaattaaaatcttattctgtgaggattacagaatactataactcaaattataaagtagaataaactctttaaataattattcttcatcataaagtgtaaagaataagatataagaaaacaatttatttttaaaatttaatatactaaatgctcaaatatgttctactatagaataagttcttatcttaattacagggcactaaaaaacaattttaaaatgcttaatgttgccttttatattttaaatgggttaagaatatatatttgttta

SEQ ID NO: 17279 - DNA, 659 bp, Homo Sapiens
gggaaatataggatttttataaaatctatgggagttgaaagaaaaaattataacatttactgatgaggtatattgatataatacatgtgacaacgacagtgtaaagggggaggggtaaaggggtctatattcttagtttctacattttgcctttttttcttcagccgttaagttcaggggtacacgtacaggaggtgcaaatttgtcacataggtaaatgtgtgccatggtggtttgctgcacagatcatcccatcacttaagtattgggcccatcatccattaactattcttcctgaagctccctctctcccatcccactcccctataggcctcagtatgtgttgttcctccccaagtcttcgtgtgttctcatcattcagctcccacttataagtgagtacctgcagtatttggttttctgttcctgtgttaatttgctgaggataatggcttccaactccatccgtgtccctgtaaaggaaacgatctccttcctttttatggctgcctagtattccataatatgtatgtaccacattttctttatccagtctatcactgatgggcatttaagttgattccatgtcttttctattgtgaatagtgctgcaatggacatacccatgcatgtatttttataataaaatgacttacatt

SEQ ID NO: 17280 - DNA, 802 bp, Homo Sapiens
  misc_feature (361)..(392): n is a, c, g, or t
ctctaaacttcttgcttcatttcattcatttgatcttccatcactgataccttttcttccagctgatcaaatcggctactgaagcttgtgcattcgtcatgtagttctcatgccttggttttcagttccatcaggtcctttaaggacttctctgcattggttattctagttagccattcgtctaatcttttttcaaggtttttaacttctttgccatgggttcgaacttcctcctttatctcggagtagtttgatcatctgaagccttcttctcttaactcgtaaaagtcattatccgtccagctttgttccgttgctggtgaggagctgcgttcctttggaggaggagaggcgctctgannnnnnnnnnnnnnnnnnnnnnnnnnnnnnnncccatctttgtggttttatctacctttggtctttgatgatgggtgacatactgatggggttttggtgtggatgtcctttctgtttgttagttttccttctaacagacaggatcctcacctgcaggtctgttggagtttgctggaggcccactccagaccgtttgtgtgggtaacagcagcggagactgcaaaacagcagatattggtgaacagcaaatgttgctgcctgatcattcctctggaagttttgtctcagaggagtacccagccgtgtgaggtgtcagtctgcacctactggggggggtgcctcccagttaggctactcgggggtcagggacccacttgagaaggcagtctgtccgttctcagatctccagctgtgtgctgggagaaccactactctcttcaaa

SEQ ID NO: 17281 - DNA, 878 bp, Homo Sapiens
gcacgagggactaggcaggtggtgccccgtgtgaggagcagcgcagtggatcatgatggaaccctcgaaaatgaacgtgaagtgactgcgcagtcctctttggattccagtgcaatgcatcaaaccataccatggcatggctgggacccaatgcagtactggaaatgaagaatgtgagcctgtaggacccgcagccccggacaatgcagcttcctcggacaacacaggtcccggatggggaatgtgaaatagacaactgggggatgctgaataagacaactcaggaggctaagtgaatcacagacaccattcactccagataatctgttccttgctatgctgtctgttgtacattgcaactcttgtaaggatgcaaagctggaacacaagctgtaaccgctgcacctgtcaaacctgtcgctgcacacatctgtacgcttcaatcaactaaacctgatgcaaaaaacagaaaagggagagatgtaggggatcactcagagtggtgggaaaaactatagggaaaggacacaaaccttctgaaaggttggaagggtctgcagagcccctggggagaatagctggaagcagctgttctataaccctgagacagagggcaaggagtaggtacaagggagtgtgggggaattgatcttaaacaatcttgttatgttgaccaggaactgacctttgatcatctctgcatgtgaagttccctgaaaggggaacaataaatgttaattaccttcaggttgtgttggctccaggttttcagcattgcacctgccctgaataaaagcaagcagctccagcttcccagggctgcgctctgggccacttgcaccaggcagtcctctggctgctcttacattgcaaaaaaa

SEQ ID NO: 17282 - DNA, 801 bp, Homo Sapiens
gcacgaggggaaaatcctggtgtcgccgagggccgccgccccgccccattgaccggtattgttgaacaaatatggttgaacttctcccttctgccgaggtgtccctgatgccagctaatgatttttgacctggggattaatttgggataaacatatgagtttcatttttttgtaccatggctatcttctgacctcttccagctgtcctctgaagccctgtctgccgtctgaatttgcgaccatatcaaatggcttctgatcctctatattgatggcttccatatccctatgcgactccaccccttccacataatccgcctcaaggaaaggctgtcctgtgctggggctgtagaaagtgcacaggcatgcgaggtgcctttgtggtatatgtgctgtcaatgtacatggttcacaacgtgaatcaaatcatgtctgtccgcacatgtctgcaacctcttatgctggcctgtgatgatgtcaatgttctcaatttaatattttatggccgtggaaaaatccatttttcaactacataccttttcaccattttcaatggggtataatttgagatgttgcagaacgataattcgcacatctcagaatgatggaggaacgaacactgaccggtctttctgggatggttctgtggcggcacctgcatcatgaaggattcgttgtgctgtcccactctataaactcagcagtaagatctacgtactgtcaggtgttctagccacaaggctaatgcatttgtgttcaaagagaaatctgggcaaaggaggggaaacccccctcccccta

SEQ ID NO: 17283 - DNA, 664 bp, Homo Sapiens
  misc_feature (210)..(268): n is a, c, g, or t
gcacgagggtcataaaaaagagtatagtggttatagcagtttaccaagcagtcatccttggtaaaggtaaggaataggaaggggtaggtactgactaaaagggagcacaagaagagttctagaatactggtaacattctacatcctgatctagacactggctacataattgtgtccctattataaaaatacagaaatctgtgcatttggnnnnnnnnnnnnnnnnnnnnnnnnnnnnnnnnnnnnnnnnnnnnnnnnnnnnnnnnnnnaaatgaaaagtcatgtttttacatacctttgaagaggaatcaggatcctttccattaagaagacctaatacttggtgaagacatgaagaaaagtgctcatatctaggtttagaataaaaatatacatcaaatgataaatataaaattgatacatcaaaagggatttatctacaagataaatataaaatttatgtgtattttctttcatctatttatttgggcttctaatatagaacacactcctgtaaagtttatacttaaaacatatgtcttacaattatgatatacataaattggctgtgtcatttattaaaacatagtgattcatgtggcaataaataaatcattaaatttctttatccacgaatacacatcactattaaaattttcagtgtc

SEQ ID NO: 17284 - DNA, 323 bp, Homo Sapiens
tttcctgttccccacccctcagatatttagactttgaggcaggccttgggctggcagtgccccttcttcaatgggggagctgtaagtggctgcgaggggaaccagagcaaaccccaacataaggcatggcagagaataggccccctgctgctcctccacattcccagtcacctgtgagggcctcctgtgaccaccattccaagatcctctccccatccagcagccactactgggagtgactatgtggaagctcccagtgcccttggtgggtatgaaactgctggggttcatctctttttttgcccagtctttgcagggaagga

SEQ ID NO: 17285 - DNA, 876 bp, Homo Sapiens
  misc_feature (232)..(243): n is a, c, g, or t
gcacgaggctcattcccgtttatcctgtgggatttggtccagggtttttgtagaggccttaactgtttgaggctgtctgtcttcacaatagcactgatgggagctgcgtgattccaactcttaacttgaattttgtagagacaagaaaaaaggactattactgttgatccaagtttgtagttaatttaacatttgagttctctcttggtgatgcgtgtggctttatagggcnnnnnnnnnnnnccagtttgttttattactttgtttgggatgcttcttcgctggtgcagtctacccagattgggttccctttgcaaaacatcccccttcctggagatgatgatgccatcgaagcccgggccagggcctgacctggcaggcacacacctggccagtggctctgaggtccccggggaccgagtcccctgcgagggcaggctgcccgaggccacacctgcccaccttccctactccaggccaccagctggtgtcagattgggccaccgggagagaacaggcctaggagggaatggaaggctggcggggaggctgtcatccagaagcctcctccccagaggtctccaggaggaacctggctcaactggtgggcagtggtttacttttcccttttttcttcctttcttttgtcctctcagctgcccacagccagaaaagccaggaccacctcgaactggacagtgagcagggagggaggagtggtcgcacggaccatacctgatccaacagaaaatcattattttctaaaacagccctaccagaacctccctgacctctgtgggcaccacgtgtgctgtgacctctgccaaacagtgacccgccataggccccgggcgtttgttgaaggattttttaagg

SEQ ID NO: 17286 - DNA, 907 bp, Homo Sapiens
gcacgaggtgaggaatctacagattaaaagacctatcaagcaatcttaataagtggaccttacttggatcttaattcaaactaacaaactataaaacaaatgaacaaacactatggcatttatgagacaactggaaatttgaactctgaatattttgatattaagacattattgatgatttttattagatataagaatgttatggtttcttcaggagatacacatttaaaattataaggataaaatgatgtctgagatgtgcttcaaaataatatgatggaaggaagtggacaagagtatggaagaaacacatgggggttcattataacactgtgtgcttaaatttcttgtaataacaaaatgggggaggcaatgaaggggagtacaaggtcattcttacttcaggacgctttaacagttaagggttggttatgagatttttaactgaacttcactttttggttattttgaagttgaaatttcagaacaactccttaggaccccttaacactccctacctctcccctcccacacaggtaaaccaactttagagatgatcaaaatgactgctgctgatttagaatttagatctatctaataacaatccactaaccacgaatgtaaaacagcagtagacagttttttaaaggaaaaagagtttaattgaatgaatttactgtgattagattctgctgtgacagtaaacccaaatatcacaggtttaaataaagttattaatctctcatgtaaataaaaatctgaggaactgattcagatttggtatgttgcttccaaaattaaggattcttctaactctgttgcttcaataacctcacatccaccatcattattgaccctttctaccggcaggaagaaacacactttccaaagttgtaacataccactg

SEQ ID NO: 17287 - DNA, 895 bp, Homo Sapiens
  misc_feature (446)..(521): n is a, c, g, or t
gcacgaggcctcaccccacttctgcatgtctttttaacttgttagcttcagtctattttctttgtcctgggatactgactacttatcaggaatgactccatttccttgtgtatagagctgactcttagaagaagggggatagtgtgtgtgtgagagagcagaatcaaagggaagcatgaaggccacagggaaaataagcttggcaatctccctaggactcagggaaatagagctctctgtccacagtgagaatcactgttaggcttgctcctcagtgattgagtgtcagaagtaagctcaggctattgtgaaaaagtgtggggagtggctgtcagattgtctcaaagctggagggagagctagccagctaagagttaggactcttaggtttagttctctcatatggccccataccaatatgtgcctttgacaagtgtctttgcaannnnnnnnnnnnnnnnnnnnnnnnnnnnnnnnnnnnnnnnnnnnnnnnnnnnnnnnnnnnnnnnnnnnnnnnnnnnctttaactgagggtcttcagatggagaatgcttttacggggccaagtagtagtattgctatcatcatcatcatcattagtaagaatatcatcatgttgttattattgaaggctagtagtgagcccagcaattatgttcagcagacagactatttgggaatctctttctcatgcattcatagataatgtggagtggagttggcttaaaccagctaagtgccagtttttaagtgggaacactgctatgggcgttggtccatgatcaaacggctggcatgactcatcatagtcacgaacagttattagccagcatggctgtggtgcttgccttagcagtcctgtgttagcattgcttactctgggcacatttttcta

SEQ ID NO: 17288 - DNA, 689 bp, Homo Sapiens
gcacgagggtaaaggcaaaagcataggaaacaccttcctttctaaagcaacagccttatcaccttgacctctgtccctcttcagaacattcttccctggaaccagtgctccacatctttcttttcctctgagagctgcagctggcagggacctccctctgctgctcctccagcaagccacagagcataccctcacgtgacaagagtgtggtaggttttctccccacttttcacacacgcctggtggttgtggttccatctgccttgttggcttgcccggggggattcaacacttgactttcaaatcaaagaatgctaatgcttagcacttgctgttgagcatgctctaacttttaaagccctggcctcctgtctccttagctgcttagctacgcggcctagcagatcatcacccatcagtaatcctgtggctagatccaggggaaaattgcttatgtccaggccccacccctgtcactcataaataccccttgtgggggtggaattttagtgttttcagctaagaaaaccacattttctctttccttgcctctgctaggactgtgagcatctcatagtccactccctaaacactttctggtaacacctagttttccgcctgagggtcagaggctagaatcattgcctgcacagcaggactaccttggttcttaaaacttggatcactca

SEQ ID NO: 17289 - DNA, 801 bp, Homo Sapiens
  misc_feature (578)..(591): n is a, c, g, or t
  misc_feature (612)..(670): n is a, c, g, or t
gcacgaggggcggacactcagctgatgcttggagtcgggctgatcgctctcaccaaggaccgaggggccgtgggaaacgtctgacgcccacttcacggaggagcaaatggaggcccaggccgtcattgtgcacggacacaccataggccgtacagagccgggagtgggaccctcgcagtgtagcccagagcccccaacccccaccagtggagagctcctgcatcatgtgatcgagcttgtgcataaataaagcaggagtttctacacaatcctgtgtggtggaatctcggttagctctgaggaatgtaattatcttccataattaaaaaatatcacacggggatctttgggcagcctcgtgcagtatttagaggatggaacccgttggttcccttcgaaaaagttttattttcccgagatttttgcacacccctaaactctttctattccccaagtgcgcaataacattgcttaggctttagcaaaactgaagaaatatgctgattatttttcagtgcctcaaagcagtgcgtttatgtgggaatcgcttactgtttttatttctttgtctttcttcnnnnnnnnnnnnnnagacggggtctccctcttatnnnnnnnnnnnnnnnnnnnnnnnnnnnnnnnnnnnnnnnnnnnnnnnnnnnnnnnnnnnaaaccatcctcccgcctcggcctccgagtagctgggacctcaggcgtgcaccacacccgattaatttttgtattttttgtggagatgggataccgacatgttgtccaggtggattactgtatttatttcta

SEQ ID NO: 17290 - DNA, 631 bp, Homo Sapiens
atgagccaccgggcctggcccacattttctttaattgcaagggaaaacgcttcttttcagggggggcattttaatcccaaatatcaagtgggaaccttggccaagtccctaaaatgccctcaagtcagatctgacaccctggaattccttctttgctgcaggatcatctacgaaacccttgggaaattctaagggaaaactcctaagggcttggcactatgattcagtgatttatctaaagtaaatcacttatgaaacccactgatattttggctttcctaactctttatttgccatgcaaaacctcgggggatttctctcctaattccggataaagaccaataaatggcagtgaaaataatctgctttaactacagacagcatggattcctggatctcaatactatgatagtccacatgagtggattttatcttgcttgggttatatttgcttcccgacctaatctaattttccattttttatacccaggctgtttcctccttataaactaagaataatgatagatgttggtgaaatgtatagagatctggaactgataaaaagttaagaaagaactatgttgttgttatccctctaatcattcccttacataaaccccaaatgcgtggg

SEQ ID NO: 17291 - DNA, 755 bp, Homo Sapiens
  misc_feature (109)..(368): n is a, c, g, or t
cctttttaaaaatcccccgggctgcaggaattcggcacgaggatccaattctataatatgtcctcattttaaagatgaagaaatcatattaattacctgtttgggaaannnnnnnnnnnnnnnnnnnnnnnnnnnnnnnnnnnnnnnnnnnnnnnnnnnnnnnnnnnnnnnnnnnnnnnnnnnnnnnnnnnnnnnnnnnnnnnnnnnnnnnnnnnnnnnnnnnnnnnnnnnnnnnnnnnnnnnnnnnnnnnnnnnnnnnnnnnnnnnnnnnnnnnnnnnnnnnnnnnnnnnnnnnnnnnnnnnnnnnnnnnnnnnnnnnnnnnnnnnnnnnnnnnnnnnnnnnnnnnnnnnnnnnnnnnnnnnnnnnngaaacacatttaccagtttattataaaaggtataggctgggattacaggtttcagcaactatgcccggcccagttatcaggggaaggcttgcatattttgaactatttttttctttggcatttaatcatccttagcatttctcaggcagtcttgggttaatatggaaataacctttgtatacgttcttaatcttatttttaaaaatttttgcattttatgttgaccaatatattattgtgccacactttctatattaaaactagattaaatatattttacatatatttatttaaatttttccagcacctatcaaaatactttttttgtgttcccattaaggtagtcttaatgcaaacttacaactttgaactggaatattaaattta

SEQ ID NO: 17292 - DNA, 974 bp, Homo Sapiens
  misc_feature (99)..(155): n is a, c, g, or t
gcacgaggcccaggtctagactccaggactccataaaagagtttaagttcaagcccttccattaatgaactgtgtaagcataggcagttacaaaaggannnnnnnnnnnnnnnnnnnnnnnnnnnnnnnnnnnnnnnnnnnnnnnnnnnnnnnnngaaacaatagcataactgcaaaagtgctttgaacagtaaaaagatatacaagtaaaaggcattatttatatgagtaagaaagacatttttgaggggagaaaagttattccactttaaaaatcaatagccaagtctcatgccttttgttactttagtaagcgaaaatttcaggtactaaatacctttcttagccaagtttataacaaaaacatctcagtatacttcattacttatttaagcgtgatcttattttaaaagaacactgctatagaagaatttacacaccaaattccctgaaagctaaagtattgttccataacttacacttgaggcaatctgctcagtgtgtaaccactttataaaaaataacttaccattgataacctggaaggtggactacttgtaagtagctggtgtttattgattaaaccatggaagttttcatgatacccaagcatgttgctgaaactgatgcatttgaaagagctgttgaaataatgcaaaactttggttttataagaatctactcatgttttaaaagtatttaactctgtagaccacaattatagaaagctcagtaatgctgctaatgacatttgtaaactatatctgtaatgtagtgcaatatttttatatttcactgggagaggcagtagagacatcatagttgtactttagtgcaagtgggggaacactccaaatagcctagagtatagtaaggtacaaagcttcaatgaaaaagctgtattatattacattactgatgtaatcttgctgccatgctatgtatcaatagctaaaaaataataataaagacta

SEQ ID NO: 17293 - DNA, 884 bp, Homo Sapiens
  misc_feature (403)..(425): n is a, c, g, or t
gcacgagggttttaattctcctgatcacttgaaataatctgtaggctgagtgcttatgggggtgggggagaagggtgactccagggtccttccattttgtgaagctctgggggtggagtgtgggcatctgaggccctatgatggcactacattgagctgtctgcccttccggaaacccaacctgcaatcaactgcaaatcaaattcttcacattccagctacagtctttctttccccattgaatctcagtccctggccatgtggtcaaggtggctttctgttaagctaccctaatttcgggaatgggaggggagagaggagggccattacaactctgccttcaagactcatctcttaaaaacaaaacgaaacaaaactacaaccaccatcaaaaccacacgcnnnnnnnnnnnnnnnnnnnnnnnggataactttaaccgaaggaagggtttggttccattcaactccacattcattgtgcctttacttgcattagatttctgtgctttcttcctttccctctttgaagcaattaaaatcttccttgataactgctgtttctttctactcttgtttctggcaatttagtgggttccttctctagtggtcttaaatctcattccactggtggcaagatggggcctagccttcttttcacatgtctaatcttttcctttctcatggtgccctccatggaagtcacagtcaacactgaataaatgactagaatgacacgtgtgcgtgcgcacgcgtgtgcgtgtgtgtgttcatctgtctgcatgtggatcaatttcttttagaaaatatttattgtatgatttatttttggagttatattctgattacagtgctccctctcccaaatagcattgattttttccccc

SEQ ID NO: 17294 - DNA, 588 bp, Homo Sapiens
cctggcagtcaattttaagcctcctatttcccaggttttagcttaataatcctcattagtttttcagatttttgtcagtcttgttttggggctattttgccttagtgggcctaaacagaatattaaaatacattaataatccatactgagagtagagtataaatgggtttctcactccttagggacacgagtggaaacaatacatcccatgaacacaggtgaatgtccctggttatccctgagctgggcagtttcacacaatcattttttctctgaggccaaagtctgtggtttgatcatcttagcagcttccagaacagaaagtaggtttactttgtctccaaattctttttctcggtgctcaagaagaatgccctgctttcctgatcccaccacgaaaactcccccaaggatgaagccttctccttccaggtttccagagaagcctccgttccaggctcggaagaagttgtaccacactcccagacggataaatcccataaacatcatcttccgcctttgtggaccatagaactttttcttttcatccaggaagatttctccttttgaaataagggctggaaatcc

SEQ ID NO: 17295 - DNA, 908 bp, Homo Sapiens
gtcaatgaaatttaagataatatagttgctgcttatgttaaatatgttattccttaggtatagctattaagccttcataaaattatgtatcacttaactcttgattaatgacatttcagatcaggtaggtaccctacttacacagattaaaattgagtttaatgtataatatcacaaataatatttagtcatttctgcagcttctaaaacaaagatcctttggataagctagttcttagattaaattgattattttacaagattttctggatggcatatacctttgttaatgttttaataagttataattaatatttttagaaatcaagaagttttaatatttgagcagtgcttatggaggttttaaagagaatatattcctcaaaattctaattacttctgtgattttactgcctccagagtaagttaactataatattgttatatttagttgaatttcacaatagataaaatatttatcttttttcacttaagtcctgtaatcgtaaatactgatgcatattacttatgtaagcatataacctgcttttaatttttaaagagtaattcttgttttgaaactgttttactaatgtgtatgtcttttattttaaattgtacttagcaaagagaacatttcttaagtgtccttgtttttagagaacaaggaaataaatgtctttattgatttagcacatttatcgaatctactatttagtctcatacgtttaacttttaccttaaaacatttacagaggtcaatttactattaaagtataaaatgtacattagtttcgatctacattttaattattttatgctggcagagaaagaactgtttcatattttaccatcgtacatataaaataaaatattcaatacttatcttgttttcaagattaaaaaaa

SEQ ID NO: 17296 - DNA, 467 bp, Homo Sapiens
  misc_feature (54)..(83): n is a, c, g, or t
  misc_feature (187)..(287): n is a, c, g, or t
gtgtgagccaccgtgcccggccttgactaccatattttaaatttactggaggannnnnnnnnnnnnnnnnnnnnnnnnnnnnnaatagcatcccgctcttatttcagaataaaaaaaattttaaggtatgttgagtaagaatctatagagcaatgaaaatgcaagagcaatagctatgggcaccaannnnnnnnnnnnnnnnnnnnnnnnnnnnnnnnnnnnnnnnnnnnnnnnnnnnnnnnnnnnnnnnnnnnnnnnnnnnnnnnnnnnnnnnnnnnnnnnnnnnngtttgatcgtgatgggaaacattagagaaatgcaaagacatgaccatcataattgtcaggagaaggcattggttaggattgggaagcggcaagcagaagcatttagggattggctggcaatgttttacttctcggctgagtgagggttgcatcggtgtttatttgataacacgttctagg

SEQ ID NO: 17297 - DNA, 971 bp, Homo Sapiens
  misc_feature (252)..(284): n is a, c, g, or t
  misc_feature (306)..(433): n is a, c, g, or t
gcacgagggtgcaaattttaagggacccccaaaaagtaatcaacataaataatattttatgcaatttttttaaaaaaccaaaattaatgcagaaattcatgatgtacacaatgctaaaattttaggtaaagacaggatcagcactactgattgttccttttgcttcaggctctagtatggcttggccttgtcagcagttactggtccttaaaccctagtccaggaaagtgggaagccattaataggctgtcnnnnnnnnnnnnnnnnnnnnnnnnnnnnnnnnnagacagagtcttgctctgtccnnnnnnnnnnnnnnnnnnnnnnnnnnnnnnnnnnnnnnnnnnnnnnnnnnnnnnnnnnnnnnnnnnnnnnnnnnnnnnnnnnnnnnnnnnnnnnnnnnnnnnnnnnnnnnnnnnnnnnnnnnnnnnnncctgctatgggtatacttaacgttgagttggttacataaaattgataaaaagtagtatagcattgaaccgccaaattagagaggtgcttttctttgggaacttgtaaatggtgaaacatttttgtacttgaaattaaatggtatacgcatatagctaacaagatatttggttacagagcccagccaaggcacagaaggctgaaagttttcttgaattacaaagaagcaattacagcttaccccatctccatctagtgttgtggtttactactctatttaagtgtgccttcaacttaattactttctggtggtgctggtaatgaaacttaatgtgatcaataatcaaaatagagtaaaatgactatcttgagatactactgaaaattattcaaaaatatgtcttatagtatatactagtagtagttaagttgatttaggaaaattgtcaattgataattttaaaaggttaaaatctataataatgttttcccatagatagaaacaggtcaagattgttaggccatgacttaactctggt

SEQ ID NO: 17298 - DNA, 851 bp, Homo Sapiens
  misc_feature (97)..(105): n is a, c, g, or t
  misc_feature (134)..(377): n is a, c, g, or t
gcacgaggagccactgcacccagcctcacctgttaattttatgagcaaaacagattagttgggcaagtccttcacatgcatatctcgttgttgttgnnnnnnnnnaagacggagtcttggtcttactccccaannnnnnnnnnnnnnnnnnnnnnnnnnnnnnnnnnnnnnnnnnnnnnnnnnnnnnnnnnnnnnnnnnnnnnnnnnnnnnnnnnnnnnnnnnnnnnnnnnnnnnnnnnnnnnnnnnnnnnnnnnnnnnnnnnnnnnnnnnnnnnnnnnnnnnnnnnnnnnnnnnnnnnnnnnnnnnnnnnnnnnnnnnnnnnnnnnnnnnnnnnnnnnnnnnnnnnnnnnnnnnnnnnnnnnnnnnnnnnnnnnnncacatgtgtatatcttaaaggaaataatgctaggtaatttagtcaggtgcttgatgagcatttgtcatcatcatacggagtcaatttgtctttttctataaaagttctttttgtaaatgattagttgcttaactgctttaatttcttctaggtaccttacctgtcatcaggatctttttaccacaaataagaaaccttaaagcataaaacttggttcagtcttcacatttcttaaatggaaggagaaagggaataatagggagatatctttatctcaaagccaactgttgttgacttttccagtggcaggggtatgatgctaggacttcagatttcctgattccccatcctagtgccccttttgccaaactaggcaggctttcacagcttttggagcctaatttaagtttttcttgttaagaacagaaaactccattcatagattttaatttgtcattatttgcttatttactg

SEQ ID NO: 17299 - DNA, 587 bp, Homo Sapiens
aaagagacaaggtctcatttcattgcccaggctgggattacaggcatgagccactgtgcctggtacacaatattctctaaattattcttaagtgttcttctattaaatagatgtaattaatacatgaatcagatgtatattaatctttactatgaaaaatttttaaaatacatttgtacattgtggcctttccttgatgtttcactcctcaattttctctcagttttaccattttgagctctgatcctaagttccacacaagtctgtatttctgtacatattaattattgaattagagtttaaaaacgcccacgtttacaaatgaaatctcagtggcttcaggacataagttccaaactgcatttctctctttttccaccaattctttattatcttactttcaatttgtgatttgctcattttgtgacatatgtttcaccttttattgtgccattggtgggctttatttttccactaatcaaaattactccattagcaaatgtataggctttctggattccaaatctattgtgagaagttctagctaagtctactttttagtcaattccaaggtctatttctaagtt

SEQ ID NO: 17300 - DNA, 892 bp, Homo Sapiens
  misc_feature (467)..(519): n is a, c, g, or t
gcacgaggctgagttccgagccgttcccgttgatatatggacagagcttgtctttcccaggccacagtctggtttgtgcactgcatttgtgcttaccgtatcatattaccatgtggacattatgtcactaactggcacaaccggctcaaaatgaaatatgcttgctgcaagcaaaaacccaaaagctaacatcaactctccccaccccctaccccaggtacaaaataaaagggctagagggatggctggactagattttggtttaatatgtttctaactgttctctccctcctctgcctttctgtggcctgaatgttgatagtaactttatcatccttttcagtcctttatacccactaactcttgaaaatgtttggtcactgatggcacaaattaaatgtaagactttggaataatttagtttagcctcttcctaaaatatcaagtctgtgaactcaagtaacctnnnnnnnnnnnnnnnnnnnnnnnnnnnnnnnnnnnnnnnnnnnnnnnnnnnnnatacagagtagaaatgaaagcagcctgggcttattgggtaggtgccaggaattagctttgacaaagatggtgttctgtgcacttggcccaagctgacaggcatgcagatgcctctagaaattgtgggagatgaactggaagtatccccagagtttgtccagtcttagggtggtgtaagtacattttaggcccttctcctgttatccacaggctgtgttgacaccctcttgtgtcaccagggattcagaatgccacagtgcctccctgaccactatcatcctcctgctgcccccactctggggcagaagagggtagtctgtctacagagaagcagagtccccacaccacttccaggatcccaagcacccattta

SEQ ID NO: 17301 - DNA, 468 bp, Homo Sapiens
gcacgaggggatcctgggaccaggagcgaaagccgcctacctgccatcgccgcctgcttatggcactttcatggcgctcctgctgtgcttcgtgctcctgtgcggagtattggatttctccggaaatttgatgatcattactcctgaggaaatgattgatgaagccaaaggggaaactgcctatctgccatgcaaatttacgctgatgccctgaaacatgcgaccgatggacatcaaatggatgagatcgacaactgatagtcataaggtgtatcaggtgattatttaaaatgctggagaccttgtttatgatgatgactatatctatctgagaggcatatcatcttttacaatgaatgatctcaaatctggtgatgctttgctatgtgtaattaatttacaattgtgaaatattgcctgatatcagtggataatgaaaaagcttcctaatgttggaaataagaagat

SEQ ID NO: 17302 - DNA, 915 bp, Homo Sapiens
gcacgaggctttcctgcatgaagtgtaggtggcgagtgggcgaggggcgcagacttctttgaaatcgaagggtacagtcaaatctactgctgatttggttgttttgttgctgtggcagaatatgccatgaaacacatacagacttctccgaacgtgcaccctcatcagccacctcctcccctctttccctgagtgctgtgaacacagcagacctgcacacttctgcagatccagctcctacagcttggggcactaggctgcctttcctagtcctgtcaacaaccatacagtgcgaattgctgaattagctgctattctatgtggagtcacattaagctttttcttatctttttctatggggaagctatagggtgggtaaggaaaaaatgttgaatgcttttactttgctgaaaatattagaactctcttgtgacaggatacagcaaattataattaaatataaattaccagaaccagagctacctctaagtcatacttcctcaagcacaaagctctcaggcatatgagacccaccttaatgaagggtctctgatttcttgagcatcagcgagtttcagaagtgactatttttttgtactcttctagtttccttgtaactatacactttttcccattccacactgtgcttaaatgacaaagactcttctgagaagccaaattctgtccaagtattaactagagatattgttgattaaagaaaatctagaactgaagtgaaagaagagagttccagttctaatagtcttttgattaacaattcttttctgagaaatgatttttataagaaatggggtgattctttaaatgcttttcttaagttgaaggcacaacagttaatggctgtattgttgctattccgttgctgacatgttttgataagctttaacattcctg

SEQ ID NO: 17303 - DNA, 773 bp, Homo Sapiens
  misc_feature (105)..(126): n is a, c, g, or t
  misc_feature (497)..(508): n is a, c, g, or t
  misc_feature (574)..(588): n is a, c, g, or t
gcacgagggttcatttcaaaattaagctttagaataatgcgcaatttcatgttatgccttaagtccaaaaaggtaaactttgaagattgtttgtatctttttttnnnnnnnnnnnnnnnnnnnnnntccccaaaatatatagaaatgatggagaaggaaaaagtgatggttttttttgtcttgcaaatgttctatgttttgaaatgtggacacaacaaaggctgttattgcattaggtgtaagtaaactggagtttatgttaaattacattgattggaaaagaatgaaaatttcttatttttccattgctgttcaatttatagtttgaagtgggtttttgactgcttgtttaatgaagaaaaatgcttggggtggaagggactcttgagatttcaccagagactttttctttttaataaatcaaaccttttgatgatttgaggttttatctgcagttttggaagcagtcacaaatgagacctgttataaggtggtannnnnnnnnnnncttctggacagtatttaaaggatcttattcttatttcccagggaaattctgggctcccacaaagtnnnnnnnnnnnnnnntcatagaaaaagaatgagcaggaatagttcttattccagaattgtacagtattcaccttaagttgattttttttctccttctgcaattgaactgaatacatttttcatgcatgttttccagaaaatagaagtattaatgttattaaaaagattattttttttattaaaggctatttatattatag

SEQ ID NO: 17304 - DNA, 618 bp, Homo Sapiens
  misc_feature (256)..(276): n is a, c, g, or t
  misc_feature (406)..(436): n is a, c, g, or t
gcacgagggtttacttgattttgaggaagaaaatatttgactttgtgtaaagagtagggtatcagggtgtcttttctgccgtgggagatgtgtatatatatagtattttggtgtatagtagaaaataagctttgtgcatctgtatttgagatatgttaatgacgtggagtaaagtcagctgtaagactctggaggcaaacaagttgtatatggttcatatggctctatggggaatttaattacctttctgggcacnnnnnnnnnnnnnnnnnnnnnaagtaatggtgaaatggtcccattggagagtctcctaaatagaccttccaggcagaaccgcaagctcaaaatctttgtatagttttgaaaattgaggagtagctttgtttggaagcctttctggtggtgnnnnnnnnnnnnnnnnnnnnnnnnnnnnnnnactatatgtaatacaagcctacagtatttgcactaaagaaagcttgttagaaaaagcttgctgctatggaagaaagaacatattaaaacttctttcccttgcgatttttttgggggaggggggttagcatttccactttcagttgagtagcattttgtagaataaaatgaattaagattgaa

SEQ ID NO: 17305 - DNA, 912 bp, Homo Sapiens
gcacgaggatgaaattttactaatttgtatttaatatgaagaaatatgtcttcccaagtaagcataactgtactatgatgtaaagctaccagatactgggcgtttgtgacagcagttgtaattgaacactgaattcttctctctaagcctttcctgaaggattagggtaaaaacaaagtagttatcagataaaggagaagaaaataagacatgtaaatcaggtttatttctgggatatttctggcatgcctatcttcttctccagctcaccctcctgctgccttctaagaatgccacaggctaaggacagatttgccctagcgttgtttggactgtagatactttgaggtaaaggtacatctgtggccttatcaacaaagcctaaagctgaattctgaggaacagtaaagcagagagcttctaagcacaactttgcagtcagacaggcctggttcaggttccagatctgctgactttatttatgtatttttcttctaatgctctctcagcagactcacgtctgctgcctttctaggtgtgtcaccttcagcaacctaatttgaaactcttgattcttcccctatcagatagggaacaatgacgtctatcttccatggttctaataggacttacatgcaatattttacctatgggaacagtcagccttggtggagttggggctgtactttctggccaagccagtggttggtctccagttcactccctactatgtccctacattaagctccgatgtcagtggtcacttaccactgggccctgtgctattaagtaatatgtctaatcaaggaggaaaaacaaaagacctacaagactatgtatttcagggaaaatgagattaagacctatttctttgtggaaataaaaaatattctttcacatttactataaaaa

SEQ ID NO: 17306 - DNA, 855 bp, Homo Sapiens
  misc_feature (174)..(222): n is a, c, g, or t
  misc_feature (435)..(481): n is a, c, g, or t
agaacagtaacaaatcaaatgagatacatccaaagggcaagccattaaggacaaaaaattaactcaaaatctggaaaataaacatactttaaccgaaatttagaaagcattactgtcactgtataaagttaaaactctcaagtaacgcagaatagtagcatacaagcatgaaannnnnnnnnnnnnnnnnnnnnnnnnnnnnnnnnnnnnnnnnnnnnnnnntcatgaccaaatcacgcggaatcgtcgaaaaaataacaaacaaacactctaatctaaaaaataaacgagtaaggaaccacaaacattggtcgcaaagaaaacaatacgaagtaaagaatatgaacttaccgaaactagaaattaaacgataaaaaaataaaatgtcaagttggagctcaacgaagaaaaaatcatatacatgaagtacgagannnnnnnnnnnnnnnnnnnnnnnnnnnnnnnnnnnnnnnnnnnnnnngaacacgtgtccaaaagttatagatcaaatcacaacgtaatacaaaagggaatccaagataaggtgaaaagctaagcaaacctaaccgaaagtaacagtctgaacattcaagacaaacgtcacaaacaaaaaaagaatagaagagggggttagtatagaaactcgccagttgagcggacaactaaatgcaaagatagcgcgcaatgatcaaattctgagatgagtacgacctaatgctgaagtataataataagatatgaaaaatcaaagtgatctccagaaaacgtcagtgcatacagggaatataccgaaataccaagacttaaaatcaagtaaaacgataacagttatagggacgactcagcgaatatagt

SEQ ID NO: 17307 - DNA, 923 bp, Homo Sapiens
gcacgaggatgttcctttattcacaatcttaggtctcaaatattctgtcaaaccctaacaaagaagccccgacatctcaggttggattccctggttctctctaaagagggcctgcccttgtgccccagaggtgctgctgggcacagccaagagttgggaagggccgccccacagtacgcagtcctcaccacccagcccagggtgctcacgctcaccactcctgtggctgaggaaggatagctggctcatcctcggaaaacagacccacatctctattcttgccctgaaatacgcgcttttcacttgcgtgctcagagctgccgtctgaaggtccacacagcattgacgggacacagaaatgtgactgttaccggataacactgattagtcagttttcatttataaaaaagcattgacagttttattactcttgtttctttttaaatggaaagttactattataaggttaatttggagtcctcttctaaatagaaaaccatatccttggctactaacatctggagactgtgagctccttcccattccccttcctggtactgtggagtcagattggcatgaaaccactaacttcattctagaatcattgtagccataagttgtgtgctttttattaatcatgccaaacataatgtaactgggcagagaatggtcctaaccaaggtacctatgaaaagcgctagctatcatgtgtagtagatgcatcattttggctcttcttacatttgtaaaaatgtacagattaggtcatcttaattcatattagtgacacggaacagcacctccactatttgtatgttcaaataagctttcagactaatagcttttttggtgtctaaaatgtaagcaaaaattcctgctgaaacattctagtcctttcatttagtataaagaaatactgaaca

SEQ ID NO: 17308 - DNA, 946 bp, Homo Sapiens
  misc_feature (648)..(658): n is a, c, g, or t
gcacgaggcttacatagtacatctgaaatcagatactggtttattcgaccatatttctaagggcatttttccagtaaaattgttttattttttgagtagccttcctatagtggtacatgttacatcagttgcgcatatcttgattttacagaatctgtcttaagtaccaattttggtttttcaaatcaatgtttctgaaatttttgaacactgaaagtggttttaaatgaatattctgaatctagttctttagaatcctctttgaattgtgaaatgcaaaataattgttagcagtttaacctgaaagatctttttacatgataaatgggggaggagaaagactgaaatgaaaatgttgaagaccctgatttgaaattgagtgtaaaggtctagatactgtaagttttagagtagctttagagacaaagctagtatcccacttggtgagatcaagtaacttgtggtttaaaatttaaagtaaccagtggccattttaacttcactaatttctcttggaggagctaatttttaattgctcatgattgtaaaacatacttccggatggtaagggagatgttaagatgatttgtcttgaagaatggtaaactttttctttgtttattgcctgtcataaaaagagggaaagtnnnnnnnnnnnggttcataatcttaaatcagtccaaaaatttgaattttctgtatttctgtttaattcaatgcgttaatctttagcattggtcaatacagccaaaagatgaggaaaacaaagactgatagatactaagataagaataactgcaaccataaatgtatacaggttatgtgtccatgagccatctcttcagtttgcccatagatttttgtctgtggaatattttcttgtttcatcacactgaatcgttggccaagaaatgcttgaaaatcaaacattatatcatctttcttc

SEQ ID NO: 17309 - DNA, 951 bp, Homo Sapiens
  misc_feature (458)..(496): n is a, c, g, or t
  misc_feature (760)..(828): n is a, c, g, or t
gcacgaggcacccgcatgccagtccttcgtgtattgctgtgtatgtgcgcccttccttggatgtggatttccatgacatggcctttctcaccttccttacttcctgtcctgctatgtattgtgtcctaccatgaattcactccatgctagccacattggcctgtatggctattccttggacacacctaggatgttcttgcctcttagcttgcctacctttctctcatcatttgggcctcagcgaggatatcatctcctcagagaagccttctgtgaccatgctatctaaaatactccagcacttcagtcaccctttatcccattactctgctttttcagaaacattggtgctccctgaaacgtatttgtttacttgcttagtgtcttttctcccgcactaccatgtaagcttcttgagggttagggaccttgttagggataaccactgtatccttagnnnnnnnnnnnnnnnnnnnnnnnnnnnnnnnnnnnnnnnactctaccctgatgcaaaagagatatcaaataattatagtttttgcattataaatgtctttggtgaaatccctggcacaaaactaataataaagaaataaacagataatgttgagttctgggcctgcaaacctaactctttaaagcagtcacagtaaatgtgtcattggatccatagacttgtggaagtcagcatattttattgggaaaagcatgagcttcaaagtaaaacttatggtcaaatctcattactggtgcgttcttnnnnnnnnnnnnnnnnnnnnnnnnnnnnnnnnnnnnnnnnnnnnnnnnnnnnnnnnnnnnnnnnnnnnnaccctcaagataggaaataaggtattttagtcagatgattcttatcacatgtctaaaaatttagtgtctctaaattcttgatatatgcataccagtagacactcaacacattatttcactact

SEQ ID NO: 17310 - DNA, 903 bp, Homo Sapiens
tccctcctagaggccccgggctgcaggaattcggcacgagggtaaactgttctgaaatacattattttcttttctttcttccaagtgcatgtgtgtccttgtcttcttaagtctgagaggttgctggaaaggactgttttcttgtacttgttcatttgtgcctcagccattctagttttgttgtgtgttggaggacagtctaatgaagacaggataaatgtgattctgactagtgggaaatttcagattactttttaatgattggaatgggctataagatattgtgctgaagagaaaacagttgttctgttcactgctttcattgagaaaatgtggaatgtctcttgactatttgacaaagtgtaatgaaatgacaagctggttgaagctggtaatcaatgcatggccatatttattcattttccacacacttgaccatctactttgtataacacattctgctaaggcccagggatacaatggcaaacaagatagatgtagttccttcccttgtggcatgtcataagagaaacagatgtgcatatacacacaataaataagaaaattaataattgtattaagtggtatgaaaaaaagggggaggattgttcactcactgttacctgtgttagtatctgcaaatgcatgaatggttgaactcccatgtcagcatttttgttgccatttatttagtaccagacatagtgctggtctcacagcttaatatttggtaatgaataaattctgctagtggtatatgttgatctgaacttacaatgatgggatatagaattggcagagtggcagatgttcacaattgtctacaagtagatgtgctagacaatggaaggatgcaggccaacctctttgattacaattgagattcatgtgactatttgagcc

SEQ ID NO: 17311 - DNA, 721 bp, Homo Sapiens
gcacgaggcttacatttcctttattcagatgatttaaatattgtttccagtgaatttggaaaggagaagtaatagtgtaaataatattttgactagctgcagaaagcccataagacaaggaaaagacagtatttcttccattctttatgtctgtacatgtaaaggaaaatggataaaactacagctgcttcttttacatgtggaagaacaatgatactatttaccatggcaagtggtaggaaaactgttgtccttggacataattgttttttaggagttgcttttgatacccatatcaatttataattctttgtttgaaatgaagtctttacatggttcattgaagagatagattggttatttcatactgataagcattctactcttatttgttatgcattttccttagtgatatattttacttgtactgaacttgaaaatataaaggagaatacatttctaaattattttaaatggctaacactatgatttgtcttatttaaatagatgtctctgcaccggtaagattaatacaatatgtgaatgtctattttttatatcttaactcacaatgagtatatgaaagataatacacgaatatattacattattcatttttagtcatgagtttatttcaataagtttttctaattgtagatactgttttttattctttccttgtatctaaatataaatcaaccattaaaatcattctaactct

SEQ ID NO: 17312 - DNA, 556 bp, Homo Sapiens
gcttttatttctttattttaaaaaactgcttgttaatcttatgaaaaaacaaagtgaaaaataaagggaactactgcatggaccccagtaacgagagaaaaaaaagtgtcaattaatctaattgatagtcaaaagattgcatgggtattaatgatggagtcgggatttgggcacgtgtacatttgttggattttgcagcctggcatctatatcccatttgtctgggggcaagatcccatttttgggttggggccattatcctccaacattgggtagtctatggtactattcctcaagggaccctccccttcctcaaaagaatgggaacacctgacccaccctaagcctattggagttctctctttttgatccaaagtaaaaacactgaccattggtgactgctgcctggatgctggaactaacctggcttctgtcctttccaaaaaccgcctgttcagcttttccttcaattctgaaacaggaaaaacacctcctcataaggctggtaagtgaaatctattaaatgaaatatgtgctctccgagatcaaggacttt

SEQ ID NO: 17313 - DNA, 887 bp, Homo Sapiens
gcacgaggacaacgctttggtattccgctggctccagcgctttttctgaaacccgaggctggccagggtgctgtcaccgtgtggtctttgattgcagccattcaatgcccacatgcttttccttcttgtttcagaacagcacatggtcacaacaagatattttctttccctccaaagccttttgtctccttgtgcctctttttatccttaggaaaagatccaggtgcttgtgaaaagaatcatgaatgcaacaagggaggctggtcctgttgctgtcgccgattaagttttaaacttttatttattatttatgtctgccgtattttaaataaacattctcgttccttccagttccagtcatagtgtgtctgtggcattccagtccaaccatgtgacttatttattctaatttgagggctgcactgtacaccatggtgtcctgtgacaccgtgttccagacatttatggaaggaaaacatcccatataaatgaaactgtcatgctgtgtcctccccggcagcagaagatgtgtccttccattgagtgagggtaaccttatgtccaccaaggatactttgagaaagcccctaaggaacaagcctcagtcccacggtttcagactatttattctctgaacacaagagtattggttaattatgttctcagctctccctgctgttgtatgtgtgcattcactgcaagtaacttatatctttttatttgaatgtattttaaagcagtagatagaataacaaaggaatatgaaaaccatgggactgaatggaccattttatgtattcagagagagaagccactcatcattgccagaaataccatgtaaaattggcagttcagaggttgcatacttagtatagtaaataaataaa

SEQ ID NO: 17314 - DNA, 454 bp, Homo Sapiens
  misc_feature (76)..(102): n is a, c, g, or t
  misc_feature (147)..(225): n is a, c, g, or t
  misc_feature (262)..(272): n is a, c, g, or t
  misc_feature (364)..(376): n is a, c, g, or t
ggggcctctgataaaacgggattaaacccgggaggaaaccttgggcccccttggttttaccccaaatttcccgggnnnnnnnnnnnnnnnnnnnnnnnnnnntttttccttccccaaaagggaatttctttccttccccgccacccnnnnnnnnnnnnnnnnnnnnnnnnnnnnnnnnnnnnnnnnnnnnnnnnnnnnnnnnnnnnnnnnnnnnnnnnnnnnnnncccggaaccccattccccccaaagggagtcgaattannnnnnnnnnngggcccgctttttaaaacgccgggacggggaaaacccgggggttacccaatttaatccccttggaacacatccccctttccccagggggggnnnnnnnnnnnnngcccgcaccgatcgcctctcccaaaagttgcccaccctgaatgggaaaggggacccgccctgaaccgcccacataacc

SEQ ID NO: 17315 - DNA, 665 bp, Homo Sapiens
aaaacaaacagacaaaaaaacctgtggattgaagggtaaaggatggagtatttaaaaagtactgtgacagaacaaagtactgtaagtactagagttgagtgtggatggaaacacagaacctgtaaatcaagtgtttcatttacgtgctcaactcctactgaattttagcaattaaaacatgaaaactgaaatattggttaacaaatgaaaatagaatttaaagacctgaacttcttttatgatctttaatgattatttgttctaatctttgacttggaaacccaaattattttcagtctaacgtacttgaaatttaactattaaaaaagttggaggaactcaaactttgaagttagggctccctttctccagataaagcacattgcctggtttattgtaaggcacttagaacatgtaaccaaaaacactcaatttaggaataggaatgattgttttacagctaagtgcgctctcagagtcttttgttttacacccctctcaagtttacctttagatatttttcttgttgtttaatattttgtgacagatttggcaacttttaaaaagttgtttgaattgaatagtgcataaaattaatagatgtttttcagaaaatcccattattaaggagtagaggaatgaggagaaatattcgttctaaagag

SEQ ID NO: 17316 - DNA, 260 bp, Homo Sapiens
gcacgaggatggcaaagtctaaatcgtagactaatcattgtttggcaatggttggtttagtggtggcacgtgatgtgatgttaggaagaattctatggtaaattttgagacttcaaataaaatggttaacttcaatgctgtgttttttgtggggagggttttaaattacttttgcttaactatgaggctattcaagttatctatttttgtgttagtgcttctgatatccttctgacttcatggcataaaaagttaaagca

SEQ ID NO: 17317 - DNA, 630 bp, Homo Sapiens
gcacgaggatttctgtcatgaaatcattccagatacctcttttcttctttccaaatggttttcacatgtgtttgaaatatttgtactttgaattgtcggattttccatgtcctcctttctcctttgtgcccagcctgagtcagcaccatcccgcattcagaacctcccagtgaaagggcagccttcattttgagaaggtggaaggtgttagggtttgggagacagctcatccaatctcccaagtctcatggtggatttgtgactgtgagagtttccggtttaaaatctgaaaagccagatatgcctgtttccttttcccagcaccatgcctgtggaggggacagtcagacccagaggtcctttacgtgtggatggagttcacaggcgaatagaggagaggaccaggggacgtggcttgtcccttttgtccaacaaagcattatatttttaagaatggcagtcctgtttgctgaagtgttcataagataacaataggcttgaatctccaattcaaatgaatgtcaaagcacatatctttaatatgctgaatgaatatttatttttgtatccattaaaacagtatattgatctcttttattctttattaaaataaaatgctcttttttatag

SEQ ID NO: 17318 - DNA, 880 bp, Homo Sapiens
  misc_feature (190)..(219): n is a, c, g, or t
gcacgaggcatcaaatggctgaaacaccagaagaagggggtcaacatgggtgcccatcctgattataactgtccacctccttgtttgtctcctcaccagtctataagctcatgcaatatagtccttttgctctctgtgttcaaaacctagcacagtaatgactcagagaggctgtaaacaagtttgctcnnnnnnnnnnnnnnnnnnnnnnnnnnnnnnactcttcttgtgacttcccttttagtggctgatcacaaaaagttttttctgacttacaatacaattattcagagttcaggattcatctttagtgctatttctgtttttcagaaaattcagacaaaaagttacttaacaagaggaactctggatggtcgagtgcatcaaccaaactgggaaaatccctcagataactgccaagttcttcacctcactttgtctgtgtagctatagtctgtggatggactataccctatatacatttaggttggcctttccacatttttttccttggttttgatgcgcttctttggctgtttaggcatacatccaaagcagaaaatgacagattccgatacttatcttacttttgaagagggagcaaaaagcacattgtaatcaacttccaagaaacttaaaaagtgatttttcttgtgaggagaaatatgggtcatgcccacagattctgtgctcagttcagctgctgacaaaccatttttggaatgttcttgagattagcacaaaaaacagcaaatgcaatctcagcttatttgttcagctgataccatctgaacagaagcctgaaggcaaggcttttgagataagcagactttccctaacttccactgaaaatggtcatggttcatagaacagatgaccc

SEQ ID NO: 17319 - DNA, 895 bp, Homo Sapiens
gcacgaggagaaagttttgacttgatactttcagttaatgctgagatttaaaaataaaaaacagcagggcagcatgtttcccttagcatcgaacagctctctttggctgtctattctcttgtaaggttagacagttggagttcgcatttgatctgaggctttaagcttcttgttatactcaatttccaagagtttcctgttcagagacttgaaatgcagcttagtaacaataagtcattatttaatcatgattaaccactttttaaatggacatatttccaaaagggagaggtagcagtttcttaggtgtggattttgtattccttgactatacaagcataaagaaaacatttgtttatttggataatcaagaaaatctcaaaaaggagcagctgcagttttcattaatgccgaagggaaacatcaagaagatacttttcctaatgtacattaaattccaagtgttatttatgaaagaagaaactattttatgaaatatgatctgttgacgtttaaatgtaaattttattttccattagagtcttatttatgtttcaaaaatggacaaatatttatatttatgcttaagataaaaatatagaaatatttctgcttactaatttgaagatttattagcatttgatcataaaaacatagaaaagagactaatcactttaagagccaagaaaaatatgtatattttttccaactttacagtaacttttaagaaacactcaatttggtcaggcaggattcattcaccattacctttaaaagcacaacgtagaaacttatcttcattaagtgcactgaatgtctggcaccacataactaaccagagaattcagtagcttacgtctatggaatgcttcaagttcaaggaagagagacatcc

SEQ ID NO: 17320 - DNA, 919 bp, Homo Sapiens
  misc_feature (376)..(483): n is a, c, g, or t
gcacgagggctccgaataaccctcacctcaattaaattcatcacctgttgaggaacaaacatgtgccaccagggaggatatctagaataatgtgctgtagacgctaaaagtaattttaaaataagaattttcaatgttttgagtagtggttgcaatactagaataaatacatattgcttctggataaatacaattgcttctgcatattgtttgttgttgttgttttgagacaggttcttgctctgtcacccaggctgcagcacagtggtgcaattgtagtttactgtaaccttgaactactgggctcaagtgatcctcttacctcaaactcctgaatagcaaggactataggtgtatgccaccatggctggctaannnnnnnnnnnnnnnnnnnnnnnnnnnnnnnnnnnnnnnnnnnnnnnnnnnnnnnnnnnnnnnnnnnnnnnnnnnnnnnnnnnnnnnnnnnnnnnnnnnnnnnnnnnnttaagtgtgagccatcacgcccagcctggtagtgattgttttgaatgggtgaaggctcatttcgatgtgtaagttctattatgtttgtttttaacagatattattactcatgtctcataatacagtttgattattttcatttcagaattccatttttgtttctgttattttgagataattgtcttttagagagagacagcttattttggagcaaatccattgatcgttaggtaaaaatactcgtcatttgtagtttgtttctttaactgaactaagctttatttaaactaagctactttggtgtcgtcccttatttaaaaatttttctcagtggttacactgttttattttctttggcccaatatattacctatctcttgctctgattttccagaatattaatacctaataataatacagtactatcttaccaaaa

SEQ ID NO: 17321 - DNA, 636 bp, Homo Sapiens
  misc_feature (574)..(582): n is a, c, g, or t
gcacgagggagaagctcatgttcacctaggcagcactggccagggtgcccagaatggtgtttgttgcctccatagagggaaacaagcctacagttaagagctgctctggtcccacacagcacatcttcaaagcaagactcaaaaggatcaaaccatttccttgttttctgagaataaaagcagttgtacctcttccttttcactctcagaaaatctgatagaatctataaaagagccctaaggctggagacactgtattttccagggagccaactccttgccccagacactagtcaattgccccagcactttcttcactgatcgttagaggaaaaaagctcatgttagatttaaaaatcaggaaaaaaatttaacactaaacttgcaaatattatgtggtgtatattacagttacacatttactatgtaagtgcaactgtaaaactgaggaagtattccaaaatgttgacagtagttaatcctgaatgacagaacccaattgattttcattttcttccatttcctaaattgtcttcaatttccttgtactccttgaatatctgaattctagaannnnnnnnnagcaacccaagcacaacaagaatattgggaggtgccccagctgcaaataaactc

SEQ ID NO: 17322 - DNA, 971 bp, Homo Sapiens
  misc_feature (374)..(434): n is a, c, g, or t
  misc_feature (497)..(588): n is a, c, g, or t
gcacgaggattataaactgctagatcataccccaattttaatgaaataattctaaacaaatgcgggtcaatggcactttatcagtgactacttatagaaggtaagccttggggaaatcatagcatcacagtatggagcttttctcaccttttcaattaaaggtgtacatatagtaagaaagaaagaccttccacctcataaggcaggtgactcaggatattttaaactaagatcagtaaagttcccatccactttctttgaatcatcaaattttatcgagacccatctctcagcttttagtaaatttcttcttaaaataagcccacatgtaaaacactttcctaattactttttgtttgtttgtttgagtctcnnnnnnnnnnnnnnnnnnnnnnnnnnnnnnnnnnnnnnnnnnnnnnnnnnnnnnnnnnnnntgggttcaagcaattctctgcctcagcctgagtggctgggattgcgggtgcccgtcaccatgnnnnnnnnnnnnnnnnnnnnnnnnnnnnnnnnnnnnnnnnnnnnnnnnnnnnnnnnnnnnnnnnnnnnnnnnnnnnnnnnnnnnnnnnnnnnagcctccctatctctgtatcttatgaagacttcctttttctttctgaagagctgccataagtcttaaacatttaaatcatcagaaccttttcttgtagcagaaatgtgaatgttttcttgaagtacaggttacggttttcatggtacaagtgcttacctacgacgataagagaacaacgcttaaaatattcctcaaaagaacaattgtgagaatccatgttagcggctgtcttaaacgactaccctcaggcagatctgggttttatatctttatcttcattcagtgaagcaagccaaagcccacatttgtatgccttaggtcttcttaaaatgtatctgtaacatgttgtccaatataaaactattttaataaaagttactgg

SEQ ID NO: 17323 - DNA, 701 bp, Homo Sapiens
gcacgagggataaccctttggtgtcccaactttaagcaattatcttattagactccccattgaagacagttttttctttcttaaagatgaataaaccatgatatatcttccacgggatggcctctgggatttcacgaagcacaggactaaatagagaataaaaaactaaagtatagtgttggcttaataacaattatgttattacatttatgtaaacttatagaaagaagttttataaattaacagtcaataaaagaaacattttgacttttttcggttaataatatttccacatttccataattactggaagattgaagtaattgaaaattcaaactttcaaagaagtttgaagtttgctgtgtaggttaaatctttatgtattggctttccctttacaaaacagtttcctgcatgtttctgcacaaccagcattttaatacagatttcatatttgcccaccaaaacccacagcagcctacactgtggtctggttgatggaaaacatctgatgctgcttaaaaatcatcaaggaaatacacccgtgtggaatcataactctcacctcacaaagcaaacaacctcgccttggtcattcgttacactgttccattccctatatggcaaatcacaaattgttccttgtacccctaaacaacttttatataacatatgattaaagcctgtaactgatacaattg

SEQ ID NO: 17324 - DNA, 917 bp, Homo Sapiens
  misc_feature (378)..(449): n is a, c, g, or t
  misc_feature (566)..(742): n is a, c, g, or t
gcacgaggctgcctcggtgccctgccctgtgccctgaggtcacctatcagtgaaggctgctgggttctcgatggcccattctgcaaggtagagggcggcatcccatgtgaccaggactgtgatgccgtgggagatgatggctgtgctcttggagagtgtgactgagcctcccgagggcagcaccaagagaaggcgagagagtcagtccagcgatcagaaggcaagtggcttagaagacaagcagccatccaccacatggctgaataaaccatgacaggacaaatcgccactcagcaatgagaagcagctaactgttgacatgccaacagcttgcacaggcctcaagggtgtcacgtggcatgaaagacactcatctcnnnnnnnnnnnnnnnnnnnnnnnnnnnnnnnnnnnnnnnnnnnnnnnnnnnnnnnnnnnnnnnnnnnnnnnnaggtgatcgatcgggcactgtcggtctgcagctgctaagccaagaagatctgggaaggagtcagtcagagagccttgggctggagttccaggggctctgggagtggctgccaggacnnnnnnnnnnnnnnnnnnnnnnnnnnnnnnnnnnnnnnnnnnnnnnnnnnnnnnnnnnnnnnnnnnnnnnnnnnnnnnnnnnnnnnnnnnnnnnnnnnnnnnnnnnnnnnnnnnnnnnnnnnnnnnnnnnnnnnnnnnnnnnnnnnnnnnnnnnnnnnnnnnnnnnnnnnnnnnnnnagccccaaaggtcaatagtgctgaaagtgagagaccctgattcatcttagagatcatccaagcacacttggccaaattgtttttgctactgtcccatgaagaaaaggcagactcatgactgatggcaacatcgatgggaattttgtttacctccttctttgtggaccttgggata

SEQ ID NO: 17325 - DNA, 962 bp, Homo Sapiens
  misc_feature (426)..(437): n is a, c, g, or t
  misc_feature (601)..(639): n is a, c, g, or t
gcacgagggagagatgaaacatggctttcccagtaccatcttaaggacaaatcacaattaaaacaatggttaccatgatgtcaaaatgatccagtcaaagcaaaagcagactagtcaagagcaaaggtcatggcaacagtttttggggatgctccaggcattctgcctgttgactttctggaggcccaaagaacgatagcatccgcttattgtgagagtgttctgacaaagtcagccaaagttttagcagaaagacacccaggaaaacttcaccagagagtccttcttcaccacgacaatgcttcttctgctccttcctcttatcaaatgagggcagttgtataagatttcctatgagaaatcattaggcgcccaacttacagtcctaatttggcttcttctaactttttttggtttcctaatctnnnnnnnnnnnntctataaacagtacctatttttcttcagttagtaatgtagaaaagactacaatgacatgattaaattcccaggaccctcaatccttgagagatggactaaatggctggtatcatcacttacaaaagtgtcttggacttgatggatcttaaattgagaaacaaannnnnnnnnnnnnnnnnnnnnnnnnnnnnnnnnnnnnnnccacaaacttcaaagtcccctcatatatttgaaattgtcaccttttactggaggcttggctttctatgagattcaaaatccaaaatccaaaagttgtcttgctctacttagttactgacagtggtttaacaaatatacattcatatatgtacaatttcctattgtcaaatttataagcaacaaataacactgtataattaagccctggaaactatgaaaactacgaatgccttctttctaattaggaaaaggcagatgtaatccagtccttactgtcaaatcactcctaccactacagaaaatttggaagttttttgttttaa

SEQ ID NO: 17326 - DNA, 889 bp, Homo Sapiens
gcacgagggtttccttccagtcctgaatactgtgaccctcttggccatagcatttgtctccttcacaggtcttgcgcaaaggcgaagccaggggaaaaggcagttttagagctggctttaggaaagcagaggaagggaccgctttgtgaaggaacagtcagatccaggagtgagtcctcacaaggagaaggccagcaggcaggcacggcccatgacctcaggggcacgtctaacccactgccgccacagggccatcctctgtctttggcctgcggaccctacaccttcccctggggaggtgccctgcctgttggggtgccaccctggctgcaggccccagcacctagccccgcaacgtgtgaggaggttgggcctgcccctcagtggctgtctggctgtcatcctgggtggctcctgcctgccacttgaatgataaataactagagcttctcacccagtttttgatggacacttggggaattgttctgagattcacagcccaaaccaggatccggccttttgaatgggatcagtgggtaactcttatttctggctgaggcagatttgagaggttgtcagtgggggcagctgaatttgaaagagcaaatcttagaatgcaaagggactctgtgtcccagccgtgggccgcacttttggtggggagcaggcaggagggagtgtggggcagcagtgacagctcaccgtgccaaggccacagtcaggaggaatctggtacaggctcctggggccttaaagcccagcagggcggggcccggttctgctttccagccaagcccactggtctgactcgtaagagcccagcttgtactcagcagtacagattgtatcatcatctggttagatgaagggtgtgaatgtctctgcagct

SEQ ID NO: 17327 - DNA, 639 bp, Homo Sapiens
gcacgaggccggaaagagatggggagggagggaggctgtactgaggttttaataattattgagcagtgaccgtgtctcaggaaagagatggggagggagggaggctgtactgaggttttaataattattgagcagtgaccgtgtctcaggaaagagatggggagggagggaggctgtactgaggttttaataattattgggcagtgaccgtgtctcaggaaagagatggggagggagggaggctgtactgaggttttaataattattgagcagtgaccgtgtctcaggaaagagatggggagggagggaggctgtactgaggttttaataattattgagcagtgaccgtgtctcaggcaccgttttaagagtttatcacatactttcctcattgcaatccttgcaaccgcccccgagataggtattattattcccgacttccaggtgagagacctgaagcagacagaggtgagggaatgagcccaggccgggaggacgcagggaggcagaatccagcgttctaaacctctgcacagtcctgtaagttactttttaaattcccgtcgagaggaaactagtaagactaatagaagctaaactcattaaagttctgtaatctgctgaggctcaaacaactga

SEQ ID NO: 17328 - DNA, 870 bp, Homo Sapiens
gaggaataacttaatgagctgcagtgtgaccacacaatcaagattagagttactattctgtctctagacaccttctacatttctatagaagaaaaagaatctccctccagtcagaaggcactgaatactttgatgcagtttttaacttctaacatgtgtatgcaaccttctacttgtttaaaaaggcattgggagcaactacagaaattgtctcattcagtttaaaatgaaactaatgtgtgtttattgcaagtttgaaccagcattgagcgactatttagcaaagaaacataggcacagttttcatataaatttaattatttatatttgattccaaaataacttttaggcatatatagagttatgaaaaagtttatgtaaccaacacatgtgcataacagtttgataactgatatattgaatctaaacataccactcagaaaatattttttccaaagatatgttaaattatattttaggccataattttaatcatatgtctttggtttacagttttagtagttttatcattcaaccatatcaacccagttcatgttgtaataacatcaaataatatccaattagaatcaccatttatatattttctttatgagttatacatcttgaaaaaggaaggaaagaaattaatgggcagaaaggtaaattaagcttaataccagattttactcaagaaagtttggctgacaggtcaattctggttttaagaaggggaaaagaaaaaagaaaactttttcacatactttatggtaatatccttattagaactctgtatagtaaaactcctatgttaagtctttccaaaaacttgaaatgagttgaaaaataagtaggaaggtgaaatttttttaa

SEQ ID NO: 17329 - DNA, 818 bp, Homo Sapiens
  misc_feature (44)..(84): n is a, c, g, or t
  misc_feature (129)..(203): n is a, c, g, or t
tattatatctgttttggtccactgcctccccacttttcagatgnnnnnnnnnnnnnnnnnnnnnnnnnnnnnnnnnnnnnnnnnctttcttctatctattaaattttccactccctaacccacccacannnnnnnnnnnnnnnnnnnnnnnnnnnnnnnnnnnnnnnnnnnnnnnnnnnnnnnnnnnnnnnnnnnnnnnnnnnccagcagggacagcagctgtcacatgaactggagatgaactggaggtgagtctgatgtctcggaattttgaggaaagtgggtagaaagttgccaagcaagctgaagagacaagcaaaagggatcatattccagaagaattcttagcaagaccacagtcagaacttcaatcaaggtgattgattggtctgaaagggggaatagaatgtaaataaaatacaaccatgagaaaccacatgtatgttgttgaaccttatctagacactaactgtgaaaaagccagcttggattattgatgaaggacattcagaaaaccacaattttgccatgcttatttagagaacagagacagtggtattatcagcctatagctcaattgtaaaattgggatgactagatgtcccgagactattctgttcctcggccctctcgacactcacctaagaagcttccaaatttaccacttctcagtcattgtaaggatgctgcatgtcataaggatgattatggaagattatgggcatgttctacatagagaacaagaaaagtcacaatattttctttataatttatattttggaatttatattagttccctaactctaaataaccatggg

SEQ ID NO: 17330 - DNA, 386 bp, Homo Sapiens
gcacgaggctctgatattttatgagaaatgaagggctgctgtctatgcactgctcatggtggagctctacaggtctctgcatggccctagcctgcctctcctgctctcctatcacaggcagatgtgcgacggggaccctgcctacccccagccttggctccagttattgtggccacaaatccctcatgtgtccaggcttggcatatggtgaataatgtgaacaccctcttgatgcaattattggagcccctctgcacaaccacttttctggcagaaaatatgtactgggggcagggtgcctttaaggagacccatgattgaatgactttttgtttattgaagttctgcaaatgattggaaagctgcgtgggaaatgtatgctaaca

SEQ ID NO: 17331 - DNA, 952 bp, Homo Sapiens
gcacgaggaataaaattaacctgtatctcaaaggtagaaacaaagcaagaatttaaccaaaaagagaagaaaatagtaaaaaataagtaaaacttactgaattagaataggaaaaacaagtcaactaataaataaagttgattctttgaaaaatttaataaaatacacttaaccagtagacaacttaaactagaaaaaaaagtgagaaagtactcacactcaagaaatgacgaggaagaaataacaatttaaacagaggaaattgtaagaattttaagagactactttgcacaactttatacagataaactttaaaacaaaggaaactgatgtcaaaataatagatagagatgactttgaaggaagaaataaagttatctgaaagctattcaaaaacacaccagcaccagtttctctggggaaatctatttgacttcaaagatcagataattccaattccacataaactattccagagcatagaaacataagaaaaacatgtaaatactttttaaatgaaatgagtatcctatttacacctaacctgacaaaaactacacaagaaaaaagacaactaaagtcaaacttcacttatgaacattgtgctaattttctagagtcgacattataaaatactgcagactaggtggcttaacaacagaaatttattttctcacagttttgggggctgaatatcaaaatcttggggtttacaggcttggtttcttttggggcctctctccttgggcttgcacatggccatcttctcattgtctcctcaggtggccttttctctgttcaggtatcccagatgtctcctcgtcttcttatatggacacagtcctactgggttaaggctccactcttaagacctcattaaccttaactaccacttttaagccctttctctttctaaggacacattgagggttacggcttcacacatggcgtt

SEQ ID NO: 17332 - DNA, 953 bp, Homo Sapiens
  misc_feature (111)..(119): n is a, c, g, or t
  misc_feature (199)..(230): n is a, c, g, or t
  misc_feature (303)..(312): n is a, c, g, or t
  misc_feature (356)..(508): n is a, c, g, or t
gcacgaggggtttcttacaattttattagtatttttcaaaataatacttttttatggcattctctttgtctttagaggtttttgctaatttcttttcttattaaattacannnnnnnnnaactatagattttgttgaaaagggcagacacagattttagtactagtaaatatggtggtctctccatgtatatgcccctnnnnnnnnnnnnnnnnnnnnnnnnnnnnnnnnggttagtcaacagttacaagcagttgaccatatgtatctgcaggttctgtatcagtggatcaagctattcagnnnnnnnnnncaacacaattaaaagtaacaatacaataattaaaaaaaacaagnnnnnnnnnnnnnnnnnnnnnnnnnnnnnnnnnnnnnnnnnnnnnnnnnnnnnnnnnnnnnnnnnnnnnnnnnnnnnnnnnnnnnnnnnnnnnnnnnnnnnnnnnnnnnnnnnnnnnnnnnnnnnnnnnnnnnnnnnnnnnnnnnnnnnnnnngagacccctggctgggttcaatcctccaggaatactgagggacgatggtaatatgtatggatatatgtgtgtgtatatgcatgtgtgcaagaatatttaagttaggggagaaggatacatctttctcggtgtataaacctgttgcagattatttatggaaatatttaagtctattagtgcacaatcatgggggtgactgagccattgagagaactgaattctggtgggatttattttcttaaatttttatatcagtttctgcttctgtgcagcattaaaacaaattgggagtgtgataagggtaaatcagtacttgtattatttcacagctacatgatatttggtgataatttttatttccttatttattctacttgaataatcagttctgggatttgctgggacttgtgttacatttttttctcatggggttatagtctttttc

SEQ ID NO: 17333 - DNA, 767 bp, Homo Sapiens
cccccgggctgcaggaattcggcacgaggcttaaatagacaaaacattttaggcagagtcagagcattttagagctatttctgaaagagaatagttatctgttcaacgggcaaatacaacacagagtcaaagataatgctgtgctcagaagtcatgatttcttcaggattttagggtatttagattttaaaccacaattctaaggtcaatatttatgtaaagtatttatgaaaataaaagccatatttaaatttaaatttaatatgctttaattcacataaaatattttgaggttgttacaaaataaaaaaatttagatttttctagctatatattcaatatcagcatattttttgcatatttgaaaattgagattctgtcttgtaccgtttaaatggtagcctgtttaacttaaaattaactgcaaaagaaataaacaaaaactgagtttttgtaaataatattaaattgagtaatttaacttaatcccacccattaggttaagcaatgatcccaggataaagagagagagagaatgatgagtaaaatgaaccctacactgcaatgtctccagatagctgtatgagtaaaagcttaccatctcagctcttgggtctttattttcttattttaaaaaaaggcgttaaggtccacattaaagtcaggtataattggtaaagtttaaaactgctagtctcttttatttcacgaacactgccaggcctttggaaattattgataaacttgattcactgtgagaaacagtc

SEQ ID NO: 17334 - DNA, 244 bp, Homo Sapiens
gaccatttcgcctgctagattatacaaactaaactttctcaaataaattcatttccattttaatgttatttattcccaggcttagagacatcgtttaaacaaactatctttgaaaatattatgacacatctctcatttctttataatcgttatgcaggaaaattgcctaagaattatgacccaaaagttaccccagatccagaaagatggctgcaaatgcgagaacgttcctactaccggggaa

SEQ ID NO: 17335 - DNA, 696 bp, Homo Sapiens
ctagggacaggtatggtctcggtcagggactggaggcggcttggatacagatccgaggaggaggcggcctcttccgtagtggttgctgaagggctatggaaatgataggcaagacttccctcctggaaagccgaagcttagagcttcacgttcttcttcagagggcaaaagctgttgctcttctaataaggggccagttcttttcgtgggcacatgtttcttccgtcagtcgttctgacatcctagaaggagtttcatcaatcaccttgaaaccgacctggacgggtgacctcgtggtcgccccaggagatcacaggtaggggagttgggatgtccccgggggaccgtgcagcctgcccctgagctcccattcacaagttcgagtgtcaagctactcctgtgacctgggcagatagaaacagccaggaccgctttttaaacatttgtgtgctttgcgttatcctcagggagaggtggctttacattgtagtaagattaaatggttaggtctttttaaaagttgcggttgtggtgattttggcttaatgtgttcgcccttgagcttcagatctgtgacttcgtgaccatgattgtctcttctgaaactggagtttgaattatgttccctctttgcttgggctttaaacgttccttcacgtatacacacaaaaatacgtttttgaggaggtactccta

SEQ ID NO: 17336 - DNA, 852 bp, Homo Sapiens
gcacgagggttaagatctaccaaactgaaggggtctccagattatcttggaggggacaggaggatggcagagaaacaactgtcaatccagatttgacctcatttgcattgccaccaaggcctcctaggaaaaattgtaggaatttatgggtataatattgtggtctgaatggcgtgaatttttatcccgaggagggggcagttgtgacaacctccagtgcatgtgggaacagcatgaattgggtcccttattcccagggggtgccccatattccccaatactgtaaagcagatgctgtttagcacctgccaaggagccatatgccctgaagttcagcattaggcaggtatctcttaactgtaagacataccacgcccagctgggaccataatttgtacagaaacactggatgtgattaatagggagtaggcgagattatagcaaaccagcagaaatggaactctgctaaatgtgcatccgtgaatgctcccttgaatgtggctgtgcaggattcagggtttgcagaaattctcaggacctcagacctctgtcctatgactaatgttactggcagagcaaataatctaaaggttttggttttgtggattaccatctccgtgctgtgcatctgaaggccagtgctgtgctggcaggaaaatagggactgagaaaaagcagatcctatactatagggactgtatatctatgacgtagccagccatttctttgctcccaggcaagaagaaagagatgacagagtcaatatatgggttgccaatcggattttctaaaatgagtagaaagtgggatttttatgtgctacagttttcttttaatgctttgttgatatgt

SEQ ID NO: 17337 - DNA, 708 bp, Homo Sapiens
  misc_feature (168)..(177): n is a, c, g, or t
agaaaagaagttgtttttattttaattcaagagggttggaaacataaaaacagtacattttccttgcagaaaattaccccatttaaattactatttggtacagagattatttattacactgcattttaggcaattttctaacattaagtgacaagttatacttttgannnnnnnnnncacattggagctattatgatttgcactcataataccaaagctactgaactcaccaatttttttcttagtaattaaaaaaaagcacacagaaaatataactacaattagattaactttatcaaaagtaactctttcagaccaaacatccagcaaaaccacccacctcccttcaaatataagcaaataatcttgccctttctacaaagtgcagatatctctgtatcccttttatttctcaaactgcagtccccgaagtgaagcaaacctttctctccacttctttccccttcagagattttggtgaaggcaggtttctcttaccacccatggtggaaaggtctcaccacttgaatttccttgactgagcaaatcttctgcagacagacaccacagagccagcagcagcccattatctgcactggggaatgtgacattattccatctggggtcatatgtttccaggatgttgttttgtacttctatttttaaagctcccctctacccacccactttgcctctgaaaagacagag

SEQ ID NO: 17338 - DNA, 852 bp, Homo Sapiens
gcacgagggtaagggctttcagcgtggctgtctgttcattgctttccaaataggatgcagcaatgattggtacatgggtattaagatcggtagtaggggctagtccaagtttagcaatagccaaactggagagcctctgaagtatgagagtcccagagggatttgtcagctcctggcagacatcctgattttcaccttcctgagtctaccctaccccagagggtgccagtctcactgtggtgatggttagcccagtgtgtgctgcactcacacaccagcacggggtccgtgcttgcaggctggtggatgctgtcctctgggttaagactgtctcccttctcgggagcactggagggttctccatctgcgtgtttcagtggaagttggcagatacgaaaacaggcccctatagggaagcagttccatgaaaatgattaattctttccaaaagacttaaaattttttcctatttcaattttcctttcaaaaaaggaaatacattcatgtagttcaaaacttaagaaaacaaaagtctgttcagcaaaagactcccactccgtttccccaaacgctgagccccaccccccatccctggtagcaagaagtgtttccaattttaaggttaagaaacaaagtccctggatttgtgttagggatgtcttcctgagagtgggttgtgttccgtttgaccctggcggttgacctcggcccactagatcatgccgccctctccagggaggagggcctccccatcaccctgtacagtggcaccccagccctggcactgcccgcccttgctcagcgtacctttcccatggcactctgacgtactggatgtttgggtttctgaag

SEQ ID NO: 17339 - DNA, 492 bp, Homo Sapiens
  misc_feature (256)..(292): n is a, c, g, or t
gcacgaggggaatctggggtcattgggaggtcattgggaatgaaggcaatgtgggaccttccagttgtctgcgtctccccaggcctgacaaatggggctccttattatatgttctttaatcctttgtcattccaaagggagaaagggagacattcctaataatcttccatttactaagacagttttcagtcctgaagggttaaagaacattactttcttgatcattgacttaatctcctatcgtcttggggtcatnnnnnnnnnnnnnnnnnnnnnnnnnnnnnnnnnnnnnctcctcataacacctaattatcattcaggcaggttgaataaatccctgcttttttggaaaatcatgtgttatttgttccacaaagtttccaattaaaaagaaatggactgcagttgaatgatctctaatagaaacaaccataggattttgaatcaatcccaagtaatgaagcatcaaatctcacttgaatttcatccctt

SEQ ID NO: 17340 - DNA, 963 bp, Homo Sapiens
  misc_feature (505)..(564): n is a, c, g, or t
gcacgagggaaacactggacacagatgttactctcagagcaaagactgaacattagagcttcagtttttatagcctcctctagcataaaggacaggaaataaggcctaggaattgtctgtggtgattaatttgatagatactctccataaatctgacactcaaatggcattatttttaccaaaagtgaataagcctgagaaaaatcaaggcaaacagactgtcccaagtttggcacatctctaaaaatttgtagtcacaaactggcccttacaagggttttcattctaacctgcactatcttggtagtatccaaccttcaggtaagatagaaaattatttcagaaaaggccttccaaaattatgatgataatagttttttatctgttatacacacagttaagatttacaaaacacacaaggaaactaaaccctgagcaagatacagcagaaataattgtcagcaaaaccatatcagtgaagattttagatgctaaagttatcatnnnnnnnnnnnnnnnnnnnnnnnnnnnnnnnnnnnnnnnnnnnnnnnnnnnnnnnnnnnnacactttgacttttacatttaaatagattcataggaagttcaaaacataatggagaaagaacccataggataacattttaaataactatcataccatatcaaaaagaggaaattgatagtcatataatattataaactaaagtgcagacctcatatagattaaactaatttttcgtataccttcttttttggtgtataattctataaaattttatcacatatcaatatgtgtgatcaccatcacaatcaggatatggtattctctctctccaaagaaacatattcacgctacctctttcggcataccgtgccctaaccttaaaccttgcattcactgatttgttcttaaggcactcaaattttgtcattctgagaatggtatataaatggaatcataaa

SEQ ID NO: 17341 - DNA, 735 bp, Homo Sapiens
gcacgaggttccttttaatctgctatgaatcagtacccagatgtttaattactgtacttattaaatcatgagggcaaaagagtgtagaatggaaaaaagtctcttgtatctagatactttaaatatgggaggccctttaacttaattgcctttagtcaaccactggatttgaatttgcatcaagtattttaaataatattgaatttaaaaaaatgtattgcagtagtgtgtcagtaccttattgttaaagtgagtcagataaatcttcaattcctggctatttgggcaattgaatcatcatggactgtataatgcaatcagattattttgtttctagacatccttgaattacaccaaagaacatgaaatttagttgtggttaaattatttatttatttcatgcattcattttatttcccttaaggtctggatgagacttctttggggagcctctaaaaaaatttttcactgggggccacgtgggtcattagaagccagagctctcctccaggctccttcccagtgcctagaggtgctataggaaacatagatccagccaggggcttccctaaagcagtgcagcaccggcccagggcatcactagacaggccctaattaagttttttttaaaaagcctgtgtatttattttagaatcatgtttttctgtatattaacttgggggatatcgttaatatttaggatataagatttgaggtcagccatcttcaaaaaag

SEQ ID NO: 17342 - DNA, 834 bp, Homo Sapiens
gcacgaggccatgacgtttcatagtggaatttcatgtaaatctcttacttcagtcaagctggaacacttacgttgcctaagctctccttttgcattgctgctttcctatgctcatttattcttcgtacaaagagtgctttcttacctgctttctacctaacttaaatgcagttttctccaagcagcattatcttattaccacagagtgttctgtttcattttgcaaaattctgcatctttatttcacccctcctaatcttgtctataaagttcatcatatttttgtatatgtctttttttcctgatgagctaatgggatctatggctggtaccataattttgaatatttcatcttccacagtgatcagacccccagttctacttcacagaggcaatctgtggggaatcagtctttccaaacactatcaagctggaggaagtgaggctgtttgggaatatctggacattgatcctgctttctcttcttaggtaaagttgtggctttactggcactgggtttggctcaagaaccagtaagaacccagatgtttgtaattttccattaaagggcatagcttgttagagtttgttcttccccaaatggtgatgtaagccctgagcatcaaagagaagtgtcaccctcataattgaacttgttaaatatggcaaaatgtcaccttgttctctcactgggagtgcatgactctggaggccagtcacagctgtgttgagccatgctacatctgttcttgttctgagtggcagtttcactgctaataagattttgaatccttagctaagtaagtcaggaactaaacataaacctattttctc

SEQ ID NO: 17343 - DNA, 259 bp, Homo Sapiens
gctccctttggtgaatttcttttttcctttcttaggatctcccgcctttctttcacctccttctcccatttcctcactatctgagaattcttcagtggcacctattttcctgtctgacgaccttgtctacattctcttgctaggatcttctccctctaatgcttaacagactgggggggcccggtacccaattcatgctaaaaaggctcccataaattgatctcaatggggaccgtttgttggagatttggcagggaaa

SEQ ID NO: 17344 - DNA, 902 bp, Homo Sapiens
gcacgaggtggttacttttatattttcttcttttaaattaaaattcctaaaaaagtctacttatctcaagtaaatttacttattctcacattaataacaaacatatttttccaaatattattttctaatgtatttctaaagactaataaatttttaaggagctctgcctgtcttatatgacccgagttatgtagaatggcattttatagaatcagaagaggcctgaaagattatctagtccaacttcacctcttgtcgtctactcccaccctccattcccatccccatccccagcaccacattttatagataagaaaacggaagcccaaagaatacaagtaatgactcgaatccgttttctgacatcaggtctagtgttttctactgtacccactcaataacttatatgcttccagaaatagggaggtggactagtactaatgatgaaaaggaaaatatacaatggacataaataatcagatgtttaccagaagctattttgtccagtgaccttgagaccagaagttggatggttaattggaaggtcaaaaaatacatgacaggtgatggatatgtggggctgaggcatattttttgtgtgtaaggatcacctgatttggcatgccatgtcatttgccctggataaacaacacccaaaatacatcttttattgcacccaattttgatttctccaaactaagtgaggacataaagacacttgggaaacagccttcatgcagaatttgctattttaatggcccttgcccaccaaatcttttacatttatttcacgcacacctaattggacaaactttttgtgttgggggggtggaaattcagctttgttgaatgcttctaaatcactccactgcgttttcatagaatcagcaactcttttttta

SEQ ID NO: 17345 - DNA, 620 bp, Homo Sapiens
  misc_feature (130)..(147): n is a, c, g, or t
  misc_feature (158)..(426): n is a, c, g, or t
gcacgaggctcttattttagctccttcccatgaataatgtatttgagctagctgttttaaaaattttaatacatacctttcaaggtgcctttcatagaatgatttttcacatttatttcttgggtgaacnnnnnnnnnnnnnnnnnngaggcagagtnnnnnnnnnnnnnnnnnnnnnnnnnnnnnnnnnnnnnnnnnnnnnnnnnnnnnnnnnnnnnnnnnnnnnnnnnnnnnnnnnnnnnnnnnnnnnnnnnnnnnnnnnnnnnnnnnnnnnnnnnnnnnnnnnnnnnnnnnnnnnnnnnnnnnnnnnnnnnnnnnnnnnnnnnnnnnnnnnnnnnnnnnnnnnnnnnnnnnnnnnnnnnnnnnnnnnnnnnnnnnnnnnnnnnnnnnnnnnnnnnnnnnnnnnnnnnnnnnnnnnnnnnnnnncttgggtgaacatttttttgatatatggtgtttccaaaagagtgagttatctttcaccagtattaatgaaaagacttcatcttggagaaactagctatgttatttattttaaataaatacctttgttactaaataacagtgtttggacttttaagatgtaatacatatttgagaatttggaaaatattgaaata

SEQ ID NO: 17346 - DNA, 619 bp, Homo Sapiens
gcacgaggggacccttgtatagttaaaagcacgtatttttaaaatttttttcctaaatagtaacacattgtatgtctgctgtgtactttgctattattatttattttagtgtttcttatatagcagatggaatgaatttgaagttcccagggctgaggatccatgccttctttgtttctaagttatctttcccatagcttttcattatctttcatatgatccagtatatgttaaatatgtcctacatatacatttagacaaccaccatttgttaagtatttgctctaggacagagtttggatttgtttatgtttgctcaaaaggagacccatgggctctctagggtgcactgagtcaatctagtcctaaaaagcaatcttattattaactctgtatgacagaatcatgtctggaacttttgttttctgctttttgtcaagtataaatttcactttgatgctgtacttgcaaaatcacattttctttctggaaattccggcagtgtaccttgactgctacctaccctgtgtcataaaaacctcattctttttgcttgaacccttgaatgcccctgctgtcatcactacacagccctcctaataggctttctggaggtttc

SEQ ID NO: 17347 - DNA, 771 bp, Homo Sapiens
ggctctaaaggggggagagagggtgctataagggaaataacgggccttattccaaaaattttaagggaatttattctaagaagaagggggtggaactgggggttggctcccagattttcgagcattgacccgaatataccccccggcgtgtaacggggaaaatgggttggtttaaaactcccggaatttcatcctgtttttaacccaatgtggggacagctcctgaatggcaaaactcttgtgatgtaattattataacaatgggggcttccattcggagtactactccattgtccacctccaagaatcccaagtcgcctggttctaagaattattggggaagtatgtaagaatttaaaatatatccgccgcaaccgggtactcttaaggtccataccattggtgggcaattgatttgatggtaaaggagagattctttaactcttctgttatgtaaaggattgctatggatgggaaggcgatgaagactaagatgatggccggcaggataattccaacaggttctattttctcgaccgctgaaaagtgaagattaaattaatttttgttggagtgtgaaggaaagggcctatccgaactagaagctaataagagatagtattgaaggcctgatcatgagaagtgataactcttctatatataggaaggacgtctgtaagactactctgtggggggcccggtaaccattcctctatagatgatctattacgctgcctctcggcttccttacacggccttgactgggaaagc

SEQ ID NO: 17348 - DNA, 597 bp, Homo Sapiens
gcacgaggagttgctgagctaactaatgtgattattgagtttacagatttaaaaattgtcactgttagagtatctactgtttttatgaagtcaaacttatgctgcctcagaaatccctgggtactgaaatggtaacatggaagtgaagaggtcactttgaaatattggtgagtcacaaagattaaagaaaaggatcagtttgcagatactcagaaaaggttattgaaataattactgaacagcacattttctctctaaaaagtagtttcatatgggttgtatttttaagatcagattatcattttgatatttggtcaaaattttgtaccttaggttacttagagccagatttaacatcatgaacattatgtggctttgtctttactacagatatgtggaactgtaaccaaatatgttgtctctaaaacttgttgattgcaaaatacagttctataaacaaaacccatatgtatatataaatgttaattttgcggaagtctggaaattataactatagcatttaagtttgagtctgtattggacaaataagcaccatgcttttcaaatgatttaaaaattacttttatttgcctcttt

SEQ ID NO: 17349 - DNA, 746 bp, Homo Sapiens
  misc_feature (225)..(278): n is a, c, g, or t
  misc_feature (394)..(676): n is a, c, g, or t
ccctataaaaaatcccccgggctgcaggcaaggtctgtctctctccatccaagtcctggctaacctttagtttctcctgaatttattatcatacctccttgatgctttctttcaaccaatgtattagattccttttctgatcatatttcccattcaggattctttgatctttacatatagctttctaaaatgttaacccctttataaaaaggagcccatttgtgnnnnnnnnnnnnnnnnnnnnnnnnnnnnnnnnnnnnnnnnnnnnnnnnnnnnnngttgccacattataataccaagagaataatactctcaatcattataatttctcataataaactacattaacatttcaactagttcctataatgaactacattaacatttcaactannnnnnnnnnnnnnnnnnnnnnnnnnnnnnnnnnnnnnnnnnnnnnnnnnnnnnnnnnnnnnnnnnnnnnnnnnnnnnnnnnnnnnnnnnnnnnnnnnnnnnnnnnnnnnnnnnnnnnnnnnnnnnnnnnnnnnnnnnnnnnnnnnnnnnnnnnnnnnnnnnnnnnnnnnnnnnnnnnnnnnnnnnnnnnnnnnnnnnnnnnnnnnnnnnnnnnnnnnnnnnnnnnnnnnnnnnnnnnnnnnnnnnnnnnnnnnnnnnnnnnnnnnnnnnnnnnnnnnnnnnncatatttctctatagcataggattctcttaactggactaaagcagtatttcaagcacagaaaaataacta

SEQ ID NO: 17350 - DNA, 385 bp, Homo Sapiens
  misc_feature (243)..(256): n is a, c, g, or t
  misc_feature (306)..(316): n is a, c, g, or t
gcacgaggctagaacatgcccttcactggttgtgtaaataaaactgtagaatgacacttcagatgaagttagtgtgattttaattgtgcactacaaccgagctgtaaccagttactaattttagaatgtaatcccaggacaatattaagcaaatagcctgcagtgcttcctgtgaaatagtgaaggaggagggcatttctgtattccaggacttcttggggtttcagaatgggtttgtatgannnnnnnnnnnnnngtagttttatttattctatcagtctttttaacaaatgtttattgctgcannnnnnnnnnnccagtgtatcattgttttactgcccttgtagtactggaatttagttggaagaataaaacatttacttct

SEQ ID NO: 17351 - DNA, 813 bp, Homo Sapiens
gcacgagggttacttctcactaacaaatcctatcagcatgatgccatcatgtcttgtgggctggtaggatgattgacgttcctatagactgagttatggcacagaaccagaattgacacagtgctcaggcaagatggtgaaagcaagtagctttctgttttcctgctattgggataggaaaacacgtacatgcaaacacataccacttttgtcatatcagtagctgcacaccagataagggaatgcattgacttgatatactgagtttgattaactggagtttctccttgataaagtttggtataatccactgtcattctcaaagacctatgtgtcttctgcacagggctgcacacacaaaaagagatgtgataggagtcaccaccctgaacctttcaaatctttgacagtggcattaatttttgcagttcctctaaaagatgccgtgttgctttcggttgctattgtggcagggaagagaagttcagaagcttttcttgagcccctcgaattctaacaatgctcactgcataggtcaagacacaactgtggaaattctccctgtgtgtaagtgtagatcccatctgtaaacccaggttctggcaggtaataataccacagtctccatttgtatctgacccccacgcagcttccaccccaccatcaggacacagaggtgttgagtcctccgggagaatgtccaataagtgctgagaagtccggttgtttctttttctcctcaaaagtagctgcacatcctttgggaatgggtagaataaagacttgttacctgattatgtattatgggaagtg

SEQ ID NO: 17352 - DNA, 726 bp, Homo Sapiens
  misc_feature (375)..(407): n is a, c, g, or t
gcacgaggaggacaagtggcccatttctaaattggaaggttgcttccaatttttcttcagtatacatttattattcttttaaaaacaagtgctttacttatgccagagataagcccagcttaacagtaatggaagattaagtagtcacccaatttttctaaactagaaagactaagcttctgaaaggtatttatgttcagtggtactaatgattaaaaacaaattaataaactaaattcaagcctagaaacctctaagctttctaattcgggtagaaaaagcagagggatttatagtttaatcaagaaaataatgaggaaatggagggataatcacttagacctagaatcattcatctatctaacttgtgaaaannnnnnnnnnnnnnnnnnnnnnnnnnnnnnnnnattcagctttctggaaagatgaaacaataaaacattatttgaaaagctgaagcaatgaacatagagcaaagtactgcctgtatctttgaaaatctgaaatgctattatggagaaaaatattagcatctggcttgcctgatgtattaatgtattaataacagtactaaaataaaaacttagaaactccatcatggaaattaggtaacaacaaacttgtttaaatgagacattaatgcagatacttcaaggaggactaactaatgcatgtgttttaagacattttaaagataagggtttgctttcataaaactatattttc

SEQ ID NO: 17353 - DNA, 421 bp, Homo Sapiens
  misc_feature (232)..(283): n is a, c, g, or t
  misc_feature (299)..(358): n is a, c, g, or t
gcacgaggcttggagagaaaaaagataataatataaactataaactattttaataagacgcagcgtagagacctagtactggggaatgtatcttaaaatccagtaggctcccctggccagaacaccaggaaaacacataggctttatcaaagagattgggaagaaaacaaaaaacactgtcctgttcttgcagagaggacctgagcatttaggatattctttgtggttctgnnnnnnnnnnnnnnnnnnnnnnnnnnnnnnnnnnnnnnnnnnnnnnnnnnnngacagagtctcactcnnnnnnnnnnnnnnnnnnnnnnnnnnnnnnnnnnnnnnnnnnnnnnnnnnnnnnnnnnnngttcaggcgattctcatgccttagcttccggagtagctgagattacatgtgtgtgctgcgaag

SEQ ID NO: 17354 - DNA, 871 bp, Homo Sapiens
gcacgagggggagtttaatttaacctctctttactgtatgcacagctttatactaagcaccatgggctgtagaaaagcagtttcaggattagttcgtcgctgcttaaggatttgagggaggcagagcatgttgcatttgtaggagtcagaaaaaaagccatccatcctctactgctggggacctaggctaggtggttctgggtggtagtcatattaagggaagggatatctgaggttagatacgccattgcgtctcctagtgtgcactgctttcttccaaattttcacattaatttcccatgcaattctcccaagcattgctgaggtaggccaaattggttcctcttcaaacaggtgaggaaattgagcctccgagatgaaaagtagcccaggtccttcccacccagtgctctttcttccttgccacctcccacctcccattcttacctcctaggaggcttggctgcatggcagttgttctactgcagcctctgctggcacacagcccctctgctgcctagctctttcctgttcagaaggaatggatgctgcctctggaggccaagctgctggtctcctctcttccttgaatggtcccttgattccctcagcagtggggacagtctgcagaatggggcttgctctgggtcactgttctaagagctgagttctagtcctcacctagatcagactgacatggccctcaaaggaagagcactaggttgggctttgtggtggggatcagtgtctcatttttagtcccaattaaaaatgagattttgggctgtactcagagcagtgacatcatggacattatgtctgtgggtcagcatggtacacacagctcccagcccaggtacatagtgggccc

SEQ ID NO: 17355 - DNA, 547 bp, Homo Sapiens
  misc_feature (95)..(223): n is a, c, g, or t
  misc_feature (374)..(436): n is a, c, g, or t
gcacgagggccatgtcccataattgaatctgtgctaccaaatttatattttataaatatatatttttaaaaattccagtttgtagcaaagatggnnnnnnnnnnnnnnnnnnnnnnnnnnnnnnnnnnnnnnnnnnnnnnnnnnnnnnnnnnnnnnnnnnnnnnnnnnnnnnnnnnnnnnnnnnnnnnnnnnnnnnnnnnnnnnnnnnnnnnnnnnnnnnnnnatattttattacagcaaatatatactaagtttgttggcctttgttgggcctgtttattacatcttggattttcagtgactttttttcttctacctgagtttaaaacagtgcacatgaaaggatttggaattttaaaacttttttcttgatnnnnnnnnnnnnnnnnnnnnnnnnnnnnnnnnnnnnnnnnnnnnnnnnnnnnnnnnnnnnnnngaaataattcataattctaccactcagatatcatcactcagtattttggtgcatttttttctagttgaatagatgtaaatttttaaaaaataaatttggattgtaccccac

SEQ ID NO: 17356 - DNA, 749 bp, Homo Sapiens
cctataaaaaatcccccgggctgcaggaattcggcacgaggcaactcttctatttttagcctatatttggaaagaaagcacttaacattttaggaattctttttaaagctgcttgcaaagtgttggtgattttactgaaaacttttgagatcttcattttacaggcagacctgtctaactacaagccagacttgggttttctcctgtagtttgaagacacactgactcctgacaaaatgcagcctgcaacttcctggagaacaactcagtgtcacattaaagtttattatgtatttaatgatacactgtttaattgacagttttgcatagtttgtctaactttttataattaagagcctctccactgatcagtaaaggtaaggagagctcaatctgcacagagccagtttttagtgtttgatggaaataagatcatcatgcccacttgagacttcagattattctttagcttactggttgtatgagttacatcttattaaagttgaaattaatgtagttttctgccttgataacatttcatatgtggtattacttttaaagggtcattaggaaaatgcacatattccatgaattttaagacccatagaaaagtttgaagaatgcttaattttcttatccagtaatgtaaacacagagacagaacattgagatgtgcctagttctgtatttaccgtttggtctggctgtttgagttctaccgcatttaatgtaataaaataaaatactga

SEQ ID NO: 17357 - DNA, 824 bp, Homo Sapiens
  misc_feature (425)..(451): n is a, c, g, or t
gcacgaggcttattcacaggccctacactcatacaagggcaggggaccacagaatagtgaaggccagtgagggtcacctcagaattctgcccaacaccggtgttttgtaatttgggtagatgttgccatgttgtcctccgtggggattatgcagagggaactctcctcctccaacaacagtacacgtacctgcttttccatggtgctgcttagagaatgttatcaaacctttggatttctgccagtctgataggagaaaaatggaatctcaattgtattttaaaattgtaattatcgccttatgaataaggctgagcatttcctcaaaagcataagagccatttatatacttttttctttatggcttctggttttgaggcatagaaaggtctttctagctctaaagttaatcagaaattctctgnnnnnnnnnnnnnnnnnnnnnnnnnnnactttaagtccttggatacatgtgctgaacgtgcaggtttgttacataggtatacatgggccatggtggtttgctgcacctatcaacccgtcatctaggttttaagctccacatgcattaggtatttgtcctaatgctcttcctcctctttccccatgcccccaacaggccccggtgtgtgatgttcccctccctgtgtccatgtgttctcattgtttagctcccacttatgagtgagaacatgcagtgtttggttttctgttcctgtgttagtttgctgaggatgatggttttcagcttcatccaggtccctgcaaaggacatgaactcattcttttttatggctgcatagtattccaagttgcatatgtgc

SEQ ID NO: 17358 - DNA, 808 bp, Homo Sapiens
  misc_feature (339)..(460): n is a, c, g, or t
gcacgaggggaaaattgacatctttattatattgagttttgcagtcactgagcactgcgtgtatctccatgttttcagatctttgctagctttctttcatcaagttttacggaaagggatggatgtacttacgaactctcagtggcttcatcctggcagagaacaggaatgctgcttgctctgtgaactctgcagcctcagtgtcctcatttgtggtgacagctccctcttaaggtcattgtaaagatttaaggagatgctgaatgcccaagtcctgcctccagtatatgtgcttttctccttaacttcccactcattaccttttgggccttgagtttnnnnnnnnnnnnnnnnnnnnnnnnnnnnnnnnnnnnnnnnnnnnnnnnnnnnnnnnnnnnnnnnnnnnnnnnnnnnnnnnnnnnnnnnnnnnnnnnnnnnnnnnnnnnnnnnnnnnnnnnnngcagtagctgttattacgatatgattgtagtgaggtgaaactataatttcttcctttcactgacagaaaactctcaagcagctggtccaaagagcataaacagcacaaggcaagtagcaggatgttgctgaaggtttgggacagtggagagggtttattttagcacagcagacaatatgaaagagagtatcagaaccacgtacctgctatgacccatcttttatagaaaaagaacaagaatagatatgtttgtgtttgtgtaaagccgaagaacaccccataccagactgtgggaagctggggaacttcacttctacttattccctttctgtgtttgaaagttgtttt

SEQ ID NO: 17359 - DNA, 849 bp, Homo Sapiens
  misc_feature (419)..(432): n is a, c, g, or t
  misc_feature (718)..(735): n is a, c, g, or t
gaattcggcacgaggtttatctttcttcacaacacacacatgacccaatcatttggcattaaaaccgaaaaacgaggcaagaaaaccaagaataaaaagtgaagaaatttttgtattataatgtattcaaccatttgttctgattatctaagagaaaaaaagtattaggaaatccaacttcaacagaaaaattcaaaacgcttccaaggaaaatcagaaaactgatctgcttagccagagaccagtggttcacagtgtttgattctgtggtttttaaattccaggtccttgtctcaccctaatgtcccacactccaaatgaaaccagcagtgcaccaacaatacccatccctcctcaacctcggctgggcaccgcaacaaaccaaaaacattcttggttttcttgttttaaggaaatcnnnnnnnnnnnnnnctatatgctaatcttctctatatcattttaattttagtatatgtgctgctgaagtgagcacattttacggagttttaacctaaagtttcttttctcacacattgtcatataaaaggggtatttctgctttgtcccctccctgccatcataccaaaaaataaataagtacataaatacaaattagaaaagcttaaataataccggtttttaaaacccaataaagcaagatgagacagaactagggcccgaagggactgagagaagattctaaaatggagagggaggnnnnnnnnnnnnnnnnnncgggtttccaaaaccactgaaacccatggtatgtgataactttctaaccatctggacttgggtaggagtgtcacgttttccaaagctgacttctgggaaatctttaactggaat

SEQ ID NO: 17360 - DNA, 890 bp, Homo Sapiens
gcacgaggcttttaactggggcacttaacctattcgtatttaaggttagtattgttctgtgtgattttgatcctgtcatcatgatgctagctggttattttatagacttgtttatgtggttgcttcatagtgtcactggctgacactatgaagtgtagtggctggtaatggtaactttccatatttagtgcttccttcaggagatcttgtctggcaagtctgctggtaataaattccctcagtatttgcttgtctgaaaaaattttatttctccttcacttatgaagcttaacttagccagatatgaaattctgggttggaatttcttttctttaagaatgttgaatattggcccccaatctcttctggcttgtagggtttccactgagaggtctgctgttagtctgatgggcttctgtttgtaggtggcctgaccattctctctggctgccttaacattttttctttcattttgaccttggagaatctggtgattatatgacttgggaatggtcttttcatggagtatcttactggggttctctgcatttcctgaatttgaatgttggcctgtctagctaggttgaggaagttctcctggatgatatcctgaaatatgttcatacgtctcagaggttttgttcattccttttcatttttttctctattcatgtctgcctgtcttatttcagaaaggacagtcttcaagctctgtgatgtttttcctccacttggtctattgtgctattaatacttgtgattacattgtgaaggtcttgtagtgtgttttttcaactttatcaggtcattttatgtttctatgtatactggctattttggctgtcagctcctgcattgttttaacttgattcttagctcactgggttaca

SEQ ID NO: 17361 - DNA, 577 bp, Homo Sapiens
gcacgaggccctgagccaactgcaagaatggagtttccatttattccagggcagtcattgtgctaggttttttattcaaattatctataattctcatgccaacccaacattgcaggcaagatggcagaagcaagggtagaaacaaaactctgcctgtctcaaagtcctctgcatcacacttagcagctccatgatctggggcaattatcacttttaataaggatttggcatgtgctaggcacagtgctaaaccttcttacattaatttttcgatttaatcctcaaaacaacttgatctggaaagcgttgtttatctacattttcagacaaggaaagtgaggcacagaaaggatgagttgcgtacagttgcacggtgaggaggtagcagagctcagatggggaagtactaatgtgtctttatgactccagagcccaaatgcctcgcccttacattagaaccctcaaacttattcagctggaattgcctcatctatacactgggaattatatttgccttttaacttaattatacataaattagctggcatactgtagacacccaatatcagtgtctctt

SEQ ID NO: 17362 - DNA, 958 bp, Homo Sapiens
  misc_feature (142)..(150): n is a, c, g, or t
  misc_feature (218)..(227): n is a, c, g, or t
gcacgaggacaagattcatttttaatggatttgatcgtcgggtgcaaatttgagcattatttacaagagctttctgtagagttatttctgttcaaataaaaccagactctcaaaatacaacataagcctgaacctacttgannnnnnnnnctccctctagttaccaaggaatatcgtatctcagatgcatggcctactatcacactggtctttaaagnnnnnnnnnntgcatggccacagttccaggtagctggatttagtggatttatatatgacagtacagtacatcatcagtttcacccacagggcagaacttgcctccattcaggcatctctttacaactggcagcaatgcagcattaagggtttttagccaggacctgctgtttgcagtcctgccccttgtagtgttactctgggtgttgcacactccatgattactagaagacaaacacctgaggcatgcaatctgcttggagtgcatctatttacatgaagctgctcacgggagctggtgattcttccagatatgggtttcgtaggttggcaaagagttatcacaccatcagagattttaccaatggaaagagagtagctgaagattatattgcaatgttattgtgaaacatttaactttcttaagtttaaagtgtactatctcctgcagctcaatataaacaacgatgtatttctttgtagcagtatgtggagtcagaatgggttttccaatctgatttaatccctgagcagctatgttaaaagttaactttttaaaaaagcccaataaaaaactaaatactgtattaaaactctaccacaatgttacagggataaacttatttctgtacagaaacattaaagctacttagaagctgtttacatcctttgcctctcagaaaaaaataatacatttcccggaaactgttcaggtacttaagctggacataaattaccccag

SEQ ID NO: 17363 - DNA, 567 bp, Homo Sapiens
gtttaaaaatcccccgggctgcaggaattcggcacgaggaccccttttttctggagggatgggccctctcaaggaatgctggcttcctagctctggaagatgtgcagatttttatgtgaaaactaccaaatttttaacactacagtattagtttctctcgtctcacagttctggaggctggaagtcccagacccaactgttggcagggtgggttccttctgaggccgtgtgggagattctgtcccaggcctctccccagcctccgcggtttgctggcaatctttgcagctccttggcttgtcgaagcttgacccgatctctgccttcatcttcacacggtgtcctccctgtgggcatgtctgtcaccagatccccatttcccctttctgtgaggacacctgtcatattggattaggatacacccttatgacctcatcttaagttgaccatctgcaaagacactatttccaaataaagtcatattcataggtattatgggataggactaatatctttttagggaacacaattcaagccataccaactggcagttgattttagaagttt

SEQ ID NO: 17364 - DNA, 558 bp, Homo Sapiens
aggctcacccttcaacataactatctgacagactttaaggaggccaatccaatgttctcaaacctggctgcatcatgaatcactcaaggaatttattttttatccagatttctgaacccccaaccccagagattctgacttactgggttctgggtagaacatggaaatctgtatttatagcaactcacccaggcgattcatccaggtggctctggtgcaactcttcaatgggctggtacttaggagcatccccgggggtcagagctcaagttcctcatggccaggaactgtgtaggcctcctttgcttacatctaagtggtttcccctggtcctactggaacacaaatgttatctcctgattccaactttattgcttcttctaaccatctagatatctgctagaaaaactcaagacatctctaattcttcctctttccactagagatttaaatgcatttttttcacataaagatggactttaatctaattgtagttttgtatgcgtataaatgcccaaacaaggagccaagttgggaaatatggccctgtgttgatgt

SEQ ID NO: 17365 - DNA, 471 bp, Homo Sapiens
  misc_feature (245)..(313): n is a, c, g, or t
  misc_feature (344)..(371): n is a, c, g, or t
gcacgaggggccatccgaaaatagcaacaacccagactggctcctcactcccttttccatcactaaaaatcacagagcagtcagagggacccagtaagaccaaaggaggggaggacagagcatgaaaaccaaaatccatgcaaatgaaatgtaattggcacgaccctcacccccaaatcttacatctcaattcccatcctaaaaagcactcatactttatgcatccccgcagctagacagatatnnnnnnnnnnnnnnnnnnnnnnnnnnnnnnnnnnnnnnnnnnnnnnnnnnnnnnnnnnnnnnnnnnnnngactgcttccttatagctggacttttatttnnnnnnnnnnnnnnnnnnnnnnnnnnnntccctaaacattcaccttgaccttatttatgactttacgtgcaaatgttttgaccatattgatcatatattttgacaaaatatatttataactacgtatt

SEQ ID NO: 17366 - DNA, 217 bp, Homo Sapiens
  misc_feature (135)..(143): n is a, c, g, or t
tcctcctttcctttcttcctcttttacttcattcactactgtattccacataaaatatatttggcatatattaggtgttcaatatgttgaaggaatgaaagaatttatagacttgagttgcattatataatgtannnnnnnnnactgtgatttatggcatatatagttttgaaagcctcttctaaataatgcagatgtcagtgctttgtatgaccct

SEQ ID NO: 17367 - DNA, 459 bp, Homo Sapiens
  misc_feature (173)..(181): n is a, c, g, or t
ggctgcaggaattcggcacgagggttccccgataggtgcccaatttgtcaattttttaatgattagtgctttttccatacatttttataaggtaccggttcttaatagctttactgagatacaattcacacaccatacaattcatccatttgaagtgtacaattcagtggggnnnnnnnnnggtgtattcacagagttctgtaaccatcaccaaaacatttccatcactcccaaaagaagtcctatatatctattagccatcattccccctaaagaccaccaacagtctgctttctgtataccagatttgcctattttggacatttcatataaatggaattatatattgtggttttgtatgcctggctcttcacttagcacaatgttttcaaggtttacatattttaagctgtatgtgcttctttttattgctgaataatattccattgtatgggcata

SEQ ID NO: 17368 - DNA, 617 bp, Homo Sapiens
  misc_feature (48)..(68): n is a, c, g, or t
  misc_feature (383)..(395): n is a, c, g, or t
gcacgagggccccctaagaataggtgttgtgtttttaaaggattgttnnnnnnnnnnnnnnnnnnnnnggaagaagaaaccaaaaaggagaatgtgccacagagaccctctgtggccccaaatcccggaaatgttcctcctccagttttacagagaaagcttcagtgtctggtcttgtcggtggaccccgaatggaataatcaaggggtgaagcatttttaaagaaagccgttttcctatttagtaataaccctagaacagagtgtccccccctggtgctgttgacgttctgggccagggccttctctgctggaggctgttctgtgcactgtggtgagttgaaaggcatccctggcctccccctataagatgccagtactgtnnnnnnnnnnnnntgttgtcccaagcagagatgtctcccgtcattgcccagtgtccctggagggtgcagagttgcccctggctgaaaatccccaccttagaataattcatatattacttattacagacatttattgcctaactctcacctcttactggaacgactcttaggaacagagacggcttcacttcaggcacaagtctccgaggacactgtaatgggacaaagagccgat

SEQ ID NO: 17369 - DNA, 654 bp, Homo Sapiens
gagggtccctgtgttcgtgtcccaccgaacgtcctctatgaagaccttcaggtttcctcctcctcagaggacagcgattctgacctgcagtgagactgcaggtggcaggggctccttggcctccagctcccgtgacttggaggggactgtgggactgaggagcgcagagcagagagcagactctgtgcggtgactccgaagctccccggctgtggcgcttctgtggatgtgggagcccaggccaggcagggagcagatgcagggactctgcctcattgaattctggtgagggacgttgtagttggcgtggttctccggaaacacgccaggaaaagcttccgtgccagagattcgttgcctcagaaactgcgtgacgcgcaggagtcagacttccgctgggacgtcaataggaaactggggaattactgtgtatttgctctctagatgactgaataagggaaaagttagggaaccctgagaggtgcagcccttccgctgtgccccgccctgagagcagtgtttcggacgctgggaagcgtgctgtgcgaagcgctctcggggtctttcctcagcctcgaaaactgggctctggaatgcctttgtaaacaggtgtgttgaatttgttttgaagtgaataaaattctcaaaaagatg

SEQ ID NO: 17370 - DNA, 712 bp, Homo Sapiens
gcacgaggccaaaatgaacctggctgttggagttcgcttaactcacccatgtggccacgcagctctcgctctgagtgaggacagactgcgtgtgggggctgtgggcgcctgtctccctccctcccaaggctccggtcgtgggctagtgggagaaagtgactgggtgggaccaacgcgacctcctccactggacgctctttacacgggctgggaatggcagtgggcttgcatgtggcgtgtgccacctctgctcatgcatgctctgtggtcacggagaactttgcttataaaagaacatcttatcaaaggtgaaactgttcagaatgccaatgatggggacagagcgttaagcccaggacatggctgcgtgcccacaaagccagctctggatggaaaagtaacgagtggagggcgttttcttcccagacccggtggtccagccgtgagtgtccagctgcaggccccacagcagccagctctgggcgaaaatctagagggcccctgcgcaccctcccgcccggggtgccctggcccagggtgcacctgtgctctggaccctgggccgtgcggggctccagggcgcctggagactgccattttgtgtgggaaggtggaggcgacttgggaatgcgtttctttagattttaaagatgagagagtgttggccttggacaggaaaaattccaatttggtgagaaatggaaatatccaa

SEQ ID NO: 17371 - DNA, 873 bp, Homo Sapiens
tgagccactgagcctggccacatatgaatctttgaacacgtcttcccttctcccggctcggctgtttgccacacgtttgtggagtggctacacgacttcacagtgatggatgagatccagctgttccacatcctcatgccacactcagggcttctgaatttcagccatgccagtgggaccacagtgtcggctccccgtggctttaatctgccttctcctatgactggagatgctgggcgactttccatgtgctcaactggtcattccatccaccttggcgaaacgtctgtccggatgctctcccagtggttaactggccattccacccatcttggcgaaacgtctgtccggatgctctcccagtggttaactggccattccacccatcttggcgaaacgtctgtccggatgctctcccagtggttaactggccattccacccatcttggcgaaacgtctgtccggatgctctcccagtggttaactggccattccacccatcttggcgaaacgtctgtccggatgctctcccagtggttaactggccattccacccatcttggcgaaacgtctgtccggatgctctcccagtggttaactggccattccacccatcttggcgaaacgtctgtccggatgctctcccagtggttaactggccattccacccatcttggcgaaacgtctgtccggatgctctcccagtggttaactggccattctacccatcttggtgaaacgtctgtccagatcccttcccagtggttaagtgggttgtttgcttagtatgggagattttacatactctggtcaaaggtccttcaaatcagaggagggctgaaaattttttagtcctttgaagagtatttctcc

SEQ ID NO: 17372 - DNA, 717 bp, Homo Sapiens
gcacgaggctaaagtgtatgagcttgggattttcattgaatttttaaaaaatcttcataggtttctgccgaagaagcagggaaaaccatggtgcgggagcttgttcataacttcctgatggatctttgctgttcactcaagcatggaattaatttttacgatgcatctttgggtacctttggcaggtaaagtataacactcttgtggaccccagggtgtgtatgttcctcagaagtcaccacatatgtgagtgtctagtggaactgtagtaggttagaactagaattgtggacattatctaactcgtttcagggttgaacagttgtagtcccagagaacttctccttgttgcatgtcctcaggggcagttctgagggtagctgtctattagcacttagttaggtcatgggatatttcacccagggaggtgctgcggatgtttacctaaagacagtgttcgtcagctggagctcagaaaaggcgtctgccttgccagagagggttggccctgacatgggcctcacagcagtcctgacgcaggtaccattgttatgccagctttgcagaggaagaaagtagttctagagaggtcgagacacttacactggttaaatggcagaggttgcactggaatccaggaagtccagctccaaactgatactaaaacagtcctccctctccttgacaggctgcccatgagtcacggtttcaaaattg

SEQ ID NO: 17373 - DNA, 971 bp, Homo Sapiens
  misc_feature (46)..(421): n is a, c, g, or t
  misc_feature (472)..(510): n is a, c, g, or t
gcacgaggcccattgtagcctgagctagtgttttaggtttactttnnnnnnnnnnnnnnnnnnnnnnnnnnnnnnnnnnnnnnnnnnnnnnnnnnnnnnnnnnnnnnnnnnnnnnnnnnnnnnnnnnnnnnnnnnnnnnnnnnnnnnnnnnnnnnnnnnnnnnnnnnnnnnnnnnnnnnnnnnnnnnnnnnnnnnnnnnnnnnnnnnnnnnnnnnnnnnnnnnnnnnnnnnnnnnnnnnnnnnnnnnnnnnnnnnnnnnnnnnnnnnnnnnnnnnnnnnnnnnnnnnnnnnnnnnnnnnnnnnnnnnnnnnnnnnnnnnnnnnnnnnnnnnnnnnnnnnnnnnnnnnnnnnnnnnnnnnnnnnnnnnnnnnnnnnnnnnnnnnnnnnnnnnnnnnnnnnnnnnnnnnnnnnnnnnnnnnnntacccttggccaaaaggaggggtccatttcattggttggggaatttagaannnnnnnnnnnnnnnnnnnnnnnnnnnnnnnnnnnnnnngttacaaatggggttcttactctgttacccaggctggattataggcatgagtcaccgtgccaagctatatacatatttttatgccagtaccacagtcttgattactctagctttatggtaaattttgaaattttgaaatcatgtaagtccttgaactttgttctttcattaaatcatattggcttttcttggtcctttggatttaaaagataaattttaagttcatcatatcaatttcttttaaagcaaaccctaatggtatttagatagaaattatattgaatctatggatcaattttgggaaaactgacacctttgatgatactgtattttcctatttgcaaacatgggacatatctccattttatttaagtcttaatttcctttgacatgttttataatttcagtgtactgtcctgtacttctttcattaactttatttctaaatcctttattctttt

SEQ ID NO: 17374 - DNA, 288 bp, Homo Sapiens
  misc_feature (46)..(96): n is a, c, g, or t
  misc_feature (128)..(138): n is a, c, g, or t
tttctttttaacccctgtcttgaagggggaaaaccccggaaaaaannnnnnnnnnnnnnnnnnnnnnnnnnnnnnnnnnnnnnnnnnnnnnnnnnnaaaaaaagcggggggttccttcccttttttgnnnnnnnnnnngggacccccccgggacttgaataactgcaaaagaaccccggggggcccaaatgttttcccccggttgccccttggcatcccctcttccccccaaggaagggacccaaaggaaaaacccccaaaaattcaaaagctttcggggtttacccc

SEQ ID NO: 17375 - DNA, 873 bp, Homo Sapiens
gcacgaggaataccaaaacctgaggagtgggcaatggtgcttctgtgcttttcccccttgtaacccatgtgccagatgtgtggaatttttagctcagcattgagagaataaaatgtcactacctctcatcttatgaacaggataatataattctttaacagctataggttatctggctgaagtagacctaattttatgtgacttgtggtgtaaaatgtcttgatgataatttttaaaacttgggtaacacttccaaatatgggaggaaaggacagatgtgtttacaagggaggattttacaacatacttgctttattcacctccctgttttgtgttgcgtctttccttgaatattttattggcccagagttagcctttctcaattatgtttccagactgtggccgtgattctaaaggaaaatgtgtgctctttagtgggtagaacaaatggaaatttggtttcagaatggctgacagaaatcgacataagtcatgtaatttttgttgatatatcatgaaaatgaacagaattctttttccatacttatatctaagaaaaggcatcataggtttctgaaagagataactatataacagctttttaactatccagtcaactttcagcttttctacatttaggtaaaatggttaggatataactcatggtgtggctaatctacatttatcaataaaatgtaattatctgaaaggacagaatataagatttaaccatgtttgacatattttaatttagttaatgaagcaaatttcagtttatatttcaactagaactgtgtacttgattgattttcagagaattatcccaaattataatattatatctaagggatgaaaggtatatataaaacattt

SEQ ID NO: 17376 - DNA, 912 bp, Homo Sapiens
gcacgaggctttgttctggggaagaggaatcaaagagcttctgtaacacagaatttgtgctacatagcacatatctcccataagtgttatttttattttttggaagggagtcttttaagtattgaacttcaaatcaaggtaaaccttgagggagaaaagaaagagtggataaaaagcagtagaagggatgggaatgtattaaaaggaatgaatgctaattagctatatgctcttccttcctctcagccagccatctgggcaacaagaaaggcttactacagttagataaatttaaccccttctctgacctggcaaggacaaagtacactggcttctgaagaaactttttcttgggagcaaggtagttatttcaaagcacagaaaaaggcggcggggggcacagagaagcacagagaagcgggggcagttgcacaggttgtttattctgttgatggatattggactggagtgatgagtgttctaggatgggtatttgatgatgccaggggactcaagtaatggctttgcatgaagattacacagtaaagctgcacattgattacctcatcttattagctgatggagatgtttgagaggacaagattgcagggctttcaagcctgtacagctaccaggatttgatcctaagagcttgatcattgtcattgcccatagggactgtgttaagaatagtggtggtttactactttaaatgcatgagagtgttataacagttcccctatgtcttttgaatgtttagataaggttaggactttcagatcaacttgagttttaattttaacatttatagaattctaaaattatcctggtttgtttttgtcttcctcactaaaatttaagttggctgaggtagacagttttggtttctggaaccctatccctccagcggct

SEQ ID NO: 17377 - DNA, 875 bp, Homo Sapiens
aatgctgaacattattttggatgctagctgcttggacattaactgtgttatttctgctttgagatgaaaatatatatttatctttgcttattttatcccagatgtgttctgaatatccttcttcataaatcatggaaaactcactgctgagatagtaaaccatgaaatcgccttttcagttggtgccatgtatctgacagttccatcttggaaggtttcaaaattaccttttaaaatgatctcagaagtctgtagattctcaatgatactgaaagctttgcacctctttggtagaaaccaggtctatttagaaaatggctttatgataaatgttgcctcctgagtgataatgaagtgttcctggatattgtattgtaatttaatgtgcttaccacactgccacattttaatgagtcagagaaaaattaatttttcttcaatacaataatagaacaagtagcctattctcttaaaaagtatgtgaaaagaaaattatgaagaaatatgcatacctaatgaagtattggttttagtaagaattaaatacatttcattgagctttaaagtactttggagaaactttggggcacgttttcctactctaattcaactaaagttataaataaagagaaaaactcattcagaaatcatggattttaaaaatattttactgcagccaagttttcatttcaaaatgtaatttcagtttggagcttttaggcattatgtatatttaaaaaatatattcttcaaaaatgcattttggcatggtgggatggatgttgcaaaagatatccggagtctccagtctgtcattaactgatatggtaaatcacctctcttctttgggtctcattttttatttatctatatgg

SEQ ID NO: 17378 - DNA, 486 bp, Homo Sapiens
gcacgagggcaccgctggctgtgatccacagtcccacttccttctctgtaaagtggttggatacacaggtcagggtttattaacagtacaggctctgacgcaagcaaacacactcagtgattaatgctaatggtaatggtggtgcagtgatgaccgtcccttttcaacactgccacctccccctgcacatacatcgtagggacaccagtggctccagccgttcaagtctgggtctttgcctgtggtgcccccagggcatggtagtgaaaggccgggctccggaagccacctttatctgaagcgtggaaatgtggttccaggctgcctgtcccaacagcagacccatccacctggccggtggggattgatctgatgggcacgagggcccaggagcatgttcccggcctctctggatcatggactgctcttgatcaccgaacttgaccagccttatcacatctgactgtatttccctttctgtaattc

SEQ ID NO: 17379 - DNA, 305 bp, Homo Sapiens
  misc_feature (47)..(74): n is a, c, g, or t
  misc_feature (189)..(242): n is a, c, g, or t
acctaaaaaggatcccccgggctgcaggaattcggcacgaggccagnnnnnnnnnnnnnnnnnnnnnnnnnnnngccccttactgggtttaatataagtgtcacatgttttttataataaaacatatgtgatttccccttaatggacaaactctttttcttattttgggaccaaatctctctctgtcannnnnnnnnnnnnnnnnnnnnnnnnnnnnnnnnnnnnnnnnnnnnnnnnnnnnngttcaagcgattcttgtgccttaacctcctgaatatctgggattaaaggcccacgcctccacc

SEQ ID NO: 17380 - DNA, 816 bp, Homo Sapiens
  misc_feature (466)..(481): n is a, c, g, or t
gcacgagggtttttatttttacttaagcacaaaaattgagacgtaacatatacatttgtacatagaggggaaaaaataccagaaaggagttcataaaaccccagccgctgccagtatcattcagtggctggggcctgcggctgtctcgggcccagagccggaggctagttttgtgggaaggcaccccagtccacacacccactcggcagcctcgagggacagggtgctggttttaagggtggactcctacgtgtcccatcacagtgacacaccccccagggtgtgaaccagactccactgggtattagggggccctccgagagatggcttatcagtccctgctgagggatgcggttctggactggctggccctgcccttcctgaaagtctggatgctgctgatggggagcatgggcggggcaggtggcatctgaggcagagacaaaggcagccgtccctcggttcnnnnnnnnnnnnnnnntagtcacagcaaacagggccaaaccaaccacaccaggacaggcagaccccaccctcctagaagacgctggacgctaggcaggacagcttggggtcagtgtccttggtcccttccagtccccaaatcccaaccaacggcattgtacattcagaaagtctgaagagagtaaggctcagcaagggtagggctctagagggctcaaagtgccatcctctgcaggagggtgcagggagataaagggctattatctcgtttctcatgaacacgatgcagggaagagcttaagcaccagccttctctggattctgtttatgaggcagagagagggggggccc

SEQ ID NO: 17381 - DNA, 535 bp, Homo Sapiens
  misc_feature (153)..(207): n is a, c, g, or t
gcacgaggcaccaccggcgtctggacttggatgcctgcaaagcgaggctgaagaaggccaaggctgcagaagccaaagccacgacggtgcctgactttcaggagactagacctcgtaattacattctctcggccagcgcctccgcggtaagcnnnnnnnnnnnnnnnnnnnnnnnnnnnnnnnnnnnnnnnnnnnnnnnnnnnnnnntgcctctgactgcacaggagctagaagccagcttgggtaaggcgggggcactgccatgtgatcaggtcagtcctgagacactggggaggggcagcagccctttcctctgtccacggcctggccccggtgccctgtggccatggagctggacttgtttccctctgcaaaacgctggagctggcggcagggccagccacactgattagtgtggagaactctgggcggcagctgtcccttccctagggcccctccacctcctgctgtctctgaatgctaggccctggggaggccctgaggatagaggaggaggcctggccgtgcctttctg

SEQ ID NO: 17382 - DNA, 245 bp, Homo Sapiens
cccccgggctgcaggaattcggcacgagggttcttcaaaggattttggcggggctaagggtcaagttttctgggcaaattttatagatggcattgtaagcaaccatatccaacccctggtttttggatgggtgggagaatttcgtcataatattgctgtgttttcatagattgtcctggctctaacttcaaaataactctttcctaaacaacgtgctacaatgtggttcatctttattgtatatt

SEQ ID NO: 17383 - DNA, 210 bp, Homo Sapiens
tttggttatttttctcccaattcgccctatgtatccgctattaagagcgctcctggacgttgctttacataatattgactgggaagagtatgacgttacccaatttccgtgtcgcccttatttccttttttgcgccattgggccttcatggaataggtcccccccaatccctcttgacaatagttgatgctgatgattggttgggggcac

SEQ ID NO: 17384 - DNA, 831 bp, Homo Sapiens
gcacgaggctgggctgcccttccttttgggttttcacaaccaacagctggatagtctatctctctaggtttgggctcttgtcaggctgggctggtgatccacttgcagtagttctggagttagtgcccaacacaaatgcctccttgagccaggcagatactataaatgagtgaaaagatagggagttgggatggatgagaagtggtgaggactgtggcaaactggggagatgtgctctacctaagacgcacaggagttaatcaactctggccaatgattttctggctggaatgaggacccagcgttacataaaagaagttgtgatatctcttgactttaaatattgactcagtacctttgttaaagataatgtggtcctaacagtattttaagctgttttatgggctaaccagaacactgattagaggcactcaaagctgctcatttgaaaaattccactccagagagaattttcctgacttccatggctttctgcatatcactgtaggctcctccaaaagttgatccaaatactactgggatggagagggtcacaggtcaactcagttctgtggttggttgggctgctttggatgctaagaagcctgcagacccgcaggccactgctgatgagaatcaggtaagagcttaaaaccaaggcatctgtacagaaattgacctgttagaactgctcagggaaaaattgacagtgagaacgcatgtcagtggatgacatgtgaagtgtgagttaagtgtgcatatgagatcagtgtgtagatgagtagaaagagaaaagaggggagaatgacagtcatagtaaattttttaaaa

SEQ ID NO: 17385 - DNA, 357 bp, Homo Sapiens
cctatagcctaccgggacccgacgcttttcagggcatttctccctccagccagggcccaactcccacctgcctgggcgaatctcctccaaggaagtcccaggaggatggggaccaggaaggctgtggacccccatctccagggggccttcccagcctgatccctgtcctccaagttctggaggaggccggtgtagggtctggctgaacttcccacccactttccctggtcccaatcctttcttgtcctataccaagctggggttgctgccttgaacgaactgcgtgtgttttcgtcacatcctatcaggcagcccctggcgtctgctgcctcaggtatgctccaaccaccctcgttc

SEQ ID NO: 17386 - DNA, 687 bp, Homo Sapiens
  misc_feature (253)..(263): n is a, c, g, or t
gcacgaggtcccaatgttgttaatgctctgtcttccatttgttctggaatcctacgtgttggtctgtggttccatgcattagctgtttgtaaataatgcatttgcatactgaaaaaggaatgccacctgccacagttgatggtgaggaagctcctttgacgtggtgcaattttgatgagatgtctctggggacacgaggatgccctaatgatgctgacttgtcatggttgcagcatttgaacttttggtgttnnnnnnnnnnncctgtaagtctgtaacctggcaacattttacaaccctgtatttttaaagatggctttctaataaaaaatccagaaccacacagccctatggtcaaacaatcctacgtttgtgcctctgcttttaaaggtgctgtgctggacagttggcatgccagggttcgagaagagtgaatggcttgacgtacttgcagttaactgtgcaaaattggctggctgcctctgttcctactgtactgtaactttgatcatgtctgttcctgttccattctcccaggagcttctctgcagactgacacaccctcccccaccccgggtagtggagatgctggtgtctgggtagtcatggatttctgctggacatttgaatgtgataaacaatccagcattacttaggaaatgctacatgcggaatgtgcacgtttcc

SEQ ID NO: 17387 - DNA, 816 bp, Homo Sapiens
  misc_feature (122)..(131): n is a, c, g, or t
  misc_feature (502)..(519): n is a, c, g, or t
gcacgaggcactaaaaggtcaggcctaggggaaaagtaccctggtggaaattatttttgtaattcttaatatttttgagttggctccgtttgtcagttttaaaagcctcaaaaattatgttnnnnnnnnnntccagtgaaatcccatttagggcaggccgatttgttagaagtcactgatgctccagtaggcttttgttataatcaggcctgtttcctgagtatgtgcctcttttaaaagaagaaataattagctgtatagtatttcagtactgatgaatgaatgaatgaatgaatggcagttagtggacccaaataagtattcagtggtatataaatatttgaggaactaggtactgaattaggtgctctgagttggcaccccgaaatgtttggaatcacgactatgatttacttaaacacgtaacacattcaaggatatataaatggagtctaagtattttgcttttgaagagaataatctatgaaatggaagacttgannnnnnnnnnnnnnnnnnagaagtaatacacatttatgattgttggcacataaaactatgcaaaataattctttttaagtatctgtaagaaagaattggcagtttaaacggattttgcttatttatgcactacagaatgcagcatactgtattactgttgaggctgcttaataagtttaccaatgtgaaaagcagatctttgggtataagtgtatgcctgatttgagctttttaaactgtgcagtatgtgtatgggtatgttttaccatcctatgtagcaaatagggaattatgaatttttgtttgtattgtttt

SEQ ID NO: 17388 - DNA, 786 bp, Homo Sapiens
  misc_feature (87)..(97): n is a, c, g, or t
  misc_feature (140)..(149): n is a, c, g, or t
  misc_feature (173)..(350): n is a, c, g, or t
  misc_feature (557)..(567): n is a, c, g, or t
gcacgagggccagaggagcaggggccagagcctctgcccatctccactcaggagtggtgactgaggtttttatgtagaaggggaacnnnnnnnnnnntatctgaattttgaaaaaccacaaagctacaaactgaccctcnnnnnnnnnngagacggagttttgctcttgttannnnnnnnnnnnnnnnnnnnnnnnnnnnnnnnnnnnnnnnnnnnnnnnnnnnnnnnnnnnnnnnnnnnnnnnnnnnnnnnnnnnnnnnnnnnnnnnnnnnnnnnnnnnnnnnnnnnnnnnnnnnnnnnnnnnnnnnnnnnnnnnnnnnnnnnnnnnnnnnnnnnnnnnnnnnnnnnnntaaatgaccctcttatttttaacttggatacctgctattctgccaaaagacaatttctagagtagttttgaatgggttgatttcccccactcccacaaactctgaagccagtgtctagcttactaaaaaaagagttgtatataatatttaagatgctgagtatttcataggaaagctgaatgctgctgtaaagtgctctttaagtcnnnnnnnnnnnaatccccttctaatgaatgaaactagggggaatttcaggggacagagatgggatttgttgtatgataaactgtatgtagtttttagtctttctgttttgagaagcagtggttggggcatttttaagatggctggctactcttgttttccctcatgatataaatttgtcataactcagtaacatgaacttgcccctagaggtagttgttaataattttga

SEQ ID NO: 17389 - DNA, 319 bp, Homo Sapiens
  misc_feature (163)..(275): n is a, c, g, or t
gcacgaggcttagatgtcagacatctctgccttcagatctaattatcacaggattcagcagatgtgcattctatgatgcaccatgaccttcctccttaattatttttacaggttcttttaaatttatgcaacaaaaataaaattgtgttttatttcttttgcnnnnnnnnnnnnnnnnnnnnnnnnnnnnnnnnnnnnnnnnnnnnnnnnnnnnnnnnnnnnnnnnnnnnnnnnnnnnnnnnnnnnnnnnnnnnnnnnnnnnnnnnnnnnnnnnnggggggggcccgggacccaattccccctaaagggagtcgaatta

SEQ ID NO: 17390 - DNA, 411 bp, Homo Sapiens
agatataaaggtatttggctgatttcgtctattgtttaaaatgagctgattaacaaaattttacggcgatttaacaatataaacgcttacatttatgtgatactttcgagatgtgcgcggacctttatgtttattttctaatacatcaaatatgtatccgctcatgagacatactctgtatattgctcatatatggaaagggaaggatgagtattcaaatttcatgtcccctattctttttcggcattgccttcctgtttgctcaccaaatcttgtgaatgtaaagtgcgaatacagtggtgcagatggatacaatcactggatcacagcgataatccttgaaagttccctccaagaaggttccatgatgacccttttaattgctgctatgggccgggaataccgaaatgg

SEQ ID NO: 17391 - DNA, 333 bp, Homo Sapiens
gcacgagggggaaacctccttttgtgcctcaacgtggggtggaaaggagaattcatccccgcgtgcgttgtatgaaggatgcttctgacgcctgtggttctgatcgcctcgctatctcctcccttctcctccggagatggggggcccgctcctgcctcacctcctcactctggtggtccctttaaccgcttgactcctggtcatgcttcacctctcctctttatcccgtatcctcttctctggtctgagccagcgtcattccctctaccacaggtcactcctaccccctacctctcccacctcttgctcttcaataaaatgatcttaaactgc

SEQ ID NO: 17392 - DNA, 880 bp, Homo Sapiens
  misc_feature (742)..(752): n is a, c, g, or t
gcacgagggaaagaaaagtttaagcctgagtaggcatagagtaaaaaatgcataatgatgcattattaatataagagtaaggctttttttattttgagtatcctaactccaaacctagtgttcttttcactccattatcctgctgtttatagcaaatcaagacccataatgatacgtctttcatttatttcagttctgccaaggaaagagaaaataccttttaatcccagggaaaggattgcaatcaccacattataaggtatatggcgtggaatgcagaattctaaatactagaagggaaaagtagttggcagattcatcagaggcttaaggataagtacttgtttccaatttaaaagtataattaggattgtctttaatgttctctagaaatactataattaatctagagatctatcaatggtcacatctcagtttttttcttccctgagattcaaagacgtgtaataccaatacttcagattcctatagtatttgggactttgtagactagtgaatagatactttgttgctagtccaaatcctctgattttggtttgatttgtcctagcagatccctgaacttcagagagtattgccatttggattcatggagttggcgaactgctacactgctaccttgtgtatggctctaagctttgatcctaaatgactggttgatgatcatgataatattagggccagtgaatatagctcatagtgataataaggattctagggnnnnnnnnnnncttttagaaaaagatcctggaagtttatttgatctgacatggtttttgtaataattaaaaatagctcttgtatcataaaaagtggcccagtataagacacacaagatgtattttttccctggggaaaa

SEQ ID NO: 17393 - DNA, 734 bp, Homo Sapiens
  misc_feature (661)..(683): n is a, c, g, or t
ttttgtggaacacctattttctcactgacatgaaaaatgtttcaaagatgaataatgtccatcaagctatggcaatggaagtgaggatgataaaggattgcacagttgttcacaacctcactgttagtatcctgctgagatagttggtctcctcatcactgtagcatcttttatgtacagcagagggcagaagctccttggcatgtatgtgagggaaccacatatatggaaggctgttattcctgagaaaggaggatgtgcagacactcacagaacaaagcctttgtaaaggaaaggcggccgatgagatggagtgcttccttcacctgtggtgggtctgtatccatgaaatcgcccactcacaatcgctttttgtagctactggaagcactaggcgtctgacctgccatcatccttgttatgatgtcataatcatattctgtccgtgtttattgcagttctctggtttgtctggagtgtttgcaagtcagtcatcatagtggcagcttccgcctgctacaggatatttatatatggaagcataccatggcaggagtgctggaaaggtggtgtcagctaacagttgcttcagccagataaggacggtaacttcagtccaataaaaaacctcatcagttaccaactaaatcaaggcatggtnnnnnnnnnnnnnnnnnnnnnnnaaagcatagttttagtatatatttactaaaaaccttatacttatgaaaaaa

SEQ ID NO: 17394 - DNA, 672 bp, Homo Sapiens
gcacgagggccattaaaaagttaagctactgaccctgaagccaagggagagctggccatgcagctgcaggtgtgggggctgctgaataaggccatgtctcatctacctggtgtctctcgagtgttcttccagctccctgccccacatccacccactccctcagccctcagttgggctggaacctgacactgaacacgacaaaggctgacccccaaatggttttaaattacagtaaaacaaaaacctccttctaaaggccttaaaaattggataatgacttagtttcattcaaaggatagattttaaaagcctcttatagccatagccagacctagagaccactcaaatccataatgatactggaattatagaattttagaactggaaagtatttagggggataaaaatccattaatctagtcattttacagaaaataaaatgagttccagaaaagcgaaattatttacaaaagtcacacagctaattagctattagagctaggactagaatttagttatcttgactcaagataacctgcttttgaagtatccttttattacttagttctgtgaccttgctgagattttcttatataaaagattggaaatatgtaaatatttaaattttattcttaaatactatttattaatacagagaaatactcctgctat

SEQ ID NO: 17395 - DNA, 1032 bp, Homo Sapiens
gcacgaggcaatgactgtatatttagtcaccacctcaaccactgctaagctctcttcatgtctatctgtaccagtttcccatcttagactgtgatgtcaactggcaagggctggctgttggccgattcaccatgactgacatggtgcatgttcacttgtttttaaagcagattgtacaaacaggagaaacaaacaggggaaactgtatttccagtttctttttgttaacagcctgttgcctcacccatgcaaactcttctagctagtttaaggctacataatcttattgctaatcaaccagcaaccatacctatcactctccaaaattataagttaatacttatggacaaaaaccactattgagaactttgcattcaaacagacaagagtcgaatcaagtctttgtacatattcaaatatttacatgtggaaaagattaaataacctttctaaattatgagttacctaaaatgtatgtgtgcctttgaaatggaggatatgggacagcttgagaggctttgcttctcagtgtgtattgataaatccatgtgaatgttattaccaacccccaaaatacaataatagtatgcttaacatcttgctattattagattatttccccaattttagttatttcctagcaactttatttaatgcagatctcttgcaaagaaagccttacggaaaagaatgattctaatgactttaaactgcaagtttaaataacagatctttatcttttcactatacaacttgatgtatcaatcctgttctcaaagttttcttcccaagttatggaaaccattattccagaacattaagacattagcaatacaatgtgccagcacagttttaagtgttgtcaccttcacactcctgaaggtggttgctgtcttcatttaagagatgaagcattccaagtggaacctaaaataacttgcccaaaatcccgggctggttccaggggtactcatcttaatctctatgccctaatgctccaaaacagcttttcctcctaaactaattttcccc

SEQ ID NO: 17396 - DNA, 332 bp, Homo Sapiens
acaagtacaacaatttttaaatgttttatataatccaagatataaattatcatttctatacataactgatgtaagaaattaatgatactttaaactcttttgtttatactaagtctgaaatccaacgtacctctgcacagacagtacaaacatctccatttggaccagccgcatttcaactgttcaacagcctcacagagcctatggctcctagactgaaccacacaggtcagcacagtctggagtattcagactaagtcaacaggagaaaaagaatgagatattttgtggcccttcccatcttgtcacatcaagggtcaaaaactgaaatc

SEQ ID NO: 17397 - DNA, 781 bp, Homo Sapiens
  misc_feature (471)..(484): n is a, c, g, or t
  misc_feature (487)..(711): n is a, c, g, or t
ttatgtttctgttaaccatcgctaatttagactattctattaaaatgctgtgaaagttgatgctacagcaaatttactacttccttttaaaaaatatcttaataccttcctttttgtggtttcttgcattagcatcctctacaggccataattctttgctgttgctgaacacagaaatttggggttttaaactcttagtggtttgtgatgcttttcataccagattgttaagaaaattggaatcctcatcctttaaaatattatcttttgttatttgccagcatgtccggtaatcagaaatggcatttctttatggctttgttctttgagaactttaattgttgttaagagaatattagaagtgtttactataaatatcttgaaatatttgggaaatattttggtttatttcagataaactgctagtgtatgtttggaatacgttaaatgcataaacttactgctttatannnnnnnnnnnnnnggnnnnnnnnnnnnnnnnnnnnnnnnnnnnnnnnnnnnnnnnnnnnnnnnnnnnnnnnnnnnnnnnnnnnnnnnnnnnnnnnnnnnnnnnnnnnnnnnnnnnnnnnnnnnnnnnnnnnnnnnnnnnnnnnnnnnnnnnnnnnnnnnnnnnnnnnnnnnnnnnnnnnnnnnnnnnnnnnnnnnnnnnnnnnnnnnnnnnnnnnnnnnnnnnnnnnnnnnnnnnnnnnnccgcccgctctgctctcaaagtgtgggatgacaggtgggaactactattgccaggcgctttatattcttt

SEQ ID NO: 17398 - DNA, 937 bp, Homo Sapiens
gcacgaggcagcaggggcgatgggaacctgcagcggagagcttctcagaaagagctaaggaagagttttgcccgctccaaggccatccacgtgaacaggacctacgatgaacaggtgacctcccgggctcaggaacccctctgctgccttgcagcagcacagagaactcaaatgaggtgcaggtcccctggggcaaaggtatcattggctatgtcggggagcatggagaaacggtcaacattcctgatgcctaccaggatcgacgattcaatgatgaaatcgacaagctaactggatacaagacaaaatcattattgtgcatgcctatccgaagcagtgatggtgagattattggtgtggcccaagcgataaataagattcctgaaggagctccatttactgaagatgatgaaaaagtaagatttcatgccttttgtgagttgtacttttcttcttggtcattgattgctattctcctttaaaagacaggaattatgtgaatagctgttggattagcccattcatggatcaaagagctttttctcatggtatacaaaatgaaatgggagtttttcgatatttcatagaatgtggtaaaattgaaaataattacttcatctttttttgtagcttgcttttcattataagcctcggtagtattcttgttgttccctggtctttgtcttccttataagtaagataaggatcacaactccaccacacatggcctaagggaagatagaaaatataggaagattgctgtgtttcagaaactcagcactttctcctatatttttataactacaacaaagatttgttttctcagttcctatataaaaatctcaataaaaacgaatgttatttaattgttatttcaattgctaataaaaagaacatttacttttgtccctgaagagtaattgacctggtggaagta

SEQ ID NO: 17399 - DNA, 912 bp, Homo Sapiens
gcacgaggcgacccccagcatcgcctcggacatctcgctgcccatcgccacccaggagctgcggcaaaggctgaggcagctggaaaacgggacgaccctgggacagtctccactggggcagatccagctgaccatccggcacagctcgcagagaaacaagcttatcgtggtcgtgcatgcctgcagaaacctcattgccttctctgaagacggctctgacccctatgtccgcatgtatttattaccagacaagaggcggtcaggaaggaggaaaacacacgtgtcaaagaaaacattaaatccagtgtttgatcaaagctttgatttcagtgtttcgttaccagaagtgcagaggagaacgctcgacgttgccgtgaagaacagtggcggcttcctgtccaaagacaaagggctccttggcaaagtattggttgctctggcatctgaagaacttgccaaaggctggacccagtggtatgacctcacggaagatgggacgaggcctcaggcgatgacatagccgcagcaggcaggaggcgtcctcttcagcgtagctctccacctctacccggaacacaccctctcacagacgtaccaatgttatttttataatttcatggatttagttatacataccttaatagttttataaaattgttgacatttcaggcaaatttggccaatattatcattgaattttctgtgttggatttcctctaggatttcgccagttcctacaacgtgcagtagggcggcggtagctcttgtgtctgtggactctgctcagctgtgtccgtaggagtcggatgtgtctgtgctttattatggccttgtttatatatcactgaggtatactatgccatgtaatagactattttttataatctttacatgctgggttaaattcgaagg

SEQ ID NO: 17400 - DNA, 856 bp, Homo Sapiens
  misc_feature (147)..(155): n is a, c, g, or t
  misc_feature (568)..(591): n is a, c, g, or t
gcacgaggcaaaggcatgtcaattttgatttttcaaaacattttaagatttacatttatttcttgaatttagtgaggaaacactaagtttagaaatttgtgtaaaacatatacagaaatggtgaaattcaaatgatagaaaaaaaannnnnnnnnactaaataacgtacctcctatttttcaccaactctgccagtttattgaggtaaactgaaggaaagtaacctggaaaaaattgggttctggtttgaaaagtttatttctcctgctgtctttctttttcccataatcagctagaggggattcagagactgtagacataaattttaagaaaataatgtatctaagaaatttaatatcagttcattaaggtaggcttctggcctcttgcattattggcctcttaatattatgattaatgccttggttattaaagccccacctgaattttagaggtcacataaactttgttttaaggttaaactcatctgatctatacaaatcaataatactaaatttatgtaacagctctttatattttttatttcactgaattatttgataattgnnnnnnnnnnnnnnnnnnnnnnnnctttaatacttgaaatctattcaacatttcttgatttcatatatcttcccatacattaaatacaaaatgttgttttgaatatttttgctaacactaatagatttcttgtgggaaagactgtactcaacattatattaattttgaaattgactaaatattgagagcaaatgacataactttatttgtatcttttggtgtgaatataaaaacagtttctgctttttaaaattagaattaatcagttctatcttaggtcattaaaaac

SEQ ID NO: 17401 - DNA, 857 bp, Homo Sapiens
gcacgaggcagaattctcctccccagagcactcaggccgttactaccaatttatctgagttggaaataagactcatttgccagttcttatttttaaagtggcaccctttaactttgaacctgtgtattttacactggcatcctagattcagcaatgaggtttggtggtgtttcaactaggaagggagaaaatgagtgcatctgaagttccttacagcttggtttctttggaatgctttcatcttctaagcaaagggatcagggtttgatctgtaagagttaaaaagacaaagtcattttgaagaattaactcagccagggatcatgcaaaaagattagaaaccataatgcccttgttaaagccctgctgtcaacctgccttcacccagagcttagagggccacagcagcaaagaggttggggtccatccctctctgatgtgctttttccacaacacatatctggtcctctggcaggattgtggatagagctcctcaccatacccaaaagactcagccccagtgccagtgctttcctggttcaacaacccaccacaaaaccttagtaaaaggatgagccaaaaatgaaaaagactcgactctacagtaagtcagtcagggatttcctttttaatggtttaagacatccaaatggcaagccaggaatagataccattaaagggtctcataggactaaccttaccagagccagaaatctagctctctggaagagatgcaagattctagaaaagtaaagggaagtgtcggcacatctaaatttagtgaacacaaaataaatttttatctagtctgtgacggagggaataaaggttttcatgtatcaacacctcccccagtc

SEQ ID NO: 17402 - DNA, 747 bp, Homo Sapiens
gcacgaggtaactcgttgaattatctgggagatagacacagccctgtccttgtggtctacgaacattgggaaacacaagtaacaatttcaagcataacctctggtataaacaagggaaacaacaaaagttcatgggcactcatcacaaaaagactaataaaatctaagacctagtaattccttatggagtaagaagccagaaataataaaagaactgttttaatggaaagataaattcacatgtcagaacctagagaagcaacagacaagtctgaacaggaaggcagtaagggtatgaatcattttaatgcgttctaaactgaacttatgggcattaaaaagctattgaagggttttagagagttcctgtttataaagaactctatgagagtaatgtgaagaaggcttgagagcaaaaaactattaataaggctttgagttgagagacaatagtggtctgtgttggacacggagaaactgataagattcacgatcttcaggaggtagaacccattaagtgtggggagatgaatgaagagttaagcctgactcccagacttctggcttcaatgctaacagattagtggtaccttctattgagattaaaatttaccaagatggcaaaggaagtctgtttctggatatattaaatttggggcagctaccaaatttttcgagaaagatccagtggttagttaaataaagatctgtatcttaggaagatatgtaagctggataaaaaatgcc

SEQ ID NO: 17403 - DNA, 839 bp, Homo Sapiens
gcacgaggatttgccattcttaatttggggacttgggagggaaactgataaaaagaaattgaagaattgatggttatacttaaagaagggtaatgtaaacagtggtgatgaaatatatacacatcaagtgaaattacttgacagtgttcatttgaatgactttgaattcaagccattataattacttttaaaattaaatatcatttgcactgttctgataatgggtgcagtttttgagcaatataatcagagctaaatatgcatgtagtgattagtgatgtgaacaattaacgttctgagaagaaatactaactgtggtattttcaaacttaaatttctgtagtaaaatcagtatcaaagtcttatcagatcaaggaaaaacaggcaatgcatataaacatacttttgaatgttgtgtggcctataaagcaataatgcaatttatatggaatgtcatgggatatgagaaatggaaatgcaaaaataactaatcctttagtaaaaatgtcaacatgttaaagggggaatgttaactaatgtaggttattgctatttgtgatttgtttatgggttcttggctttgacagcttcaaagaaatggacagtgataagttaaagaaattttgtatattgtcaaggaaagggtcttaaatctgagtcaagtcccttccttggggtaaaaaaatgtattcttaaagcattctgatgttataagaatactttaagttatctaaccaaacagacgcaggattttgtttctgcagactacttggcaatcaaaagtgatcataatttaaggttatcagttttcagaaaatttgctttgtgagaaaattttg

SEQ ID NO: 17404 - DNA, 783 bp, Homo Sapiens
  misc_feature (123)..(216): n is a, c, g, or t
  misc_feature (230)..(284): n is a, c, g, or t
  misc_feature (297)..(370): n is a, c, g, or t
  misc_feature (388)..(443): n is a, c, g, or t
gcacgagggagacccttaaccttatggctgccttatacttttctttgaaaaggtttaaggaccttccttaaaatgagtatttgcatttatttggcaattaagttttataggcaatatatctannnnnnnnnnnnnnnnnnnnnnnnnnnnnnnnnnnnnnnnnnnnnnnnnnnnnnnnnnnnnnnnnnnnnnnnnnnnnnnnnnnnnnnnnnnnnnttttaattgccaannnnnnnnnnnnnnnnnnnnnnnnnnnnnnnnnnnnnnnnnnnnnnnnnnnnnnntgtgtgatgttgnnnnnnnnnnnnnnnnnnnnnnnnnnnnnnnnnnnnnnnnnnnnnnnnnnnnnnnnnnnnnnnnnnnnnnnnnntttgttgttgttatcatnnnnnnnnnnnnnnnnnnnnnnnnnnnnnnnnnnnnnnnnnnnnnnnnnnnnnnnntatattatttaatattactacattgcacatttgcttttagatggtctattgagtttggctgaggcagatgtgtagtaggtgtagtagtagtattatatgctgtcttaattttttaatgagaatggttttctttttttacgaaatgatgcagatgctgatactctatggctgtaatccaaatatttagtaggtattgtggcctttataatcctactcctgagaacagcccattaattatatgggaggtgtggagatttggtccttgtaatcaccattttcaaatggagatgttttggattcatattttgtgtgtgtgtacgtttgtagtaaagtcataaaa

SEQ ID NO: 17405 - DNA, 736 bp, Homo Sapiens
gcacgaggattaaacaatgcctgtggtccctgccatggggcttccccaagaagccatccataagcttggcaggcttcaggggagggggtcaaactcatttatctttgaacaagttgccccgcttcctcagaacttggaagaagttccatccatacccttggggaaaaataacagaatgtcaaaatctcacgttcctcttctgtaaaaggctttgcatagaaacctcacgtgaaatggggaagggaaggaaactcattcactgagctacttcttctaagtcccagcacagccttttgagaaagctgttgtctgcagcttggagaggcttgggaagctgaggtccccacattcacacagctgagaagcagggagcaaggattcagttctgtctattccaaagcccgcgcccttccaatcccccttcattttctagaaagagcaaagatatggctgagatcataggcactgaaacaagatgttaaaattcagctttttacaggtagcatagctcagagacctcagaaagcataaattattagtttataataattattagtttataaattattagttcatttactgctccaaaggcccggtgtctaatacagacttaatgagtccctatcagaattaatcaagggattaggtgaatctagcagtagcacctggattccaaagtttattgtaatagataaaaatatgaatttagattaataaaagattagattagactgtg

SEQ ID NO: 17406 - DNA, 1151 bp, Homo Sapiens
  misc_feature (264)..(480): n is a, c, g, or t
gaaataccctctactttattctgaccccggggtacaacttccattggtgtagaatatgtaaaaggacgacacgagagctacgacccccttatctgaaaacgaaatcgaaccttatagttctcaatgggaacaccttttcacatacctggtacttttcatatttattatcatccttcggttttctgacatcacttcttcataaaagtacatgcacacttaaaaatgggagctgtgtttccaaatgaattgaatctctaactcttnnnnnnnnnnnnnnnnnnnnnnnnnnnnnnnnnnnnnnnnnnnnnnnnnnnnnnnnnnnnnnnnnnnnnnnnnnnnnnnnnnnnnnnnnnnnnnnnnnnnnnnnnnnnnnnnnnnnnnnnnnnnnnnnnnnnnnnnnnnnnnnnnnnnnnnnnnnnnnnnnnnnnnnnnnnnnnnnnnnnnnnnnnnnnnnnnnnnnnnnnnnnnnnnnnnnnnnnntggacaacatgtgataggatttttgatatcctagggagatattggctctgacagtagagtgggcgtacaccctgtgatattatttggatatcctaaaaagatattgcgtcctaatatcacgggggctctacaccctgtgatattatattgtgatattctacagagatatatcttcttataaacagtggacgtatcaaccttgtgatatattcttaatatattacagagatacgacctctgatatcacagtgagtgtacacctgtttgtacaccttgtgatcttaattgttaacacctttggaaaatattacgcttaaatcaaagtggtgaacaccttgcgatgtatttgtatcctactaggtgatattccttctaatatccaggtgagttgtaccattggtgtacaagctgtggatttatttgtattacccggggggcggggtaccatatccccattaggggactgataaacgcgctcattgccgtctgttacacgtgctgcactgggaaacttggcgtactaaactattcgcctgcagacattttctttttgcgactttgcggttatcggaagggggcgccccgatgccctttcccccaaggttgccaaccccggaggggaaagtgaaaagcccgcctcggtgagggtggcgaacttttaaacgccgccc

SEQ ID NO: 17407 - DNA, 609 bp, Homo Sapiens
gcacgagggtttttaaacatggtataatgaattgtgtacttctgtcagaagaaagcagaggtactaatctccaattaaaaaattttttaacatgtaagaattttgtactttgaacaacaagattacagaaagtacctgtggtttttggaaaacatttctagcttggggaatgtgacaacattccccagtgtggtaaaattggggtaaaatgtggtaaaatgtgatacgcacaaaccctttgaaaatagcataacaaacatgccctttttctaaaattgataaatcctaaagaggaagaaaagagctgggacaataaaacactggctctggaatctggaatgttaagtccaggccagcagtgacaaaagttattgtaatgacctctgaacagagaaacactgccattgaagaggcttctggtatagaaaacatggtacattcaggagctgtgaatatagctctaggtgtgctcctgaatcagttcatggtagattatgctgaacaacagtgagatgttattggaggtgtggatgagggagtttgttgttgcagtccttctttgcaccttattttaaagaataagtgaaatatttttctggttactatttt

SEQ ID NO: 17408 - DNA, 818 bp, Homo Sapiens
  misc_feature (57)..(84): n is a, c, g, or t
  misc_feature (86)..(115): n is a, c, g, or t
atagggatcactgcaatgaggtcttgaagtaggaaagagagaatagactcaactccnnnnnnnnnnnnnnnnnnnnnnnnnnnngnnnnnnnnnnnnnnnnnnnnnnnnnnnnnnttaatattatatatgaggttggggtgtggccatcacttttcctacttcatcagcttttcttacaaatttaaaaaatgtcttatgatgcttacattccacagttcaacatcctcttcccctctcccagcctgagaatgtctttcttcccagagtcctgtctcattgttgacaagttcaggaactacaggtttacttaagtcacggattctgtccttgttacaatatagtgaggaaaaagaaaatgtaaaatgggaccaggaagcctatgtctctcctgccatttctgctctttccacccttcagagtctgttgaaaaccaagacgtgttgcatgctgggcactgcattttcatgtttcagtgagaggcagcttaagtgttttcacatggaagcctttctcccatgaggcatgcccgcagtgcagaggttggatggggggtgatttccaggatcaaggagatagggtgtccaggaaagcctggggattgcacctaagaggtcagcttgaccttcctcttcccttcctctctggcgagtttcccattacaaactcctcctgtcttttgccagctgactggtgtttgggccactgtagtctaccaaagacagctaagaatattgcactttacaataatgttatatcaagcccagtaagtagattttaatccgcatttggaaaacgctgcagtgtgtgatgtgttgat

SEQ ID NO: 17409 - DNA, 520 bp, Homo Sapiens
cctattgagtcatttgagttccttatatattctggttattaattcctggaaggatggatagtttgcaaatattttctcccattctgtaaattgtcacttcactttgttaattggtttctttgctgtgctgaagctttttagcttaatgtaatcccatttgtttatttttgcttttgttgcctgtgcttttgagttctttctaaaaactttttccagaccaagttcctgtagcattttctcattttcttttaatagtttcatatcttacgtttaagtctttaattcattttgatttgatatttgtgtatatggtgacagaggagtctggtttcattcttctgcatgtgtttatctagttttcccaacactacttattgaaaatattgtcttttccccattgtatgttcttggtgcctttgtcaaagatgagttaggtgtaaagtaatagtttatatctgggttctctatgctgttccattggtctgtgggtccgtttttatgccagtaccaacttgtttta

SEQ ID NO: 17410 - DNA, 916 bp, Homo Sapiens
gcacgaggatcagatgtgtgagttgagctattcctcctggcagaattgtccaatctaaaaatcagcgtttaccagcccatgctaataaaattaagatttcatacaagtttctgtaaaactattcttcatgattagctctccctgtgggctgcagcagtcagaaagagataacagccacacctctgcattcccaggtcaccaggaataaaaggaaatgttccagattgtaagtggttttaaaaactcagttctcatcgtttgcaatctaagttgaaagaactattaaatataaaatcaaaggtgggcaatgtggccaagtcaatggaagaggctttactcagaataacttacaaattctagaaacaaggtagaactcactcagtttacctaataataattgaatttaagaccaaatatcacagttgaaataacttccctggatacattctatcattttgtagctttcctaagaatttcttgctttatcattcctgattaatcactgtttttacattattaaaggtggcaattttctgtaaaaaatttaaaacagatgatcctattctgtcttgaaagttctgtaccacactgaccttaaccttgcttataacataacaattggtaaacttttaattcataatctttataccctaagatagtatttattaaatttttatgggtcatgaagaaactagaccctctccccagaaaaatctacgtacacagaatttacatagaacttggggttcatctacacaatttatgcatgaaataaaattgtactggtaccctataaatttatacaaataaaagagtttaagggagttcaaggatgccatatgtatattttaaaaaatttctaagggaagtctaaaaaacataaattataatattacccaaaataagatgctacttt

SEQ ID NO: 17411 - DNA, 772 bp, Homo Sapiens
  misc_feature (234)..(378): n is a, c, g, or t
  misc_feature (386)..(401): n is a, c, g, or t
gcacgagggtcaactttacagatatctgtaaactgtaagttggttaatggagtaccttcatcccaaatgccagattctcattgcagttttaagaatgttaaatgtccttattgtcgactttattatagatggaaagaacacacaggtgtaggggttgagggagttcaccgttcaagcctgtcattttcttcaattcataagtctcagggctgttttattttattaaagataacnnnnnnnnnnnnnnnnnnnnnnnnnnnnnnnnnnnnnnnnnnnnnnnnnnnnnnnnnnnnnnnnnnnnnnnnnnnnnnnnnnnnnnnnnnnnnnnnnnnnnnnnnnnnnnnnnnnnnnnnnnnnnnnnnnnnnnnnnnnnnnnnnaaaaaaannnnnnnnnnnnnnnngtagaaacgtgggtcttgctgtgttgcccaggagggcttgttttattagtgcattcagaggtgagagaaatcaactcatgctgacccactgaggatggatcctaactagatgtagtgaagagtgaggaggctcaatgtagttctcaggagccttgggagcccagggagtggaaaggctcatcagttgctctaggataggcctgccaagcaagcagtgagctcagggaaagtgcctgaatttgggtgcctcttccttggatgatcattgccaggacacaattgatgagattgtatctttcttaattaccatcacattctatgccagagtcagcccgggttactgtctgggaatggctttctctgagctcctc

SEQ ID NO: 17412 - DNA, 874 bp, Homo Sapiens
  misc_feature (186)..(269): n is a, c, g, or t
  misc_feature (579)..(587): n is a, c, g, or t
aatagatttaattttttagagcagctttatgtttacagaaacattgaaaagaaagtacagagttctcacatatctctctctccaacacgatttcccctattaacatcttgcattagtgttgtacactagttacagttgatgatattaacataataataataaagcaaaaattaagtagcatctaannnnnnnnnnnnnnnnnnnnnnnnnnnnnnnnnnnnnnnnnnnnnnnnnnnnnnnnnnnnnnnnnnnnnnnnnnnnnnnnnnnnccagagtttacattagcattcattcttcatgttgtatattctatgtgttttgaaaaatgcataatattctatatccataaagtatcataataatagtttcactgccctaaaatttgtttgtattctgcctgttcatccctcccttcatccaaaactctgttctttttattgtctccatagttgtgcctttttcagaatgttatacagttgggatcatatagtatctagcctttgcaaactggcttttttcacttaccaatatgcattaaagttcttccttatcttttcatggcttgatagctctttgttnnnnnnnnntctctgacactagtattctattgtatgaatagattttcctcatagaaatagaattggatacaatttctttatccgcccacctattgaaggacatcttggttgcttccaatttttggcaattttgagtaaagctgctataaacattcatgtgcaggttttctgtgtggacatgttttcaactcctttgggtaaacacctaggagcaaatctactagattgtttagtaagagtatgtttacctttttaggaatctgccagactgtcttcccaagtgctccaccactttg

SEQ ID NO: 17413 - DNA, 237 bp, Homo Sapiens
gcacgaggctaacacaaggcattttgtgttagtgtggctgatgtgcatccagttgttggtgaaattatttgtgcccaaaaggagtacactcaaaagctacttttttggttcacttcaatttgatcccacttttgaaactttctattaatggcatttgccctttccctacaaatacaagcactctttatggcagcataaacatagtaacataaattatactgttaccacatttacgta

SEQ ID NO: 17414 - DNA, 642 bp, Homo Sapiens
  misc_feature (325)..(432): n is a, c, g, or t
gcacgagggaagaactgaaattccagaagccggagaaacaagccgccgtcaagactgctgaagcgaggcctacggccctgtaatcacacaagctcaggcttcacggaagctggaggccatgtcgcctgatccccgggctgaccccttccctccctccgcgtagttcctgccaagctccaggtgcccggtgcccacgtagtctcggtgaacgcagagaaatcactgcagatgtagccacgcttctctgagttaaggactcggcgtccgcaggagagccaaggcctcgctgctgggggtcagagcctctcagagaacaagaggcaannnnnnnnnnnnnnnnnnnnnnnnnnnnnnnnnnnnnnnnnnnnnnnnnnnnnnnnnnnnnnnnnnnnnnnnnnnnnnnnnnnnnnnnnnnnnnnnnnnnnnnnnnnnctcccagctacgatatgaggaccaatggctagtcaaatggaaaacacgagggtctttgcaagccattgtgcttggtggttaagagtatcacttcggttagacagatttgaattcaaatcctgcttttcccagttacttgtgttccaaccttaagcaaatcacttactttatcttctgattctcactttcttcaactgtaaagaattccat

SEQ ID NO: 17415 - DNA, 880 bp, Homo Sapiens
gcacgaggacatcccattttcttttgtccagacccatgttggcaatcatgtatgaactgtgttatacttctcagtgctttcttttttctttttgataagatggatatcaaaaatagttgctgtgcaaaagttagtagtcttcttcaagaagaaaaccaattctttttctaataatatcctgtgaaattgcttcattcattcatttatttttaagccaaatgtcagcagagtgctgctgcttttatctagtaattttgatatgtaagtattaatgcatttttaaaagatgtctacattgaaacatgttcttcccagtgtcctgcttatgatgctttgttcagattttttgtaagagaccagttagtacactgggggtgtatattgtgtacatgtgtcattttagttaggcattgtaggccaaatgtgattataaatgaagttgatgaacattaattttgttattagtgagttttttgaattgtaaatggatttccagtttaccttctgttgtctacagcttttttaattttaaggtttgactaattgtatccatctcattgtacagtgttttagttgcaagcagaaagtagaatttggtataaaagcaggttatttctatattgaaaggagtacagttgaaattgtagatttaagattgttaaaatcatgacaattctaacttgtctattctaacctattgtgtacaatctgattttttataattgtaaacatgtatgatcttgggtttcatgtgtttttgaaagtgttattgtttaaaaaatgaaaaaagcatatctgctaaagagctgtcagttttcatttactgactctgtaaatacactgttctttgtgtactgtgtgttattttgccagctgctgc

SEQ ID NO: 17416 - DNA, 881 bp, Homo Sapiens
  misc_feature (238)..(474): n is a, c, g, or t
gcacgaggatgaggtatgcccagaggtgagcatgtagttaggttcgaccagtatatattttgcagaaccagaaagagtaagagatatggctgaaaaggcaggccagggctgagttagagagtgcttagctgatggggaaatttttgaaatttattatttgaatattagggagccattacaggcctttgataaaaggtatgacatgaacaaagagagattttggaaagattaatatggnnnnnnnnnnnnnnnnnnnnnnnnnnnnnnnnnnnnnnnnnnnnnnnnnnnnnnnnnnnnnnnnnnnnnnnnnnnnnnnnnnnnnnnnnnnnnnnnnnnnnnnnnnnnnnnnnnnnnnnnnnnnnnnnnnnnnnnnnnnnnnnnnnnnnnnnnnnnnnnnnnnnnnnnnnnnnnnnnnnnnnnnnnnnnnnnnnnnnnnnnnnnnnnnnnnnnnnnnnnnnnnnnnnnnnnnnnnnntgtgctgaggcaattggatatccacatgcaaaactatgaagttggacctctaactcacaacatacagaaaaatcaactcaaaatgggtcaaagacctaaatataaaagctaaagctataaaacttttagaagaaaacaaaggagcaaaccttcataaccttggattaggcaatggtttcttatatacaacactaaaaagcacaagtgaacaaataaattgaaataccttaaaatttgaaatatgctttaaaggacaccataaaaaagtgaaaggacaatccacaggatgtgaaacattttgaccatcatatatctgataagggacttgtatccagaatcccataaggaactattgcttgatgtctttgttattgacaatgctattatccaaaaaccataacccattt

SEQ ID NO: 17417 - DNA, 461 bp, Homo Sapiens
gcacgaggggaacgtggggagaagacgtgaggcggcagatctgaaaaagatggtaggtggagggaccccagggattcaccctggcctcggactaatcctatggggcgcttgcaaaccccggccatcccctggagtctgaaggtcattccggactcctgacgccgccagtcccgcggtgagacgtgagcgccattggcgtccgtggcctctgtttccgtggcaacctagtaaccattaattttcaattaaaggagacaaaaagctcgatgacagctccaggtctgctgaagatgtcaagaatctgtattaatatacagcaagagagcataattgtgtgtccatcttccagagcagcgaaaaatggagggataattaccagctcgaaagccactctgtaatttagttcttactgtcaccacagccctacacattagcataaattaaaagcagagtttattgtt

SEQ ID NO: 17418 - DNA, 819 bp, Homo Sapiens
  misc_feature (649)..(657): n is a, c, g, or t
gcacgaggattgaacttggagatggacacccttataagggcaataacaaacaaaaatagaaataggtttaagttataacacacaagaataaaattagatgtaaagacgactttcctcagttttaaggtggataagtgggttgttaaattataacagatttctctaggagggtctggtgtactccaggctcgctgggaggcagacctggataatctctgagtatatctgtccccacctggcattgttgagacccttcagagtacttctttaggtccatgattgaaaattaagaggcagccagtgcctccattgttataagggccataaggtttggttatctttgataaagagaaatggaaacatataacagagctcttcctcaagtcctgcattgggaacattagcacacaccaggacctttcctatatgtagacacagtgcagatttgatctgtggtgcagccaaactaaaacacaggtcatggcattgtttccccacttttggtacaaacaagcccttaatcaagtctctaatctagggacagtaacatcggctatttgagtgcaggcaccctaggttgttaatgtctgtttcccaacactattccattccaatatttttctttacctaaagtgggataatgatcatnnnnnnnnncacaataattttccttacaacactgctgataactaataatcacacaattgcatgtaagttaattctttaatttaatcagtcatttataaaactcccccattagtaaaagttggcttattttaacagccttaaacattggccactatttaaacaagacattct

SEQ ID NO: 17419 - DNA, 762 bp, Homo Sapiens
  misc_feature (321)..(374): n is a, c, g, or t
  misc_feature (569)..(577): n is a, c, g, or t
gcacgagggcaagaccacatctgtgccctgtaccagagtaggctctgaatttacactatgctcacaatagtgtgtaggaatcccaaacagagaaaataatgcaaaacttggcctgtaactgctaccatatatggggtcccagcagaagagaccactgattgtactatagaaatgatttcttgtagggatggtttcattgcaatatcagaaaatgaatcagtctgaagtagaatcagcaaataatcaagtctagaaatatagaataatctgagacattaaaaaataaatttgatatcttaaaaggtatagacttaaagctannnnnnnnnnnnnnnnnnnnnnnnnnnnnnnnnnnnnnnnnnnnnnnnnnnnnngacttaaaggttcgtaggcagttatgaagaactaaaatgaaatttctagaaataaaattatcaatagattggacaaacaatggaccagacagctaattaagtaattagtgagtttgaagttaattataaagaaatcacccatgatggaatacgtagacctagaaatatggaaatagagctgtcgaggatagaatnnnnnnnnntctaaagcaggaattccagaataagagtatagaaataatgaaggagaggcaatagccaagtaggtaactgtatgtagtagagaagtgaattcccagactgaagggaacaaccaggtccacttagaaacatcacagtgaaactgtgaattggataggaatgaaatgggaaggtaatccttaaaggg

SEQ ID NO: 17420 - DNA, 261 bp, Homo Sapiens
gcacgaggctcatggctcttccccacccccactttctataaatgtaggcctagaatacgcttctctgttgcaaaactcagctaagttcctgcttccaccttgatgttgaaatatcttatgtaagagggcaggggatgtcgtgaagatggcaagaagaacacagtttcaaatttctggaaaagagcctgtggtggagatctaaagatgtttagggaagagctcgactaaagaacaatgaaataaatggtccaaggggaagtc

SEQ ID NO: 17421 - DNA, 621 bp, Homo Sapiens
  misc_feature (113)..(227): n is a, c, g, or t
  misc_feature (236)..(363): n is a, c, g, or t
cacccttatatctggaggcttttcatgggtacttcttttgaacacagttggttaacataatcaccaaaacacacaggcagtcctgaaaaatgcttctggtacttttcaaaaannnnnnnnnnnnnnnnnnnnnnnnnnnnnnnnnnnnnnnnnnnnnnnnnnnnnnnnnnnnnnnnnnnnnnnnnnnnnnnnnnnnnnnnnnnnnnnnnnnnnnnnnnnnnnnnnnnggcatgccnnnnnnnnnnnnnnnnnnnnnnnnnnnnnnnnnnnnnnnnnnnnnnnnnnnnnnnnnnnnnnnnnnnnnnnnnnnnnnnnnnnnnnnnnnnnnnnnnnnnnnnnnnnnnnnnnnnnnnnnnnnnnnnntgggccagtgtggccttctggcactttttcaaaccatgggtgaaaacactcaactctattgttatagctggttaaaaagaacacttctcaagaggtaatcaattttactgcagtaccaaaaaaattgtgctctccagttgtgccctcttgtggttaaagttaaatctttacagaatttaacctattttccatctggtggggagctaaacttgaacagcctctgcgtttctgaccaagtcctgttacacctatttttca

SEQ ID NO: 17422 - DNA, 887 bp, Homo Sapiens
gcacgaggtgtgaaatgagggcaattcagatgttcacctgtgaaacttttctgagttaaaatctttgaagacacacaagacaatagaaagtgaagtttagattcttggattaaagggaccataggtagtgtttcttcatttaaagtgtcaaaaagaaaattagttcccgtttcttaattttactgcaattatgtaaaacaggtgatacagttttattaaaattttaagatgattgataatatttacctgttaaatctcaataaataaacccatagctaattttaggtgtattattccctaagggcacacaaaattactttgatatacacatctctatattattaagataaaaagattcctttactagaagtgactgaaagctcataaatataaaagcaaaagtacatgtatcaaagcttttccatgaataatatatagaaatactcggtttcttttctcttttccattttttgggttctggtacaggatattttgatgatgctttggaagatttcaagaaggtcttagacttaaatcctggatttcaagatgctactttgagcttaaaacagactattctagacaaagaagaaaaacaaagaagaaatgttgcaaaaaattattgatatttttaacttaatggaagtattgattcatgatccttacatctgcatctagttatcagtaatttagatattgagctattttgatttatatttaagaaattaatacattagcactgaaagttaaatagtgtgtttaaagtagttaatttcacgttgaatgggttttttttaatgaagtgtaaataataccaatgtataagtgtatattattatattaaatattatagtaaaaaggaatgtgtgtattttcttcagcaaaac

SEQ ID NO: 17423 - DNA, 852 bp, Homo Sapiens
  misc_feature (341)..(366): n is a, c, g, or t
gcacgagggttaccaatgaagagagatgtttgatcaattaaaatgaaaaacatatttactatacttaactcctgtatatttaaatattatcctactacaaacttaaaaagaaaaacttttcacttacttttccagtgctttttatgttcttccctttcttctgggtttgctgccttctgccaactaagccactatttaatacactttcattgaaacaaacttccgccctaaccaatctgggatgcaaagagaatcacaagttttatttaggcactttgcgttttggaaattaaacagaaaaaaatatcaatattcttctcccactggcacaaacacattannnnnnnnnnnnnnnnnnnnnnnnnncaacaaggaggaaaggaagattaaagaaatgggatactcgtaaaaatctgttttccacagacatgccttatgtgacaggctgtgacctagaaccacatgcttttggggctgtgggcatggtgactatttcttggcagaaagacagatttcaagcaagtactcactctacgtccacccaaataggttccggaactttttggctcataggtgtcaaggtcttcgtgcacctgaacctgtagaaggccgaggggaaatacacacaatatttttattataggactgtccttcttgaaacacagcctgcatgctcatggtttgaattatagggtgtctcatgtgaggttctcacatctggtttgacaatcattttttcaaaatgtagtcctttgtgagcttgtgacgcaaaatgatatggtaaaatgaacccaggcaactcacagttgctaagttgcagtagttacaaaactaagagaagggaaaaataaa

SEQ ID NO: 17424 - DNA, 360 bp, Homo Sapiens
  misc_feature (122)..(231): n is a, c, g, or t
  misc_feature (255)..(275): n is a, c, g, or t
ccttaattacccctttaaaggccctatatgcaaatacagtcacattctgagctactgggggttagggcttcaacataggaattcaggcagacatgattcagcccataacaagggctttcacnnnnnnnnnnnnnnnnnnnnnnnnnnnnnnnnnnnnnnnnnnnnnnnnnnnnnnnnnnnnnnnnnnnnnnnnnnnnnnnnnnnnnnnnnnnnnnnnnnnnnnnnnnnnnngtgcaccagcacgcccagctaatnnnnnnnnnnnnnnnnnnnnnagacggagtttagctatctttgccaggctagagtgcaataacgggatcttggctcacccgcaacctctgccttcgggttcgggag

SEQ ID NO: 17425 - DNA, 868 bp, Homo Sapiens
gcacgagggttgccttcaaggtaggaaaaaggtgatttcgtctagggagaagaaaaggaggaggagaggaaagggaatcaaaatagtaataagaagagcaatggcatgtctactagtcctactacttgatcctgcaatggatacaagtgtccttgagaaagcaccttcagcatatcaaagatgttttgaaaacaacttccccagataattgatatttaatccatacaagtctccaagattgttaaaacagtttgttttagcttagcccctcaattactatcttaatttaggagagctgctagtaggtcctttggggatgctacattatacaactttggggggcaccatttacatctaactctatgtgaacagagccccttggagacattcaagatggcagtcctgcgggacctaatccttcccacacaattccctatgggttaacagggagtaccatcagctcattaagatagggtaagacagtttgaaaaggctctactattccagttctcccaggaaagggatgcaaggtataaggcaacaagcccctcagattatttctcgtagcaaagtaacttatttgcctccactttgtactcctagggcactcagtaggctttggcatcatatatgagaagctagaggatccagccttggtgggagtcccttaagtccttgtttcttcaggtctttggatccaatttgaagaagcaggaattcctttatgataccatctctcaaactgaggttctcctgttaagcaatcaggggcctcagacagatgacttctgattgaaaatacgtaataaaggaaacttttaagaaaaaaacacccaaattctactgtcctcataatttttagcttttt

SEQ ID NO: 17426 - DNA, 200 bp, Homo Sapiens
gcacgaggttcctttccctctaagtgactgctgaggttctcaccatttcagaataaaattcttgtcctttgaggttggaaatttaatgataattgaaaaactgtatgtgtcagtatacttaaaaggaaaggttatatcattctcttcattttggatgtaaaatttacctgttagagaaaatttggaaattatagaaaagt

SEQ ID NO: 17427 - DNA, 799 bp, Homo Sapiens
  misc_feature (706)..(726): n is a, c, g, or t
gcacgaggctacccttcctctttttctctagtgtgcctatggtgaaatggcaatagcattcactgtcgtattttgcagtgctcaggaagtgggacgttaactttgaaggtgcttgtttgtattagctctgctaggtttacctctacaacgtagatttcagcagctatgctgactgacactacattctagttcttaagattttttttccagatccccccttccccagctagacatacgtagcatactttcatcttattcagtctttctgtaacctgctgctgcttttagtcctcctcacctcagatcggaatcaatggagtgggcccagaggatacattttaattccagtaatggtaggtagatttgtcctgctttctaaaacatctcctcatttcatatttccactccatattgattccataagggaaaattaatgggtgtttcctcctttagggaggtaatgcaaagagtgtggacatcttctaatcttgaggaacagtagttgatttcccttgaaggagcttacatattgactgttttcacaataacctgtttgccccagttcaatcctcattttaatacttaatttggtactggctcaaatagcattttcttacagataacaaatcaagagtgaaatttgaggttatactccagtaaagtttttaacacttgtgaatatggtcagctagactaaacttgactnnnnnnnnnnnnnnnnnnnnnattctgtgaacattcagataagtggattttaagtactggtttgggatgggaatcgtgcttttctttaacttca

SEQ ID NO: 17428 - DNA, 458 bp, Homo Sapiens
  misc_feature (211)..(229): n is a, c, g, or t
gcacgaggctccatttcctccacatgcattaggtgaaactgaggtctaagcctcctgcaaggtctacattttaaggactcacacatcaggctctcagaaatgtacacaggtattagttctgtttgttctaaaggaaatgtgggtatctctcaggccaggacttagtgactagttttcgctagacagcaggttaatacctagatctcatttnnnnnnnnnnnnnnnnnnncaggattaaagggaactgatcaggtttgttgagttttttagcctaattccaaagcatggaagagtgctctaggtaggaaagaaagctttttcttacgatttgtagctacctactgtgcctgacttggtgcctgtgtgaggattaagcccttagtctgctcttgcaattattcaaatgacaaattaaatttgcttttgtaataacaataaaagttgtcatcttccctttt

SEQ ID NO: 17429 - DNA, 596 bp, Homo Sapiens
gcacgagggagactctcaaataattgtccatggattatcttacctttctaaaactctaaggagaatcaaaagtgcctggaagatttaatccccaaccccaaacagacagcctgtagctggtaagtaactagtggcaggagatataagcctagatcctttgcctcaaaaatggtcatctctgtagtgcaattctactccagagagtctttcaaaatcagactgagtctgggacttcatttgaaatagcacccttgcctggcttctttcccttttcagttctgcttcccctctataccttattggtttctttttggaacatttaacacttccttaataaatcacttgtactgaagctcaggatccaccttcgaaaggactcaacctaaaatattcctaaaccattccacacatacataatgtatttgagatgaaccatatatctaaatgtgaacactcaactcatagaacttttagaagaaaagatgaaaaaaatgcttctgtggccttgagtaagaaaaagatttcttaggacaaaatagatattaaccataaaataaaacgataaatttggcatcaacagaagtaaaatccacttc

SEQ ID NO: 17430 - DNA, 320 bp, Homo Sapiens
gacccttcccttttaatccaggggaaataagggggggccccaaaaaaatttccttgttcataacggggcaaaaaattccccttcccgggggcctaggggggccctcccaaccccaagggttgaaactgcaacccaagggaaaatggcttggtttccccgggtctttcccctgctaacacctgtttttcctcccctattctcagacaaaaaagtgattgcttaaccccactctggagagggaccaagtctttttcgcgcacatcccacaaatatgagggtgctgaacaaccctgggagagggctaaaagagggaggctcac

SEQ ID NO: 17431 - DNA, 771 bp, Homo Sapiens
gcacgagggcacaacagggtgagtggaaacatgacatttcttaaagtctggactcactgagacatacctgcaattagttacagtaagtcacagggccaactccaaattcaaggggcagtatgaggccatagcaaggatgtggatgcatgatggggacgagagaagaattaagaccaacaagtcaatccaccacagtgcactactttgatcataactttcctctaacatgcaaatgtccttacccccaacccagggtcccaaagggcttgattggatctgcaggatgtcatggagacctgtagactaaaatggcaagtcgtttgcaccttaaatacccaacactcagaggcagaacaggaaggaaataaccaaaataaaatcttccatctcacattctcctatttcttttcacatgccactggtcacagcaagtcacatggccaaaactaaagccaagggatactcatgatgaggccatgacacagtagggatacagaattggggacaatactttaccccagtataaacagaaatggaaggatggttgttcttccatttatatcatctgccttgaccaccacttctgaaacgggctttagaaaaatgccctttttttcatctgagcaagtttctcagaatgctttcagcctggaaaaagctgggggctcagaggtctttttacatttcaaagagccacagtcctttatattcaaggccagaagtatttttgtcaatattactttcgaaaaaactttctgagttttacaaatt

SEQ ID NO: 17432 - DNA, 290 bp, Homo Sapiens
  misc_feature (55)..(65): n is a, c, g, or t
  misc_feature (109)..(118): n is a, c, g, or t
  misc_feature (178)..(225): n is a, c, g, or t
gggggaaccccggggaatttttttatgggacatgaaaaggggggggtccccaagnnnnnnnnnnnttcaagggggctacatgggaactgggaggaagggagaattcgtnnnnnnnnnnaacgaatgtgggaaggaattccccacaaaggagggctctctcctcctcttgtgctcttgnnnnnnnnnnnnnnnnnnnnnnnnnnnnnnnnnnnnnnnnnnnnnnnncattgttttcacccccctgttgctgtaggcaaattctctggtcaaacaagaaaagaacttgacaa

SEQ ID NO: 17433 - DNA, 453 bp, Homo Sapiens
gaaggaactgcccctgaggtaagaaccaagggagggcctcccagaggtcaggtggaaaaagttttaggaaggaggaagtagtcaacagggttacctgttgcaaagtacttaagtaatatgaggcctgatagtggtaaacttgactaccgttggatttcactagtgggaaaggaagtctaattaaaatgcactcaagagactaacagtcgcaggcatgaaatacaatacaggtacatggttttttattatgtgtgcatctgcttcagtaataggtgtgaattactcatttggatcattaggagtttcaaaatctagttaaatgactagatttttgttgatgtaaattctgtcattctgaactgcagggattgtcagtaacttaactgcaaactaaactggtgataattatggtaaaattgcaagacgagcaataaatctcaaccaacttgagag

SEQ ID NO: 17434 - DNA, 659 bp, Homo Sapiens
agaatgacaggtttcagttgaattcttctcttttaaaagaccctgacttaactgtattttatgaggattttataaatgtaaattaagaagacaatacacactctcattttcctaattagaaagactatgcattcacaatccagtacactggatttgctctggtaactaatgataacacttttctacgttaacatgagttatatttggcagagagaatggaagcttgctaatcagaagttacattagggtgagattaaacatcactctaataataacttctgatgtaacttaatgtggtttgagatgtgtaagattgtagaggcattgcacaatgcttgataaaagttgcattttgcttttgttcttccaccagtttattttagccttaaagttatagctacaacaaattgaaccctgtagttattactgaaagagagtgtggatattttaagtatctcctagtataatatgacattgttcatgtggagagttagaaaaacacactttatcttagacaccaaagccaaattattccaagtgtatgctatacaccgcagtgcagctctgcttctctcccaacctactctgggccatttttggcacaatagttgttcaaatgtagatcactatgctgaatgctcatgctgggatttgaccag

SEQ ID NO: 17435 - DNA, 953 bp, Homo Sapiens
  misc_feature (203)..(213): n is a, c, g, or t
gcacgaggttctgttttatagccttcttttgtatttatgattccatacttttgtattctcatgccaggtttaagaaagagatcttgcttgtgtcggttggccaaggaacactaaatgggagttttgtaacttcattttgaatcacatttaattattgaatttggttaatgctcaatactattaatgaaggaaatagatatacnnnnnnnnnnnaatggatgactgagtgcttgacaaagaagcatttgttaagtacacgtgaccccatgtggatgctgaagagacacagtccagcctatagacctaggcacatagatttagcctaacctcagaattaattgctttgactatttgcaaagaagttttggtccagtgttgcatttgttgtgattataacaaatcataatacaatttcttctttttgcctattctgtagcttgattgcacattgatccaaccctcctaacaactagtcttccaaaatataaatggactctcctgataccacattctccttcagtagtgcttcacttgacaaggtcctgctaaggtagtagaatttggttatttcaatttatgtattgaaatctctggctgtggggagttttattgaaacgcatttgttggcatcagggttaaccaaaagccaagtttccttaattctgtttgccttacaaagaggagtacataatcctgtatttctttgtcagtacctctaagcagcagccattcacatttgacagttataattgtatctttgagatagggtaaagaagtcgtcctgtaaaagcagtttgttctaaggtcatacttttttgaaaggtcagacactccctaacaaccagaggtacttattttaatatggggctctctcgtattttgtggaaactaagggaatttgtgtatctcttaatgtaccttttagctgctacctctattatccctgtttttga

SEQ ID NO: 17436 - DNA, 486 bp, Homo Sapiens
  misc_feature (50)..(75): n is a, c, g, or t
  misc_feature (89)..(117): n is a, c, g, or t
taaaaaatcccccgggctgcaggaattcggcacgaggctacctctcgagnnnnnnnnnnnnnnnnnnnnnnnnnnaaatggagtctcgnnnnnnnnnnnnnnnnnnnnnnnnnnnnntgctgctacaggagtcatgttggtaccaaaaatatgatgttaaataaaaccaacaaggtgttattcaagtttgataaaacttaaatattactgggaaaaaacttggtaccaacatgattcctttacagtaattacgtcccatttaacaaatcatcctgattttataatatagttaggggctggatgcgatggctctcaataatttttaaaagtattatggggtgaattccgagaccaaaaagtttgaaatccactgctttaaaaaatacacaagcagtaaagggccctaaattgatcaaacagaaggctgaaattattttctggatttcaagctcaaacatgcaaaaactggcttcaaagaaaggagcc

SEQ ID NO: 17437 - DNA, 700 bp, Homo Sapiens
gcacgagggcaatgtccagccgttccacccggcatacaagcttatggagcagccccctttgaagatctccaggtggacttcacagagatgtcaaagtgtagaggtaacaagtatttactagttcttgggcgtacctactctgggtaggtggaggcttatccaacacgaactgagaaagctcgtgaagtaactcgtgtgcttcttcgagatcttcttcctagatttgaactgcccttacggatcggctcagataacaggccggcatttgtggctgacttagtacagaaggcggcaaagatattacggatctcatggaaactgcatgctgcctactggcctcagagttccggaaaggtggagcgaatgaatcaaactatcaaaaatagtttagggaaagtatgtcaggaaacaggattaaaatggatacaggctctccctatggtattatttaaaattagatgtaccacttctaaaagagcaggatattccccttatgaaatattatatcataggccccctcctatattgcggggacttccaggcactccctgagagttaggtgaaattgagttacagcgacagctacaggccttaggaaaaattacacaaacaatctcagcctgagtaaatggcctgttatcttattctccccagttcaccctttctcccccaggtgatcgagtgtggatcaagaactgga

SEQ ID NO: 17438 - DNA, 338 bp, Homo Sapiens
ccgcgagggaaagacgaggattatgaccaagcataccacatcctggcttctcccctatcccttcagcccaccgaattagtgactcataccgttggctgggtagccacagctatcagcccccaactgccacgatctacctacaatctgctgggatagcacacccgtctgagtggggaatgtggggaagatatataggtataggcgacaaacataccgagcctggtgatagctggttgtccaagataaaatcttatctcgactttaaatttgcccacagaaccctctaaaaccccttgcatatttacctgtgactcaagagaagaacagctctttggaca

SEQ ID NO: 17439 - DNA, 902 bp, Homo Sapiens
gcacgagggaccacttcctgacagctccagttaatgggactgccagcaggctagacatccttcgccggaatgtgcagcgcttagttctgtgcccgggaggggcttctctctcttttgggattggagtgtggcattgccgccagaaagcctgcagaattccgggttgtgcagccaagcaggaacggtgtacctttctagacccatcctcttgcaatcttggaccctaagaaaagatgtggagtgggctgctacctcctggcctaaatgaaagtgacgctgagtcaaactcggaagatgaagctacgttggagaactctggacttaacttacaggaagataaagaggatgagagcatcagaaaaacagaaatcatagatttctcaacagatgaaccaaaaactgaaacagagtcaaatgtaaatgcctatgaagagtgtccttctggaattcccatagatatgtggaataaatttcaagaattgcataaaaaacattctgaacagaaaagcacaacctcaagattcagagggaaaagaagaaaacgctccagaaaagataaattgaagaatgaaaaagaattacatagtgaaccgtcctcaaatgaaaccccagtggaaagagcttactcagtattttggagtcaatgatagatttgacccgcctgttaaaaggaaaaaagttgagaagtcaggccttgaaaagaggatagaccaggctgtggaggagtggaatattgagaaggctgaggaactcagcaaccagctagctactcgagagcttggtgtaaaaattgccaaaggcagttgcctgccacaacttttgtaaaagccaaaaagggaggttgaaaattcacagctgcccgaaaaaagaagaactttgcatggggggtttgaagcaaagaa

SEQ ID NO: 17440 - DNA, 800 bp, Homo Sapiens
  misc_feature (77)..(137): n is a, c, g, or t
  misc_feature (267)..(275): n is a, c, g, or t
cccgggggagttgtttatttgttcttccctttgttttacactgtattttctgagtttattggggtctgtgaattaannnnnnnnnnnnnnnnnnnnnnnnnnnnnnnnnnnnnnnnnnnnnnnnnnnnnnnnnnnnnctgacctgtaaatataggcaggttataaaagcttaaagttgtctaagttgggggcaaagtttcctctgatctttctgatgccgaaacaaaaaaggcagtcatatttgttacgtgattggaatggaatccnnnnnnnnngcatgctgggttcttgggggacaggaaagcttctgtgcaccaagtcaaaacccccaccttcattggggacataaattatgtgctggaacatatttcacaccggcctggcagtaaccacttgtagtgttgtgcaggggaaacggtcatcttccgctaaagcatggcgttttgtgcaggggaaatggtcatctgccactaaagcacagcttccatcgtaaggtatgctccttgctcaaagagtgtggtcccaaacagcttttgggaggtcctctttgattcatggatgaaacctggaacatcttgaggactgagttaaccataggtccttaaataactctcccacacctttttcttagtttatctctacatgcaaagtgtgcagcagcctgttcaaagtcatatttttctgggaaatatttccagtgtttatttgcactttagcccactctgtgtagttctaaacttatttcttctaaactcaccattaacctaaataatagtcaaatttagggggactgtatttgc

SEQ ID NO: 17441 - DNA, 614 bp, Homo Sapiens
gcacgagggaaaagccttatgtatgtgatacctgtgggaaggcatttgctgtctctagttctcttatcactcattctcgaaaacatacaggtaagtttgacagggagagactgcttaaaataaagttataaataaaagaaaaaggggacttgggccttttagcgaagtagatcggaaactttgtagttagatatctgtttatatttctataagctatgtttatgatttttgcacatatttgttaaatataaaagctgacttattttctagaataatacaaggtgggtgaaataaattatataacttacacattaaaatcagtgagataattttgatattatataaacttgcattgagatgcattttgtgactttataaaaaccttttcagcttcctaaagggtcatctcctatagttagggttggggagtgggtttgggttgaacatggatttttaaacttcttaggacctttcctacacagatattctgggattttcaaataaggtaattcagatgcaaaatagcagtttggaaacaaattgctttttttagggtacattttttaaaagacttccctacatacttttattctcccttattaatatagtagata

SEQ ID NO: 17442 - DNA, 537 bp, Homo Sapiens
gcacgaggaatggcgccctaccgcctactggtgactcggctgcagaaagctctgggtgtgcggcagtaccatgtggcctcagtcctgtgccaacgggccaaggtggcgatgagccactttgagcccaacgagtacatccattatgacctgctagagaagaacattaacattgttcgcaaacgactgaaccggccgctgaccctctcggagaagattgtgtatggacacctggatgaccccgccagccaggaaattgagcgaggcaagtcgtacctgcggctgcggccggaccgtgtggccatgccggatgcgacggcccagatggccatgctccagttcatcagcagcgggctgtccaaggtggctgtgccatccaccatccactgtgaccatctgattgaagcccaggttgggggcgagaaagacctgcgccgggccaaggacatcaaccaggcaagtttataatttcctggcaactgtaggtgccaaatatggcgtgggcttctggaagcctgtatctggaatcattcaccagat

SEQ ID NO: 17443 - DNA, 391 bp, Homo Sapiens
  misc_feature (123)..(169): n is a, c, g, or t
gcacgaggattcctggagccccctgtacttcatgaagcctatgtccagcttgttgtcaaagaaatgtagattaattcaaaaggaacacaggattctatcggtccttttcctagtcctgaagannnnnnnnnnnnnnnnnnnnnnnnnnnnnnnnnnnnnnnnnnnnnnnaaactccttgggctgggattacaggtgtgagccaccaggcctggtgtaatgatcattttaaatacaaacataagagcctttacctcttatgtgaaattagaaattacagaattgatatttgtgtctcatacacacaagtattttgttcttaccaggggagtggaaactctgcacaaaagtaactccacttttatttgagacagagtctcgctctgtcgccca

SEQ ID NO: 17444 - DNA, 958 bp, Homo Sapiens
gcacgaggctagatttgaaagtcatgttataaaattatacgttatttttaaatctatagggaaaatgtaattcatataaaaactcagtggatttttaaatttctttttgtaatgcttaatgaggataaaagaaaagtgagatcttcataagttataagcccagaaacagaatttcttcctatattaatttttacgtgtattaagatagcttcacatatctgaattaataatatctaaatgaaagaaatcatagaaaatactgccaataaaaatgatagaggattattaacaggctataacctattataagagaaataccaccagggacataggtaaaggagaaaggtaaattataaaagaagttatataagtgaacaataaaaacacaagaaatgttaagacttataagtaattaaaggaaaaactatagaaaaattaaggtactataccttcgttgcttgggttgataaaccatagaatgctagtggcaaagcaaattggtactttcctggcgagctggaggataaatgcaaaattatgaagccaggagcaggaggaaaaaagtaagtgaatggaagtaaattacttacattgaacttttagtccaatgtaatttgctctcacagtagaattacctcccttcctgttctgtagctttagcaaaaattctaataacttaatgtacagactcttcattaccaaattctctagccaatttaatattctgaccccaaacccttccctttacggtattaaaaccatatttttgctggcctgaaattcatgtgtatgaaaagccaattttcctaaatgggttttttcactgttgatactaatcaagagtctcactgttattgaaactttctctgcagtgtcagaagtgacagtgttgcagaccttcatcacctgttggcatcacgtagcagggagagctatcacagaatagtttaggtttgaa

SEQ ID NO: 17445 - DNA, 805 bp, Homo Sapiens
  misc_feature (293)..(662): n is a, c, g, or t
tggacataagttttgctttatcaaaaactgatgtaagcatctgcataagtacttctctgtgggaaggcctcaacttcagtactaacgttctaagagtttttatgggtttttcaatgtcactctctgaaatgattatcctgacataaaacaactattttataggtatgtttagatggtcatataaaaagtgtcactgtttaatcatataaactctatcgccactattgaaaattacttgaaaattgtgcctctatatagtttgtgaactgcatgtgcatattaataactgttannnnnnnnnnnnnnnnnnnnnnnnnnnnnnnnnnnnnnnnnnnnnnnnnnnnnnnnnnnnnnnnnnnnnnnnnnnnnnnnnnnnnnnnnnnnnnnnnnnnnnnnnnnnnnnnnnnnnnnnnnnnnnnnnnnnnnnnnnnnnnnnnnnnnnnnnnnnnnnnnnnnnnnnnnnnnnnnnnnnnnnnnnnnnnnnnnnnnnnnnnnnnnnnnnnnnnnnnnnnnnnnnnnnnnnnnnnnnnnnnnnnnnnnnnnnnnnnnnnnnnnnnnnnnnnnnnnnnnnnnnnnnnnnnnnnnnnnnnnnnnnnnnnnnnnnnnnnnnnnnnnnnnnnnnnnnnnnnnnnnnnnnnnnnnnnnnnnnnnnnnnnnnnnnntggtaacccatgctattttgcactaaaatggtaaccgaatgctattttgtaacgatctcaggctgtcattttgtagaaatcaaaatggaagttcttatttaacatattgaagcatccagttctacaactgcaattaaaataag

SEQ ID NO: 17446 - DNA, 552 bp, Homo Sapiens
gcacgaggtctaactggggttccctttgcctcccatataatctacttgtagtcacatcatcatcataaggtcagcttccaggaaaacctgaactgaggactatcagtgtagttttataaaacaagtggtattttatctgttaacaataacataatgtcagaatttttaaaaaatgaataaatttaactggaagaactcttactgttctgtctttttgtcacagatatgcaccatccagtgaataatgttttcatcataatttcggttagtcttggatgaaaattaactctggggagtgtgtgttcacttccacatggccatagtcctgttatcatctattttcttccctatcctttatgttctggctgatggttctcagctgttgaatcctgttctgttccttcatgcctctgtcccatatccattttaataagatctcattactttttcaaaacactactttttcctcttcccagtcctgaactctcgggtggtgtagtcactcctacccacacagcattgcctctgcgcctcggctaccaatatctggaa

SEQ ID NO: 17447 - DNA, 521 bp, Homo Sapiens
gcacgaggctaaagcctcagactccttttggtctagctggggcccaaatgcccctgaactctctccactcccactcctgcttaccacctgataggccacatcctcgagagttggtctctggacacggccacgtgtcagtttacccacctctgcccccttgctcacttaggaattgagatgatgacaggtcctccttcccactggttaatgtgaggatttaaaagaattatcacacataaagtgcttagagcaaaatctggaacataaaaactttcagcaacttacatctgatggtatctccagcctgtcccaggtccagtgcctttggcagataaaccacctcagttttcagcctcctgctcgtctactttgcaaacgattgaccgtcaagcccgggtttgagcctgactcactccagaactctggtttatggctgtacacttgcttagatacttacactggcccccaccgcctttgatcgaagcaattgctgctgaaaaataaagcctttctgtggctct

SEQ ID NO: 17448 - DNA, 727 bp, Homo Sapiens
gtatgtaaagttcttggaatatgtgaatactcaacaaatatcactatcaatttctaaacatactgctaccaagcagatggaagtcccttttctaaggtgagcaagatgggtttcttgttgaggaggaagtttggaaagctcttcatatttattttaaggagcacttgggtagctatctcctacatttgattaaaaccggatgcaagcaagaaacttagtaaaggaaatcagatcagaaagaaaagattggcatgatgtaagtggaaaaactcagggaatacaagttttcttctaaggtcatatgtatgatttgaaagtcacaaaattttaatttgatgcttttcatctacaccacctaaatcttccatgaacctcttggttaaaaggctatattaagcacaatacttttaaaaaactagatcagagacatttttagctataaaaggctaactgaaaccattatttgagatccactgggaggcttaagagagttttgaagatagagtgagttaacagaacaaataatgtgtctgtcaagccaaggagcacaggcggctggccacctcccaggactgggggaagcctagctctagacactcctccctgccactgtccccatccattgaaccaggctcttgatgcaacaagggtcacaaatgacgctaaatcagagaactagagatggtatgactggccagctgaaaagcccatcaaaaatagctactga

SEQ ID NO: 17449 - DNA, 971 bp, Homo Sapiens
  misc_feature (86)..(197): n is a, c, g, or t
  misc_feature (239)..(250): n is a, c, g, or t
  misc_feature (477)..(537): n is a, c, g, or t
  misc_feature (547)..(571): n is a, c, g, or t
  misc_feature (607)..(618): n is a, c, g, or t
  misc_feature (670)..(731): n is a, c, g, or t
  misc_feature (852)..(903): n is a, c, g, or t
gcacgaggcctgagtgtacgatattgacctgtagcccagcgtgaaaaatttataaataaatttttcattgatctttttatattacnnnnnnnnnnnnnnnnnnnnnnnnnnnnnnnnnnnnnnnnnnnnnnnnnnnnnnnnnnnnnnnnnnnnnnnnnnnnnnnnnnnnnnnnnnnnnnnnnnnnnnnnnnnnnnnnctggaaagaatgaaaaaaaggtcggagtttaacatcttggtnnnnnnnnnnnncggtccctctttctctcctgaggtggtttttagaagaaggcttggggctttctttttcccattcttgtggtgtggaaaaattggggatgttgaccattattgtcagtgggcgaatattcctctgttgccgggggtgggtaatcaaaaagagagccgccaccgtttggccctctctaggagtgggcccctgtgggtggcatagtgcccttccccgctgggcgcccccnnnnnnnnnnnnnnnnnnnnnnnnnnnnnnnnnnnnnnnnnnnnnnnnnnnnnnnnnnnnnaggtcgctcnnnnnnnnnnnnnnnnnnnnnnnnnggaggggcgtattggggttttttctcaaggagaaannnnnnnnnnnntgctttgtggggttcataatgttttgagggggttctcccctaaaaatttttnnnnnnnnnnnnnnnnnnnnnnnnnnnnnnnnnnnnnnnnnnnnnnnnnnnnnnnnnnnnnncgtccctcatttggagagtgttctttttttctgggagaaaaaaataaaaccaaggcgagatttttttggtaataaggggtttgttatcgctgaccccttggtaatagggtcgggtaaaaannnnnnnnnnnnnnnnnnnnnnnnnnnnnnnnnnnnnnnnnnnnnnnnnnnngggagagtgtttggggggctccgcttttggtttttcttataaggccccattttggggtttcttgtatt

SEQ ID NO: 17450 - DNA, 611 bp, Homo Sapiens
  misc_feature (239)..(288): n is a, c, g, or t
  misc_feature (291)..(347): n is a, c, g, or t
  misc_feature (417)..(454): n is a, c, g, or t
  misc_feature (476)..(527): n is a, c, g, or t
taatgacccttttccattctaaaagtactttggcatccattatctcagatccttgcaagccatattcccttggaacattggtggtactagagccaaacccctcctcaagatgaataataatagtctttcccattttagaaacatattaaatgaatggatagaattttctaaatttcacacattcctcctatcagctttacttgataaaaacaaatattgacagagaaactcagttatgnnnnnnnnnnnnnnnnnnnnnnnnnnnnnnnnnnnnnnnnnnnnnnnnnngtnnnnnnnnnnnnnnnnnnnnnnnnnnnnnnnnnnnnnnnnnnnnnnnnnnnnnnnnngctcaagtgatcttctcaccccagcctccagagtagctggaactacaggtgtgtacgactacgccttgcnnnnnnnnnnnnnnnnnnnnnnnnnnnnnnnnnnnnnngagatgggctcactctgtcatnnnnnnnnnnnnnnnnnnnnnnnnnnnnnnnnnnnnnnnnnnnnnnnnnnnntggctcaggtaatcctcccacctcagcctcctaagtaattgggattataggtgcgccccaccacacctttgctaatttttttgt

SEQ ID NO: 17451 - DNA, 885 bp, Homo Sapiens
  misc_feature (255)..(297): n is a, c, g, or t
  misc_feature (651)..(666): n is a, c, g, or t
  misc_feature (722)..(734): n is a, c, g, or t
gcacgaggcctctctttttttaaccctataaagaaagtaactttttgaaatgatcaatacactttgtattccttagttctgctttctttagcccctttctgcctataaagcccacttcctctgctcaacttactgaagcagtattccattttatagaatgagatgctgcccaattctggaatcactaataaaagccaattagatctttacatttgttgaaattttgtctttgacaacattactagttatattatnnnnnnnnnnnnnnnnnnnnnnnnnnnnnnnnnnnnnnnnnnntccttcccatcagatttttctcattaatagaagtaatacattcaaaacactgagccaggctcacaccagtgagcaacttgttaatattactcagaagcatattatagatattgacagaaagcaatactgttcctaattaggggaagaaattctaagagagtacctaagagtttgaatttagattataacatttgctctgagtattttacattacagcctttggggggaaaagtacaaatgagatctgagaacagtggtactcatctttgaggaattatggaaaacgtaatagaacactaaacatgggaaaacatcggccttcaggttgaaaagtggaaatctcaatccctgaannnnnnnnnnnnnnnnactaagtaacttttttgcccattggtgtcatttaaccaaaagaagaagaaattccnnnnnnnnnnnnntcaactgaaacaaaagaatagactgaatttgccaaaagagtgcttaaatggagacctaagtctccaagctaaggtgatgagaaaagacaggtcttaatttcttcagagcttcaagaggcaaagcttgaaggagaaaaaatttattcttagg

SEQ ID NO: 17452 - DNA, 841 bp, Homo Sapiens
  misc_feature (282)..(513): n is a, c, g, or t
gtcagtgacttgaatcagcacctaactaaatacaaatcatatagacatatttgtttctgtgcaaacttaaaaacttaaaatatacattaaaaagccctttaggggtctataaataaaaattaaatcactatatttcactatattcttttgctgcagaaatttgtttttacaagtcatctttgctattaattccagcaaaatacttcaaatatttcaagcagtgttttaggtaaataaaacattacatttacaaattaaagaacaaaattaaacctctaaacnnnnnnnnnnnnnnnnnnnnnnnnnnnnnnnnnnnnnnnnnnnnnnnnnnnnnnnnnnnnnnnnnnnnnnnnnnnnnnnnnnnnnnnnnnnnnnnnnnnnnnnnnnnnnnnnnnnnnnnnnnnnnnnnnnnnnnnnnnnnnnnnnnnnnnnnnnnnnnnnnnnnnnnnnnnnnnnnnnnnnnnnnnnnnnnnnnnnnnnnnnnnnnnnnnnnnnnnnnnnnnnnnnnnnnnnctctaaacattaagaacaaaaggaaaatacccacagctttctgttattacaatttaaagtcaagatcagtcaaaagcagcatgttataactcatccaaacaattcatcattgcatgcaaggcctaaggctgcactacaggtttgaataatgacaaatccttgatttgtcaaggattaacttgacatggggttgcaaatattaatatcataaaaggtttctttttgcctccatcaacctcatcagaagaacagagaaaatcgtaaatattctttcttattttcagtacctttgcatggaattaattttatcaacatatttttataatgg

SEQ ID NO: 17453 - DNA, 914 bp, Homo Sapiens
gcacgaggcatctaccaggtctgggaatacaaagaataaaatattcctctccttgaggtgctccgcatagtagggatgatgaatgtaatgtaatcaacacacaatccaacccatggtgcaggatataggctagttcagtccgttaggatccaatggggctcctgctttgactcctttttcttccctcaattgtcctgaaggctttttgttgctaggcagctttccaaggagagagaatccattgtttttactagttctgaggcagaaatgagatgcccaagcagtttctgttctccctacctgtcttcccacacaggttgagtgcagtaaggggctgagagtgcacccttccctctcaggcatgtcacgtactgctacacccctgtgatgctggtccttccccatacattttctttagtatatgttctgtccatcattatcttctaaatcatcttccagaagacttgctaactaatttctggttgagcagtgatccccaggctttatagagtgccagtgacatggcctcggtgtttgtttttttgttgttctggtgaggtctgctgagagaatgctaccatcaggagagaggaagatgggtctccaggctgcaccactggctctggggcccaggcagttggcatgagtgaggagagagtcatttgttgtaaagctggggctggccagttgtcttatgtgtggtgagagacccacaaggaataactggaaatcaactttggtaaatatgggggtgagatgaggcatctttaaggcattgggaacaaatccttccgtgaatgaaatgcagattggtgttatttgggttactcagtgagcagagtagtgtcagtgagtgggtgtatgctgaggagttctgcattgatccagcaggcaagctgggtccccttcggaaa

SEQ ID NO: 17454 - DNA, 585 bp, Homo Sapiens
  misc_feature (47)..(72): n is a, c, g, or t
  misc_feature (116)..(206): n is a, c, g, or t
ttgaggccaaactagcctgggtaacttaacaagaccccatccccacnnnnnnnnnnnnnnnnnnnnnnnnnnttaacctggtgaggctgtgcatgcttttggtcccagctgttcgnnnnnnnnnnnnnnnnnnnnnnnnnnnnnnnnnnnnnnnnnnnnnnnnnnnnnnnnnnnnnnnnnnnnnnnnnnnnnnnnnnnnnnnnnnntgaataaggtaaatgttacatgtctcccgcacccttaaaataaaactacagacatccaagccactcctaccccgctcacccctgctacacaccgcctccataccttgaccggcctatggctgtactcggattgcattctcagcctccacttcaagcctgcgttccctggggaggtcattcaaccctagatccaccatatgtcatgcccaaccaatctcagttactttgcgagttcacctccatcctgagtggacgctcaagcaagactgctggagctgcagatctgggaggttcgctgcaccaccttgatgctcagtatgtacttttgaaatataccggattgttgagatttgagaaaatctcataaagctgctgaaaa

SEQ ID NO: 17455 - DNA, 892 bp, Homo Sapiens
gcacgagggcctctttttcgcactccatatatcaaatcctatttattgtacttcagaaataccactaaacccagcttctcttagtatctttatagccacagaaggtcactgaaaggctttaagcacaaaagtggtacaggtagaattgtttcaagaatgattactatgcttgcagcaagaggaatctgttgaaaagttggaagtacagagacaggctgggagttattaatgaaatccaggaaagagactatggatgcttgaactaaggtgatggcagtggagacacaggaaaattaattcatttcatagataagttagtaatggacttgatatgagtggtgctgaagctaggaagagctgtgaagggtgagtctcaagtttctgtcatagcaactgggagattattgtgcaattttctaaagagaatcgggaaggagtaatggttgcttgagggaaagattgtatgcctgcagtcatggatatgttatattgaaggaattttggcataaaagtaaaagtgtttataaataaattgtataaatagatccaattagaagaactgaggtccaggctattgatgcaaatttgaaagtggttagagtattgacgcaattgatgccatgggggatggagcacccatgaagaaagtggagtgtagggcacagttctgaacaacacttgcatttaatgattggtagaggagaagtcattcgcaaaagagacagtgaatgaaatacattacagagcaaagccagaggaaagagaggaaatagtgcttcaagtctgcaagcatgtccaggaatgtcaatgttgttgaagggtagcaggatgagtgctgaaatgacgttcatgggatttgccactatgggtcacttgagtgaagctggatgga

SEQ ID NO: 17456 - DNA, 881 bp, Homo Sapiens
  misc_feature (351)..(578): n is a, c, g, or t
gcacgaggccagaatattttaggtttttatgtttctagtaagttatatatattattaaaagaatattttttgtcccaatgttgctattttctttggaaaataggtacaaatttccaaacacaattgcttggtctacaatttttttacacctaaggtttatcttacagcaatatgtttatatatttatctccatgtaaatcaaaactagaagtctgtacatgtttgccagaagagatgccaaatgtccaaagaaaaatatggaacatttaaaaacatatttattcaggacacagaaatgtctaaattataattatattctgatataattctaaatacaatcataaaattacnnnnnnnnnnnnnnnnnnnnnnnnnnnnnnnnnnnnnnnnnnnnnnnnnnnnnnnnnnnnnnnnnnnnnnnnnnnnnnnnnnnnnnnnnnnnnnnnnnnnnnnnnnnnnnnnnnnnnnnnnnnnnnnnnnnnnnnnnnnnnnnnnnnnnnnnnnnnnnnnnnnnnnnnnnnnnnnnnnnnnnnnnnnnnnnnnnnnnnnnnnnnnnnnnnnnnnnnnnnnnnnnnnnnttaacatgagaacaatattcttcaacttatttgctgtttaaagccactggaaaaagaaattactagaaatgtcattaaactatgttactaaaagtatactgttaccattttttacctacacccttgagtaaggttcacacacaatcttaaaagagaattttaaaatttactgtattttattacataaatgtgcaactggtaaaagcaatttattactaaaattcaagatttttctctcactataatgcagaagaatattactctgaacatgtacgtcatgcatcatgcaatgataagtcaacc

SEQ ID NO: 17457 - DNA, 411 bp, Homo Sapiens
  misc_feature (77)..(185): n is a, c, g, or t
  misc_feature (189)..(257): n is a, c, g, or t
gcacgaggccacctcccaggctcaggtgatctcccaccccggagagtaactgggactacaggcgtgcaccaccacannnnnnnnnnnnnnnnnnnnnnnnnnnnnnnnnnnnnnnnnnnnnnnnnnnnnnnnnnnnnnnnnnnnnnnnnnnnnnnnnnnnnnnnnnnnnnnnnnnnnnnnnnnnnaacnnnnnnnnnnnnnnnnnnnnnnnnnnnnnnnnnnnnnnnnnnnnnnnnnnnnnnnnnnnnnnnnnnnnnaaaaaacatttgttgcgtggttgaggttcagtaactggccttagtcacgcagctcctcacggcagaagcagaatttgcctttgggtctaaattacttggcatctatgtgactaatcccaatcatgtaccacctccgttgtattttttaaagagt

SEQ ID NO: 17458 - DNA, 617 bp, Homo Sapiens
gcacgaggtctggatacatgaaatatggtcaaactccatcacaacatattgcaataaaaactgttcagggtattttttgtactagaattttgtagatggaaggtaactttggtaagggatcatcttctgaagttggccataaaagcccatcatgctgataatcagtttgttgtaatggtctttgacctgtaggagatatgcaggaaatggaagttgcatgcttagctagcataaaacgattcctgagcaacagtaaaaagcattccaagccttccccatcactttatagcaaagagaacaaaaagatgacagtgaggaagcctcaccaagagaaacacaacatttccaacatgcaacaggttaattaggcggtcgacacagcttctatctgtggaaaattccaaaatggacaagaaatctagaatgatttcttatgcatctttgaattccctagtggaatgctacataccaaattaataacacattgcaaactgggctactatggagggctaaaagtctctttttgtgtgtacaaatattgcaaattttcttcattgctgtggtagatatttaacaagaacataaaataactcacctgcaacgaaagactgtgcatt

SEQ ID NO: 17459 - DNA, 287 bp, Homo Sapiens
gcacgaggggctattaaaatactcttctcttttccaactacgtgcctgtgcaaagtcagatttttttcatatacttcagccaaaacagcatatcaaaatggattgaatgcagaagtagatctgagaatacagccacttttgttaagccagacaatgagatttgcaaaatgtaaacaatgctgctgttctcagtttttaaaaatatgttttttaaaagtatttatgttaatgtgtacttggtttactactgctatttttaaataaaacaagaaacatttttaaatgtc

SEQ ID NO: 17460 - DNA, 287 bp, Homo Sapiens
ctagtctcatttccttttgtttatattctatatatatttcatttttggttactatgagaattacatataacatcctagagttataacattttaatttgaatttatttcaacttaagttcaatcacataccaaaattctactgctatatatatagctctactctttttatgttattgatgtgacaaattatatctttattcattgtataccagctaacagatttacaattacattttatgcatttgccttttaaattatgtagaaaataaaaagcagagttacaaacc

SEQ ID NO: 17461 - DNA, 865 bp, Homo Sapiens
gcacgaggcacaaatgagtgagaatacacagtctttccatgcctggcttattttacttattatgtcctactgttccatacatgtagttgcaagtgacaggatgtcattcttaagtatgactgaatattcattctattgtgtatacataccacactttctttatccattcatcaactgatggacacacagggtgattctatatcctagtgattgtaaatactgccataaacatatcagtgcagctatctcttcaatatatttacatcccttcttttggatgtagcccatggaagaaatgctgaatagtatggtagttttatcaactaattgttttagaaaaccgcgcccggccaggagagtgtattttctacacataagttcaggtcatctccacacagacccagtttgcctccctcttttccgatctgaatgcctttaatttccttctcttgcctaactgtactggctagaacatcccgaactaggttgaatgaggtgctgagagtgggcataattggcttctttacctccgaagaaaatatttcatgttttcttcattgattatgatgttagttgtgggtatttcatttactgcctatatggtataaagatacattccttctatgcctaattggttgacagcttttattatatcaaattctataaaactgttttatttttaaatctattgagatgatcaaatggcggtgtccctcctcctttataagactatttaaaacatccttgcctcagagggacaaatcccatttgaacatgggcagtaatcctcttaatataagtggaattaggttgacagaaattaccagtgaagcactatgggcatatatttgatagagatttttat

SEQ ID NO: 17462 - DNA, 867 bp, Homo Sapiens
  misc_feature (312)..(325): n is a, c, g, or t
ctataccatggtgtcataacaccacttacaacaaatgccaagtctttctgaaggaggaatctttacttgaaatatgcaagcactatttagcattgttttgtttttaaagattggtcacagtgtgaatgcccttcctactgcaggggataatgttaagaaatttaacttgaaaagagtttccagctcatcttcacaatgtaatgatactcctgctaagtctggatttaattacaaatcaacaaagaatgaggaagggaggaagttcaacatggctccccatcactccatcactgccccccaccatcactgacnnnnnnnnnnnnnnggtctgtgtacatcacagcccagagtgattaataacctgtgcaaacagactattctagagatcacaaactgcctttttctgtgtgtgttagtttagtagttgaggctatttgagggatcttaaaagcactacagaataaaacctttgtttaaaggaatatcgggcacagattcttctctctgctcctcctcacagaaacttaagcagaactccttgaactctgacctgaaaggacgcttgggtcagccacatctaatcctagactctgagattagtttaatgatatttgaggcagctgggatgaacccagctaaattctgtgtgctaaattctgtggccacattgtaaaatgagtcattgttcctcggggagagtcttcttgtctcaattggtatttgagttaaactgatattactgatcacctattcctcagtacagataacttcacaattagaacaggagtatatttgtgccttgttgatcagaactccatattttccagtatcatctgcaaaccttgcttcttcgcaaaaattgaacaa

SEQ ID NO: 17463 - DNA, 834 bp, Homo Sapiens
  misc_feature (64)..(400): n is a, c, g, or t
tgtctttttcatgagttatttacagggagatttattccaatttttgaaacaacacagaatacannnnnnnnnnnnnnnnnnnnnnnnnnnnnnnnnnnnnnnnnnnnnnnnnnnnnnnnnnnnnnnnnnnnnnnnnnnnnnnnnnnnnnnnnnnnnnnnnnnnnnnnnnnnnnnnnnnnnnnnnnnnnnnnnnnnnnnnnnnnnnnnnnnnnnnnnnnnnnnnnnnnnnnnnnnnnnnnnnnnnnnnnnnnnnnnnnnnnnnnnnnnnnnnnnnnnnnnnnnnnnnnnnnnnnnnnnnnnnnnnnnnnnnnnnnnnnnnnnnnnnnnnnnnnnnnnnnnnnnnnnnnnnnnnnnnnnnnnnnnnnnnnnnnnnnnnnnnnnnnnnnnnnnnnnnnnnnnngagaacaatgcattttaaatatatttcctgaaataatattccttagaaaagatacagggtatttaattacctagattttaacaaaatattctttatagaaataattatagtctttaccacagagtcaccaaatctgtacccaatcaaaacagagtcaaatagaccagctctcattcaactccattaggaaacaccaatttcacatagtacttctcttgatgtacagcagcaacctctgctggagaaaaaagggtatacttctaataacaaagcactgagctcaaacctgttttgaacaggaagaactgaaagttagatttctttcatttcctgttaaaccaacacctaagttaaattattttcaaggtcttaaagacgcacgggccctatcaagtatatcctttctgatttttggatagttggatgtgcttcca

SEQ ID NO: 17464 - DNA, 525 bp, Homo Sapiens
gcacgaggcctcttttccgtcctccggccccggccccgcgcggctgatgaggcgcggccaggaccatgtcggcgggcggccgtgacgaggagcggcggaagctggtcgacatcatccactactggaacgccaaccggctggacctgttcgagatcagccagccgaccgaggatttggagttccatggagtgatgagattttatttttaagataaatctgctggaaattttgcaacataatgtattcgggtctctagtactgccaccactctagatgtaatcgaaatgctcgcggagaaatttcgacctttttatgcgaatgctgtcctctcccaagtattcactctatgaagtgcttgtcttcggagattaaagaagattggatatagatgagaaacctctagttgtacaattgaattggaataaagatgatcgggaaggcagatttgttcttaataatgataatgacgccattcctcctaagaaggctcatagtaatggacctgaaaagcaggaaatataaggg

SEQ ID NO: 17465 - DNA, 976 bp, Homo Sapiens
gcacgaggattaatcttctcctagaaatatagacagtctcatacataaacaataccctttttatatctaaaaattaatagtaatttgataatatcctctaatttacagtttatattcaaatttcacaaatcccataaatgtcttttataggtgtgtttttccagagcagtatcccatcatatatttgcatttggttattatatctctttagttcccctgcttttttccccataagattggaatgctccattaggtgttaaggacactgtttgagcacttggttaagatggtgagtgccaggtctctctatggtaacagttcttttctttttgcaattagtgaacaatctgtggagtgattctttgtcaccatcgggaaacagaaagacagacgatatatagatagatcctggaaaagttctttagttttctttacaaaaatagccaaagaatttattgagacttcgtaagtgttaacatcttcattttattatacataattcaaggtgctgtttctcaaatgtgggtaaatatatccccagagatatgctgtagaaggctgagttaggcaaagtgcacaggacagatcagaacttacaggaattattttatgtggtgatattaacacaatgtaaaaacgctttcatgctgagacaattgcagatatattaatggagtaaaatgtaaatccacacatattttttaaatgaagcatgcaaattcaaagaaaatttgagcttagggagtttaaaataggctgctttggactatttccctaacctcccagaagtccttttctacttttctgtcctgaagaggatggtcataggaaagtgtgagaggtgctggctttagagacatatctgtattttgtccctgaggaactggtggaacctctcttctagagtatctaaaggaatcacccctgctcgcatgtagcgactccaattctgctgaaactccttgtttgcactttt

SEQ ID NO: 17466 - DNA, 259 bp, Homo Sapiens
  misc_feature (98)..(125): n is a, c, g, or t
  misc_feature (150)..(158): n is a, c, g, or t
  misc_feature (202)..(213): n is a, c, g, or t
gggaattttttttccctttcaattttgggccccaaacgaaaccggggttaacccaaatttttttggggtttaaaaacccgagaaattttttccccccnnnnnnnnnnnnnnnnnnnnnnnnnnnnccccctttatttggaccggggaatnnnnnnnnncactttactttaggcccccatttcccccaaaaaattcccctttnnnnnnnnnnnntccccctgggggaaaaaattttgaacccaggcaaacaaccattttt

SEQ ID NO: 17467 - DNA, 296 bp, Homo Sapiens
  misc_feature (49)..(64): n is a, c, g, or t
agccctttttataaagaacccacagggaaagtgctgactttttaacatnnnnnnnnnnnnnnnncccctggcattctgggaatccagggaaaaagcccaaacaaggaaagggacccccctttttttgaaaaaggttacttttttaaaaaggggataaacctaattgggaattcaaaaccgtaagagggatcttgggggggaaaaaaaaccccttttcatgtttttagggaaaaagatatcaaaaatatccccattcccctttaaaaaatcagggggataacccccctggaaccatt

SEQ ID NO: 17468 - DNA, 830 bp, Homo Sapiens
gcacgaggattctttcagttcctcagatacttctcccttagtttttgcagtttcactgggattatgttttgggaaacaaggaaaggtctagatgcttaaacattttaaataaaaattccttacagtttcatcttcccaacattttcattctttaaggctactttcctactaactgaaataacacatttacttttaccacaattcctcaaaataaatttattctaacattgaaaataacattacaagttaatcattagcttgatgcatgctaaaatgtagcttttaaaaagcattctgcattagtactaaaataagccatcaatgccagtccaccctctctattcatggctaaatatttaaaggttatttatagcttctttaatgaattcttcttaaacaaagtgaaattatgtcctagaaaagtagaagctattcgtaactagagcagtgcaactttaaagttttatgaatatgtattttaatgacaagggggcgagcttgcatccccactagttaatggataattcaaaccgaggactgattttgaaagatcacctaaaaatgtagatttgttctttagtaaatttagatcaactatgcatatattttgtaggtaaatctttcagtccatgccccaaccctcaccaaaaccaaagcagaaattacacacacaaagatgctcccgttaggaattgctattcacatgaggctttctgtgctagatttttttctcagaaacaaactttactgtaggactattgtggtgttcttaacagatttgtaatttcaagatgcgtgtcattaaataatttttcatgttcacagacttg

SEQ ID NO: 17469 - DNA, 905 bp, Homo Sapiens
ctttatttaaacaaacgtgttgatcactctctctttatttgggcggaagactctcccttgtggaacctgggggtctttgatcccaaaccctaaatatctgcgggccaaaacccctgaaaaccccagggtaagagggtgaccgtgtgttctctgccgtggctcaaacaggccttttttgacaaatatccaaaatttaaataaacttctttttcttgaaaacggacgggtctgcaatttaaaaagtgggggcatgccctgtgttgccttggaggggctgacttactttgggaattccaggcaatgatgatgaaactcgggtttgatgagcgccccttaaggtgtgtcgtgagagtcataaacctccactctctctttgatccccccatattccaagaggcttacccgcccgcaaattgtgtgaaccatctctgtcactcccccagtttacaaattataattgggattagaaattccatattgaagagtggtgaaggataactaacatatgtccgtcctattgcagagttgccaaatgaaaaatttattccaccaaaactttatatagctacagaaaatgcaaatacgccgcaattcaaattcaatttacttttttccacccgtagtggaggggagcttctagtatgacattcaatgttccaagcattggatatcgccattctattacaaggcctatccgagcatcgtgcaaaggcctttaaatctcaataggagggtgcatctggtaagcacgggatccttcccaagcatgtggatacttagacttcccaagggtccgtttccaaatcctgccccccggttgccatctgttttcataaatattaccccaaagtaattgggtagaggtaagaaagttttcccaatactaaaatcgtcctcgtgccttt

SEQ ID NO: 17470 - DNA, 559 bp, Homo Sapiens
gcacgaggtgcatgcataaacgaaggcctcctggaggaaattatacctaaaactgggtacaaaagaatgaattaggagtttactaggagagggaggccttgggggataagggcaatgggagaaaagtgttttaggcaaaggaaacagcataaacaagctccaaggagagagacagaacgtggcctacaagtgcacaggcaaagcttgggcacagaatttgagaaaatagcatgagatgaggctacaaaagggtgcctgatcatgaaagattaggcgagccacgtaaaggagtttggacttgatcccaagggtcctgggaggcagtgaagggttttaaactagagacagatatgatcacatctatgtctcagaaaggtttctctggctagggggtagaggaaaggattgtttaatctctttcttcttaaaaagtaccctcttgggcataataaaaactataggctcaaacatggaatgcatcagagataagaagataaagcacttacccttaagaagcttggtctaatgggcagggcagaaaccagtcccaaaatagtgt

SEQ ID NO: 17471 - DNA, 786 bp, Homo Sapiens
  misc_feature (131)..(408): n is a, c, g, or t
  misc_feature (410)..(456): n is a, c, g, or t
actgatgtgtatctgtatgtctatttgtgtatattttgtcatgatcatgtaacagagtctgaaaagtgtcgaagagacagttttcaggaacaacaagcaattattcctactttccaagttattttgatgcnnnnnnnnnnnnnnnnnnnnnnnnnnnnnnnnnnnnnnnnnnnnnnnnnnnnnnnnnnnnnnnnnnnnnnnnnnnnnnnnnnnnnnnnnnnnnnnnnnnnnnnnnnnnnnnnnnnnnnnnnnnnnnnnnnnnnnnnnnnnnnnnnnnnnnnnnnnnnnnnnnnnnnnnnnnnnnnnnnnnnnnnnnnnnnnnnnnnnnnnnnnnnnnnnnnnnnnnnnnnnnnnnnnnnnnnnnnnnnnnnnnnnnnnnnnnnnnnnnnnnnnnnnnnnnnnnnnnnngnnnnnnnnnnnnnnnnnnnnnnnnnnnnnnnnnnnnnnnnnnnnnnngttattttgtacttgttttgagcacaggactcctgagggtatctttgcatttaatattacataggggtgccagtgggaagtaatgtgtatgcttggcctcatgagctaaaaccctgtgttaattatgacagaaggaaagtgtgtgagagggatcttaactacctagcagctctagctgccatcttgaaccatgaagatacgggccacacgtaggggtagctgggtagtgagcagcaagaagccttgtttggatgagggcacgaaggagcagaatcactgggaacactgtgtcagccctaattacctacctctggacttttatgtgagggg

SEQ ID NO: 17472 - DNA, 417 bp, Homo Sapiens
cgcacgaggcacagttataggtgaggactttgacactcctgtcttacttattgatagaattcgttcacagaaaattagcaaggacatagaagaactgaacaacactgtaaaccaactggatctaattggcatttatagaatacttcactcaacaataagatatacacacgatacatattcttttctagtgctcgtgaaacattcaccagggttgactatatcctcttccataaagtaaatttttaactgattttaaaatgtgaaaccatacagagtatgctctctgaccataacgtatttcaaccatccctctgtaacagaaagataactaggaaaccccaaatgcctggtaatatagttaagtccataatccgtacgtgaaaagaggaaatttcatgggaaactaaaaaatattta

SEQ ID NO: 17473 - DNA, 566 bp, Homo Sapiens
gcacgagggccatcacgacctcaaactggctcctaatctccagctttcctgtcattgaaagcttcggaagtttactggctctgctcccgcctgttttctttctgactctatctggcagcccgatgccacccagtacaggaagtgacaccagtactctgtaaagcatcatcatccttggagagactgagcactcagcaccttcagccacgatttcaggatcgcttccttgtgagccgctgcctccgaaatctcctttgaagcccagacatctttctccagcttcagacttgtagatataactcgttcatcttcatttactttccactttgccccctgtcctctctgtgttccccaaatcagagaatagcccgccatcccccaggtcacctgtctggattcctccccattcacccaccttgccaggtgcaggtgaggatggtgcaccagacagggtagctgtcccccaaaatgtgccctgtgcgggcagtgccccgtctccacgtttgtttccccagtgtctggcggggagccaggtgacatcataaatacttgctgaatgaatgcag

SEQ ID NO: 17474 - DNA, 333 bp, Homo Sapiens
actatgactcattcaacaacaaacatttattgagcacctactggtcagggccctggaaccactagactcttagtccagtgctcttcaggaccctggaggaccctctgcaatttggcctgagactccagccagcagctggaaactcctcgtccaggagactgtccaggtgaggagctcagcagtgaggagggcggaccccatcagcccacttgccaacctgcaatgccaccaccatcctgtggtccagagacatagaagtggcaggatgggtctggggtgcagcacccatgggtgaggcaggatgggggtccagtcagctgtgtccatcttaag

SEQ ID NO: 17475 - DNA, 870 bp, Homo Sapiens
gcacgagggtcaggcctggctctgctgagcagctgtcctgagaatggccgctccacctgccagccagctgaggcttccctccctccttgcactgctggctggaagtggctggaagagatggagggaattaacctccttgcctggcacctggcttctgctaggaaccatggtcaaaggtgagagtgaggagggaacagaaagggagtgttgagctcggggtggctcatgttggttacagcatgaggggtcagcactcgcaggtctgctgcccaccctgcccccaggggctgcctttttgggtgtcagtttgtgaccaacggccttggctcccacgggtgctgctctcccagcaccatgcatggagaccactgggccccactgttccctgtcctccctgggcccagttcacagcaggtgtcaaggctgtgtgtgagatctggctagagcaggcccacctggccctgagatgccatccccacctcccttttggagctgggttgggtggtggtggggacaagcaacagagggagtgggactccaaacacatgtgggggtgacactgtgcacttggtggcctgggccccactgacccccagcctatcaccacaggacctgcacacaaacagcccaaggcacagcaagggctcctacaatgacttcagcttcgtgacgcacaccaatagagagggcgtccccatgcgtaagggcgagcacctgggcgagttcaacctgggctccaccatcgtgctcatcttcgaggcccccaaggacttcaatttccagctgaaaacaggacagaaaatccgctttggggaagccctgggctccctctagagtctctttcctgattatggctgctagggaatcttt

SEQ ID NO: 17476 - DNA, 419 bp, Homo Sapiens
gcacgaggcactgaagtcctgtccagctctgaccttctgtgaagtgcactgttgagcagctctggaagcttctgttccagccatagccacacaaaggagcagcaggcaggcatcaggcccaaactgctgctctctgatgggcttggaccccatgaaagtggggcctgctggatgcatttcctgggattctgtggaagctgatcaggttgctggggcaagtggaggcagggtaaaggtgaagggctgtggtatggagaacctcagaagacttcatctggggtccgggaaagtacagagagggtatatgaggggtcgggccctccagatctaagggtggggtggtggcatgtttcttgagttggttcctggaaagggagctgaaatggtttaatcgctcttccatgaaacgcaggcggtga

SEQ ID NO: 17477 - DNA, 475 bp, Homo Sapiens
  misc_feature (404)..(413): n is a, c, g, or t
gtgtgagcttctgtgcccagccatagatcccttttaattaacacttctgcgactccaattatttaggatcctggttcaccgtatgttattctaatcactttttctctgttgtttgtatttaccttttacttcactgtcaatattttataaatcatattagaaaactcaagatttaaataaaatcaaaaagttttaatacattaattttaaacaggaaaaatgtaaataaagcaagtgcatattttgaaagcaaagttttgagttaaatttaggaaataggcatttaggctagtgccaagaaaacttacacgttctttctgtgtgtaatttggaggaagggatggattttgttcacagtcattatttattttttttcagggcttgttaggagggaaaatcataannnnnnnnnnactatcagattgtttaaaggctaggttctgaaataagactgtgcagggttgaaaactaagca

SEQ ID NO: 17478 - DNA, 620 bp, Homo Sapiens
  misc_feature (105)..(265): n is a, c, g, or t
cccccgggctgcaggaattcggcacgagggaaagattgaaatactggaacagaccagaggaaactaaggaaacttaattgatgactgaatgcagtgtgctgtgtnnnnnnnnnnnnnnnnnnnnnnnnnnnnnnnnnnnnnnnnnnnnnnnnnnnnnnnnnnnnnnnnnnnnnnnnnnnnnnnnnnnnnnnnnnnnnnnnnnnnnnnnnnnnnnnnnnnnnnnnnnnnnnnnnnnnnnnnnnnnnnnnnnnnnnnnnnnnnnnnnacctccctgtattatccttatgcccttacttgaaagttgtttcagcaatagaagtttatttaaaatattgtgaagggcctgagtatttttaaatcaactggagtgactctcttttgtgtatttgtgtacagatgagtttttctgcatcgaattttatctcctttccttgcagaagaaagagaattagccctttacagagataacagttgcctaagccagctcttttctcctctttttgatgttcttctttttctctcagtttgaaaattgtaggttatttgagtttttaaaatgtctattgctacatacacattctagttatattctagtccaaacaatctagtaaaatatctaa

SEQ ID NO: 17479 - DNA, 454 bp, Homo Sapiens
gcacgagggttctcttccctctctcccaataaaagggctcccattataaatgccatgtacttctcttgggaaaatagacccccttgcctagagtaagttgttaactgagggctttaaacctggaggctcttcctgaaagtatgttcatgaataccccaagcatcaaggtctaaataattttcagaagattagaattgggtagatatactgttggatatagccatggtaaatttaactgaggaattaaatccttgttaattttggtgtaaagatttgtatcctggcctgtttattcaggtgggagatgttctgtataattttgaggtatagcttgaactcctagaacaagagttaaaagttctttttagctcattcacaatcacttgtgtgttaagtgttaatatctgtcatgaacctgccaatttgtacgtgttaagcagctgacagatgatgc

SEQ ID NO: 17480 - DNA, 874 bp, Homo Sapiens
gcacgaggattatacctcctatgggtttggacaaatgtataatgacatatccactattatagtatcatacggagtagttttgttactggtggacggtatccaggtttttggtgttttgaacaaagaattggacaaaacgcacaaagcaaagaaagaatgaagcaagaaaacagatttgtttaaaacaaaagcacactccacagggtgggagggggcccgaacaagcagctcaagggcttggttacagagttttctggggtttaaataccctttagaggtttcccattggttacttggtgtataccctaacccagcaaccactgatctttttactgtctgcatggttttgccttttctagaacgtcatatagttggaattacacagtatggagtagccttttcagattggcctctctcacttagcaatatgcattcaaggtccttccgtgtgtccttttgtggcttgatagctcatttctttttagtgctgaataatattccattgcctggatgtaacacagtttgtccgttcacctactgaaggacatattggttcttccaagttttggtaattatgaataaaggtgctacaaacatcaatgtgcaggtttttgtgtagacataaatttttgattcctttgggtaaatactaaggaattcaattactggatcatatggtaagggtttttctagtttttcaagaaactggaaaactggcttctaaagtgactataccgtttttcatttcccaccagcaatgaatgacagtttccattgttccacatccttgccagctcttggtgctgttagtgttatgggtttttggcattctaacaggtgtgtagaggtatctcactgttttaatttgcatttc

SEQ ID NO: 17481 - DNA, 484 bp, Homo Sapiens
cccccgggctgcaggacggagactgcccaggtgtggtcaccatgttcctctccgcggtcttctttgccaagagcaagtcaaaaaacattctggtgagaatggtgagcgaagctgggacaggtttctgcttcaacaccaagagaaaccgactgcgggaaaaactgactcttttgcattatgatccagttgtgaaacaaagagtcctcttcgtggaaaagaaaaaaatacgctccctttaaacggtggattgaaaatgactttgatttataaagagaagactgagggcggggatactgattcagaaatcctgtagcgtgtaataaaagaagaggaaatggcatggaatcactgcctcctgtgatttgaaggccattgtgaaggaaaacaatgcagtgaaagaaagttcttcatattaggacagatatcattgcatcacatttatttatctttctgggtatttttatagcccttaataaaaaatatt

SEQ ID NO: 17482 - DNA, 893 bp, Homo Sapiens
gcacgaggagagtgggaaatataagtttaactaccaaataagggctcccagggttagatgactgggggaagcctttgatcccaacccccaaggctttgtatatttgatcatttgggatctaaccctggaagaaaaagagctcagaaaccactatgaaaaaatttgttcagtggtttctggggtcccgtaggttctggagtctgaggatgcaaagatgaataagataaattctcagaatggagttataatctcttggtttctgggatatgccatctttctttaacttctctaaaatattgggtatttgtcaaataaccacttttaacagttaccattactgagggcttatacattggtggtataaaagtgacttgattcagaaatcaatccattcagtaaagtactccttctctaaatttgctgttatgtctataaggaacagtttgacctggccttctcctcacctcctcacctggcttccaacattgaatttggaaggagacgtgaaaattggacatttggttttgcccttgggctggaaactatcatataatcataagtttgagcctagaagtgatccttgggattttctcacctctttaaattcccacaacacaagagattaaaaacagaggtttcagctcttcatagtgcgttgtgaaatggctggccagagtgtaccaacaaagctgtcatcgggctcacagctcagagacatctgcatgtgatcatctgcatagtcctctcctctaacgggaaacacctcagatttgcatataaaaaagcaccctggtgctggaatgaacccctttcttgaacatcagagctgtctcccacaggcttgggcagcagggtgcctcttagtggatgtgctgggtccaccctgagccctg

SEQ ID NO: 17483 - DNA, 854 bp, Homo Sapiens
  misc_feature (720)..(744): n is a, c, g, or t
  misc_feature (769)..(811): n is a, c, g, or t
gcacgagggacgtgctgctctgtgggatataggagaaggggtgctgacagatcttggctgagggtgactcagggatgggaggtttggggtatgcagagaattccccagcctgccttctgcgtgtgggtccctgggtgtctgcttcaagcgctgcccatctggcttgagctctcattctatggccacctggggcaagtgctgagtattcctccatcctgtccccgagtgagtacaaatgtcagtgctgctagctcagcaggtttaattacaagggacccctcagggtactctgtgagcatagaggagtgtggccctggtggggacacaggcatgcatggatgacagtgctgtcagcctcatcttattctgacctgggctcagccaggagtcacattaaaggtatcatcatggagtcctcccacctcagttcatgacatttcctccaggaaatgtgggatctgggactgatttggttaccatgatctctataacttgggccagccatataaaactgccatggacctcagtttttgtttatatatatttttcctttcaaatttgtcttgtgccccagggggcaacaggaccagtttctcagggttttggtgaagatcagatggaattagggatgtgaaaagatcttgaacagtttaaagcatagagaaagtgcatggagtatcattcgtccatccatccagtcatccatctactcaatgaacnnnnnnnnnnnnnnnnnnnnnnnnngagatgggaggttcgctcttattgnnnnnnnnnnnnnnnnnnnnnnnnnnnnnnnnnnnnnnnnnnntctggctcctgggatttaagtggattctctcacctcggcctcc

SEQ ID NO: 17484 - DNA, 813 bp, Homo Sapiens
  misc_feature (582)..(610): n is a, c, g, or t
aatagtttctttagtcactataatctattcagaaattatttctatttcttgaatttttaaaatctccaaatctgaaaacttagatgagtaaatggctttctgggaaaataagaattatcaaaacgaatccccaggagacagaaaatccaagtagataaaataacaaatagcagcctgaggaagccagcaaggggcaacaatccctgcaaaaaaagaacaagtgactttggccagacctgttaaggaccagctgcctccagggctaagttaactgttccacagcctaggaaaaggaggaaagcttccaaattctccatgaagccagcattctattaccaaagcctaaccctgagagcatgatcaaagaaaactacatatccgagtgaaacatcaggaacagactccacagcaagatgccacagacaaggggaatcaacgaaaaaccaggcagtcacgtccatggaagccgaaagcaacgggatgaaacgtcacagccattccagatgtggtctttagaaacagtgaggcactggcaccaccattacttcacatcgctttttaaaaaccagacacaattagacnnnnnnnnnnnnnnnnnnnnnnnnnnnnntcggaaagaagtgggtagacttcttatcagtgagaagggacagtcccagagaattcagtaacacagagtcaaatataaatttatatgctaaaatctagtttaaaaataaatagaatcaaagaaaatgtcccatttgtaacagcagttagaggcaaaatactctataataattttctcaacttggagctctatcaaatcacata

SEQ ID NO: 17485 - DNA, 437 bp, Homo Sapiens
gcacgagggtcccaataaactttgccaaaactctggaaaacagtcaaaagattacaacaaccgagtgaaagcagactcaagaaaaagacaacttgaaaactttatgacatttttagcttgcctttgccccagcaaattggcagttttgaagtgtcagaagcccacgttcccagtgaggaacactggtccatggtccaaaggaacaagagaagatcttacccgcaaattactatgtgtctgttctgactggtctgggggatacctaaaggactcatgaaaggcttttgtttttctgtgttgctagaatacagaacagataaggaatggacattattaagaaactctgcaaggagacctaacaaaccacagatgcttaggacaaaaattaaagattacacatactgtagatcaccttcagcacagcaagaaaagttgga

SEQ ID NO: 17486 - DNA, 597 bp, Homo Sapiens
gcacgaggttacttagcaagatgttctaaaaatttgcctctctaacacctgcaatataatcttcaatctattaagcagatatagtactgaaggaagctgaagcactataccttccaaggaagaaagggatatagggactataaatggacttttaccatagttgtataggtataccagttattatataatgtaaggaaactggacatcagtactcagtctcagcaaagacttgttttgaccaacaagcatttttgtataacaaataatatttctcaagtaaaagtccatactgtatatagactgtcattgcatactagatatacttttttacattttagaagtttatgctcaatatgggctagctcatttgtttgcatgttttcccacctattacaaccccaggtatcctttctaagatgtgtgcttaaatatacattgtcattctaccaccacaaattataattttaatcatacttttttaataaacaaagaaatgagtctatcatgcagttctttgcatttacaatatcatgcctgatattaaactatgaataatggatagagaaggaaagtagtagctatttaaagagttatctt

SEQ ID NO: 17487 - DNA, 667 bp, Homo Sapiens
  misc_feature (76)..(88): n is a, c, g, or t
  misc_feature (255)..(431): n is a, c, g, or t
  misc_feature (480)..(535): n is a, c, g, or t
  misc_feature (546)..(615): n is a, c, g, or t
cacaaagagactgtagttgctttaaaaatatgacttctgtatgctatgtggttacagaaaataagatcatgtcaannnnnnnnnnnnnaaaatgccaaaagtttctttaaggggaaaaaaatggaactatagtaaacagactataaactatcttactgaagagtctaaaatgaagcaggtctatcaatgtaccttaacacagcttgaaataacaatcaactcttaaatgcttttggtctaagactgttgccaagnnnnnnnnnnnnnnnnnnnnnnnnnnnnnnnnnnnnnnnnnnnnnnnnnnnnnnnnnnnnnnnnnnnnnnnnnnnnnnnnnnnnnnnnnnnnnnnnnnnnnnnnnnnnnnnnnnnnnnnnnnnnnnnnnnnnnnnnnnnnnnnnnnnnnnnnnnnnnnnnnnnnnnnnnnnnnnnnngttctcatgatagtgagctctcacgagatctggttaagtgtgtgacaannnnnnnnnnnnnnnnnnnnnnnnnnnnnnnnnnnnnnnnnnnnnnnnnnnnnnnnctccctctcannnnnnnnnnnnnnnnnnnnnnnnnnnnnnnnnnnnnnnnnnnnnnnnnnnnnnnnnnnnnnnnnnnnnnaaagtgagcctctcaggaaatcggttaagtgtgtggaaactccccttgctgt

SEQ ID NO: 17488 - DNA, 934 bp, Homo Sapiens
gcacgaggcagaaccgcgaggaaagatactgcaatgaacatttgctatgtcccccacacatgttctggacaggctggggtccttgggaacggtgcacagcccaatgcgggggtggcattcaagctcgccgcaggatctgtgagaatgggcctgactgtgcaggctgcaatgtggtgagtagccttcttctcacacccagcccacaatccagaaccaggaatacagactcaatacacacaaaattctctgcacacactagatgttctgcaaacaataaatgttctgcacacactagaggctctgcacaaatttggtacactgcaaacactaaatggtctcacacactaggtgctctgtacattctagaagctctgcaaacaccttatgctctccagatactaaatgctctataaatatgacatgtccagacactggatgttccccatacaatagatgctctggaggtaccaggtcctctcacacactggatcttctgcaaacatgagattcttggcagacactagatgttctgcaaccactgagtgctctgtaaacacaacatggtcaagtactcgattctctacacacactagatgctgcaaatcatgcaagtttttcaatttaattagaatatctggagaaaatacttgaaattcagagtatctctggaggcttcgtgaattaagtattcacatatgggataaactgtcccaggagtttttctgttctgatttctgagtcacaaagctcttcagcctgcttatatatggctactctattcggtttgggacacggaataatatcctcatatcagcctacaccaagtatagaacattgtgggatgaaccggacacacctctggggactgagaaactatatggagtcattgttagagtaagctggtgtctatgcagagaggataaagagatgcatg

SEQ ID NO: 17489 - DNA, 499 bp, Homo Sapiens
gcacgagggattccttcccagggagacaaagccctgtcaggagcacagcatctttccagaggaggtggagtctatcttggggaaaccaaatttccagattttcccagaggctcagcaactctggcctcaggcttccttcccagaggcagcgtctgggctgtgctgtgctgtggaggagggattgcaggatggatggagctgggactggggctgtctgggtggctggtatcctcgtttgatacaggtggagtctgtgtgtctccagtgattgattggttcagaatggttctgtgatgccttttttccccctggggtcaggggtgtggggaagtggggaaagaggggcccctcagggaatcagcagggctgatgggagctactgccggaggcttttgtcacgccctgtacacagtctgatcccgctcatctgggccctgcattcatttctaaacagtttctaatgcctattccccaattcctattgagcccgatttgcagt

SEQ ID NO: 17490 - DNA, 829 bp, Homo Sapiens
  misc_feature (735)..(760): n is a, c, g, or t
gcacgaggctttgcttcccatgcgacttcaagaagggttcctatactatacatatatatacgttctggttggcaagccctggtgatcagagaaagtctctgcatggtctagtggtagtaactaatttttatatagttaatggaggataaagtagagtggattaagacacaatattggaatccctactctaggcacttggctttaaactatggttttcagcccttcagaagggttctactactgtcctatacaatcaagtaactgaaattcttgggaagacactttgctcctcagctttccccccgaaacaatggtgttttggtttggtttttttccttaatttgcacgaaaacaaaaattccatatcaatgggccttggcctggatagcgattatttgtggaattgttgcacatgctcctctattggaaggggtttttccctagtcaagcatttggagacactttttgtaaatgggacttttatggcagccatcgtcagtttcaacatctagaactaaatagaaagctaggtgttccgcagataggagtagtctttattgtcctgtacggtcggtggcagtgctattctgagatctgtagatgcttagaatatcagtattttggatgttgctgcattttacaatttatttggagtcttccttgtattttcccgcagatatatggaaaatatgcaatacctgcttatatcatgtagaaaagcttagcaattattannnnnnnnnnnnnnnnnnnnnnnnnngaccaaagtcggggctgcacttgacggagtgtgttttaggtggttgtctttggactttttgtgattttg

SEQ ID NO: 17491 - DNA, 835 bp, Homo Sapiens
  misc_feature (295)..(562): n is a, c, g, or t
  misc_feature (572)..(595): n is a, c, g, or t
aataatcaaggaaccaatagagggataactcattactgaaaggacagtggcaccaagccattcattagggattggctcccatgacccaaacacctctctctagaattcacctcaaacattggggatcaaatttcaatatgaaatttgggaggacagatatctaaaccatagcagtgagtttccatctttcctcacaaaaacaatggctgtcatcatttaaaatagattttatgcagtttgtctagttaagcaacaatttgttcttgtaaattgtatttaaaaagttatcgttaannnnnnnnnnnnnnnnnnnnnnnnnnnnnnnnnnnnnnnnnnnnnnnnnnnnnnnnnnnnnnnnnnnnnnnnnnnnnnnnnnnnnnnnnnnnnnnnnnnnnnnnnnnnnnnnnnnnnnnnnnnnnnnnnnnnnnnnnnnnnnnnnnnnnnnnnnnnnnnnnnnnnnnnnnnnnnnnnnnnnnnnnnnnnnnnnnnnnnnnnnnnnnnnnnnnnnnnnnnnnnnnnnnnnnnnnnnnnnnnnnnnnnnnnnnnnnnnnnnnnnnnnnnnctcgtctctnnnnnnnnnnnnnnnnnnnnnnnnttattgttgagggtgaaccttcatttatatggatattggcacttgtgctttcttcagttgtcttctgtgcacagcatactttgagttctactcaaggcttgagtcttgttacagtgattaaactggctgaaagtgagcctgttgaataccacaagtaatatttaggaatacttagtcaaaatatagtcaaagaattgaagagttatctatcttttggatctttcttctgaaatttggtcc

SEQ ID NO: 17492 - DNA, 845 bp, Homo Sapiens
gcacgaggccttctccgagctgggatcatgctgggaagactgaatgggacgcagccggtgaaaacgcctggaagagagtaaacgccattttctctaagcatatttatttctttaacaacagtgacgaccatttgtgagccatctctctgtctcaggcacggtgctacatgccaacgaaacctgctcccattgaaccctggccagccagtgaagaaagggttgggcctgggaggtgccactttacagacaggggcaccaaggggcagggtggcaggaggcccaccggacgttccccatgaagtagcagtcccagcatccacacccagcaggcaccacgctggcccgcagcctccctgccagcacgcctggcttcccggcctcggaacttgatctgctccctcttccggacactggggctcctgccaagtcctgggctgggcagcaactgctgaacattctaagaaatccctcccagggttttctcaggagcccgggtggggcaggaagtccccaggggctgaggggaccgtggcggcaggtggcacccagagcagcactctcctggggcccaggctgttgggccagaggcaggactgtgaggcctagtgtagggcctcctgccagtggccggcacctacttgtggggctgggggttcccccagcaggttgggctccccacctgacacactcacagaccttgtgccttggagagccagtgttcccggggccacatagctatgccgcccaggggctgggcctgtccccacctctggtcccccggccccaggtcctggacgctgggctccgcgcagcagcaggcggccttccggaggacacgatgtgaa

SEQ ID NO: 17493 - DNA, 820 bp, Homo Sapiens
gcacgagggcaagacctcagaaaaaccagtcaattacgcctaagatcattttgctgtccttaaaccccccaggttccttcttgcacaaatccactctgctgcccaccttccctggcattttaaacagacctaccccaccccaactcagagttaagcatacatggcaatgctgaaaataaacaaaatctactgaggcttcccaggccatttaaagcttggagtactagcgcatatcatttcatggggtccagagtggagtccaggcttctctgaaaccagggctgagcatattttcatagccaaggaggtgggactccctggagctatctgtggtcttagggaaggatccagacatacacggttttggggtacaagctgtgatcactgatcaataaattatttctagattggtccttgtgaggggagttttaagaatccagaacatcttgctcttgatcagcacatccaaaaacaccaagacaaacatccagtggagcagaacctctctctgcctcgggagttctgaccgggttcctcagcagggtgttaagcctctgtctctggctctaccagcatccaggttccactttcctaggagagagtggagatgggaagacagggaaaggaaggcagcaggaggccacaagctcaccaggtcttcatgtcaagagagggagtaacatgtcttctcattgctcacggacctaacctctgtccaggtgtctctcatcatcacagtttaacacaagctctctgctccagccaaattgatctcctagtcttgtccttacccattccaagtgctctgccagcccctgtt

SEQ ID NO: 17494 - DNA, 874 bp, Homo Sapiens
  misc_feature (237)..(246): n is a, c, g, or t
atgtctagttgtctttgacatttaatttcaattttcataggaattaatcatggctctaacatttacattgatactgaccatgtgtttatcttacacaatgctcataatgttagccactgaatggaggcaaactaaagaagtatgatgcttttatttatttagcatctatgatgccatatgagatcaatttcttcattaaagaaaaacaaaccagcataagaaaaacgaattaaaaannnnnnnnnnctcagtggcagaatcacatagctgtttcgatacagatttccagtaggtctaaaataccgttttgggaattgtaaagatttcattacagaaatacacagaacagaggataaatacaatcaccctagtttatcaaatggttgcactacacatcctttgccttacttttcctataaaaaaagttcgcaggatcaaataaaaaattctactagcagcatatgactctggtttgggaggacaaaaccctgaaaggaaaagataaaatcaataacctggtacacgtgcagtgaaatgctttgtctctgcagaagtgtgcacgtttgtgaatatttcacataaggtaagaaatttctaatttcaaaaaaactgaaggaatctgaacacctattcttcataaaaacaaacgagtgcttttcaatgcctttttctcttggaacatacgctgccttaagaaaggtgggcgaagcttcatgaacagcgttttgttattcatctgaaacacttggacagaaaattggcaaatttgggtacatggttcagaagtgaaacattacgattttataaaaccagttaaaacatgcacattttctactgccagatgggccaataccttaaattgtctttaaagact

SEQ ID NO: 17495 - DNA, 947 bp, Homo Sapiens
gcacgaggcttctgtaaataaaggagatgtgtttacagactttatctttgtattgcttaggaggagttattcaattcacttaagactttgttaagttaaatattaatgttaaaatgattagggctatttcgttcaagacaattgccactaatcacatgtgattatgtaaatttaaatttaaattcaacttaactaaaatcaaataatgaaaaaggtcaatagtacaaattctcagttatatcacgtgtcaagtacttaagaaccacatgtggctgtggaattagacagtgcagatgtagaacatttccgtcactgcagacattctattgggcagtactagtctagggcatccaattatagaacagaactagagtataaaactgccaaactgttcgtctagaaaatagaatgagagggaaaaatcaaagtaaaggaggcaacaaagcaagggaatataaattcagaaaaagtggcaaaagtagaagatacaaaaaaagatgatagaaatgaacacaaaaacccccacacccaattaattgtcttacagattatttgaaaggctttaacttttattgtttcctttaaatttatgtatttcatatacagtaaaattcagtctttttggtatacagttgaatggcttataacaaatgcctgcagtaatgtaaccatgaccaaaatctcagaagcaaagcagttccatcactctaaataatttcttgtgtggttccatcactctatataatttcctgttctccccacttgtgccctattcatcccagtccctggcaaccactaatctgttcttactctagtgttaacttttccagaacatcatataaatgggacatacactgaatcataccctttgagtctggcttctttcacttagaacatttcatttaaaattcatgagtgttgcatgcactgatagggttttttctttt

SEQ ID NO: 17496 - DNA, 748 bp, Homo Sapiens
aagctgacagatcaggctggatctgggggccctgcagaggctgggatgcctctgtgagaccagtccagctgtgagcccgaggctccctctaccttctgtccatcggtcccgttcttgccagccaggccaggggccccctgaagagagaaggaagagggaactccattagccccggtccttctgccctgagcagcaggaaggaggggctctgcctacccagccagcctaccttgcgaccgtcggctccaaattcaccctgtgtaggaggaaagccagcgcagtgagctcggtgcctcaaagcatcatgggcactgctgcctctggggggcaaagcccttgggccaaactcaaggccacaggaccccccaggagcccccaaagccaccactgagaaaagaccaggccggtgccccaggagcagtgacaggctgcggcggacgccaagaggtgggtctgggccgagtctggcgcaggtctgaggtctgtcaggtcaagagcctcaccttctctcctttgaagccaggaacgccctgggggcaggaggagagaggggcattagtgaggagctctgcagagacacaggcagggaaaggccagctcctgcaactgaggggagtgctcggtgggccgctggcatctagtgttctcgacaaacagtctgcggaggaggctgagccctgggtcgggctggaggctggtttttgggacggccatcaagttatcgaagtgcttctgttctttggtaact

SEQ ID NO: 17497 - DNA, 491 bp, Homo Sapiens
  misc_feature (81)..(204): n is a, c, g, or t
  misc_feature (219)..(242): n is a, c, g, or t
atgccaacctctgcctcccaaagcactgggatggcaggcatgagccaccacacccggcctgtttttgttttttagacaggnnnnnnnnnnnnnnnnnnnnnnnnnnnnnnnnnnnnnnnnnnnnnnnnnnnnnnnnnnnnnnnnnnnnnnnnnnnnnnnnnnnnnnnnnnnnnnnnnnnnnnnnnnnnnnnnnnnnnnnnnnnnacagtatctggctannnnnnnnnnnnnnnnnnnnnnnngagacagggtgagaccctatctcaaaacaaacaaacaaaaaccccaccagcaaccttgctgacaaatccacaggcccccacgtctgccaattgcctgcctgtatgaactgggcacctgggggaggggcgtggcccccaggctactcatcttggctttcacagccaaagggcctgggtggaacctcagcttactgtgtttactgactgggtaatgtggcctctgaagctgtcacctatctataaaatggg

SEQ ID NO: 17498 - DNA, 707 bp, Homo Sapiens
gtaaacatagtttttattcttatcttaccttcaatgaaattttgtcctcatgccaccaaaacatttttgaaactcagtaactgaacaccaaactcagtagcctcatgattacttttctagacaattgctgaattatattgctttaaaaaaatagctgagatatatttttattactttattcctttttaaagcagcaatatcccctcacatttttttcataaaaatctaaaatatctctagtagtcccaagtgtctcatatttatatttgttctaagcgtttgtttcattaagatttttcagaaataagtgcacttctaaagagaaagtaaatttaaataaacacaacaggaaaataatcatgggttgtagcaaaacagttattttgaatgttctgaattttaacaattcaaaggagaatgtgtttggtagccagggacctctatggactaaattctcaattcatttatttgtagatcagcaaaagacagatagctgctgctcctgtcagtaaagactgactgattgattgtctaaggttttatacaataaaacaccaaaaataaatgtacttaaaatattttaaatttagagatttacataaaaatatgcaggtgtttaaaaaacagaaaaagtatagaaataaatgaaaccctatcttaggccttaccaaccaaagaacatttttaatactccacacttattttcc

SEQ ID NO: 17499 - DNA, 336 bp, Homo Sapiens
  misc_feature (60)..(68): n is a, c, g, or t
  misc_feature (231)..(240): n is a, c, g, or t
  misc_feature (260)..(271): n is a, c, g, or t
  misc_feature (280)..(288): n is a, c, g, or t
gggaaaaaggggattttattggccaggaaggaggaccccatcaaatttcgggggaacccnnnnnnnnnccccttttttggagatttggggttgggccccaagggaccttgtcctgccttttttgttggggaggggaaaaccgggcccaccaaccaccccaaaaaagcccgggccaaaaaaacaaggggtggggtaatatttaaaacccaaatgaaggggtcccgggatccnnnnnnnnnnttttccggattcaaaaaagnnnnnnnnnnnnaaataaaannnnnnnnntttaaaaccttttccaaaaatttttttggcttgggccctccaaatggg

SEQ ID NO: 17500 - DNA, 400 bp, Homo Sapiens
ccccatttcaaaagttcagttttatttgtgaaacaggatgcaggtcctgtttgtgggtaggctggagggagtgcactaaaggcaggggcattggcgcagcatttacctggacagcaacccctcctccccagggggctaagggctgggggggaggaacaaaaagtcgggaaaacccaaaggaaacccctgtcaaccaaaggcactggggaaaacttctttgcacaaataaaatcagtattgtaggatgattaggaattatccaaacaagggggaaataagggggaggatatggcattccatggcatccaacatcaggggcaaaaactcaaaggtgaaacaatatagctgaaacaaaaaaatgcaaatggttccaagtgatgggagcacggagtaagggagg

SEQ ID NO: 17501 - DNA, 919 bp, Homo Sapiens
gcacgaggcagacctgtgggggaaggaggggacacagtgagggccaggctccgggaagggccaggcgggtgagggtggggcaatgagcagggcaagggcagtggacaaaggagggaagggaaatggcaggggacagacagagtggccagacggggacaggaaggaagaggccctgacagggaagctccctgggtaggaaagcagtcgactgacacacccgggcgaaccaagtggggaagcagcaggaggaggagaaggcctagaagtagaaatttgccgatttctgaagaatttcccaatctgggcgtgtgtttccagtctcagtgtcttctatatttcatccaggatttttacccctcagggcgccttctcccctcagggctccactagctgaggatggagggaaaatcccttttctttgccaaggctggagttcctgacttagcgctgccttttttggttcccatccataataatagggaccacatattaggtacttacgtgatgagcaatttacataattatttcatttaacttcacaaacctttgaggtcaagagtattattcccatttgatggatgaggaaactgaagctgaaagaagttaagtcacacatctgctaggcaaccaaacctcaatttgatgccaggtctgatgactttgaagcctatgatggcaccaccctaccctctctctgaagagctggcccttcctccccctggatactccaggtgcccagctggggcctctggaattcccaggctacctaaggtctgcactgttaccacctggcccagatcctcaaatcctcctcaacatcatctctcaagctgctggaaccctggcctagagtcagctggggaggggctgcctgtccaagggctgtcccaggagagggactggggtagtggcgtggcaa

SEQ ID NO: 17502 - DNA, 844 bp, Homo Sapiens
gcacgaggcttaggcaaaacctaaacagaaagtctccccatgctgtggtgactttaataaataccaaaggacatcattagctaataaatgctagactaactagataccaaaccttgctctgtgaaaatccccacataaccattgaagtttccaacaccctaacccagccaccttactcctggtaacagagagcccagttaaacataactgtttagaggtgctggactcagtttattctagtaggcctaacctccgagacctcccttaaacatcagtagactgggagctgtacgtggatgggggcggctttgccaacccctgcaaagtgacactctgaagaaggagacaagccctgctccagtcacacccagaagctgactggtccacgcacaggcgaagcatgaggaaactcattgcgggactcattttccttaaaatttggacttgtacagtaaggacttcaactgaccttcctcagattgagaactgtttccagtatatacatcaagtcactgaggtaggacaaaaattgctacagtcctattattttatggttattataagtgtaccaggactctaaaagaaacttgtttgtataatgctatccaaggtatgtagcccagggaataaccaacctgatgtgtgttatgacccattttaagcctcccgtgatcacagtttttaaaataaaattaaggactggtcctatttctaggtgacacaagtaaggtaatagctagaacgggaaaaaagaggggcccccaaaaatgtaaccttaaaatttggtgcttgtgccgctattgatagtaagcagcatggaataggatgtggttctctaaattgg

SEQ ID NO: 17503 - DNA, 298 bp, Homo Sapiens
  misc_feature (106)..(138): n is a, c, g, or t
caaactaaccaaccaaccctatgatgctggtattttgacctcttgggacttctgtgaagatcagttatcaaggaggtaaggtacctgacacagaagaggtgcctannnnnnnnnnnnnnnnnnnnnnnnnnnnnnnnnaacacatcctgaagataaacagcctagacaagtaactaaggtgttactggtagccctactgctagaatgctgtggttccattaatgaattttgaaggctaagataatgttgcaatgagccaggaagcaaaactggagaagagaaaaacagagcatatgga

SEQ ID NO: 17504 - DNA, 869 bp, Homo Sapiens
  misc_feature (74)..(141): n is a, c, g, or t
  misc_feature (251)..(319): n is a, c, g, or t
  misc_feature (421)..(470): n is a, c, g, or t
  misc_feature (533)..(563): n is a, c, g, or t
gcacgaggtacagaaagacacagtataaatgagtgttacaaactaagagtgaacaaaagatgtcagattgaaannnnnnnnnnnnnnnnnnnnnnnnnnnnnnnnnnnnnnnnnnnnnnnnnnnnnnnnnnnnnnnnnnnnacataaaggtgacaaaaatcattataaaaaataacaccaatacccaaagaagtgatcaccataagtcagggtagtggctattttgtggaggaattagaagggggtgcacnnnnnnnnnnnnnnnnnnnnnnnnnnnnnnnnnnnnnnnnnnnnnnnnnnnnnnnnnnnnnnnnnnnnngataacttacgttatacatttgtattttatgttttttttagattccacaataaaaaatactttaataacattaaatgagaaaatgtgttaaatgtttagtannnnnnnnnnnnnnnnnnnnnnnnnnnnnnnnnnnnnnnnnnnnnnnnnnataaacaaataagtgatctactattgcaactgcccatactgtgagctgaaaactggatgttgnnnnnnnnnnnnnnnnnnnnnnnnnnnnnnncattactaatctagactctactacatagcttcttataatttgatattggcagagtttaagattacctctaaaagactttaaaaaaaaggacttttgcatacaaatatgaaatcaccattccacatggtggtgttaaaggatttatcacccacaccatctgccaagccaacacagtatagcacaagaatgtggctttaatgaccaatgttcacagtactagaaatgtttcacaacttctctgacactaaaaatttaataaatgataaactctttcctatttgccttagtgggcactgatacacactt

SEQ ID NO: 17505 - DNA, 860 bp, Homo Sapiens
gcacgaggctgtgtttttaggtggatcaacttggatctttagacctcatctataaattgaaattatatttttagtcataagccaagtacaatctaactcagaatgggattaaaaattttagaagcagaagctaatatataaatgaagtttgggatttggaactttctgtatctcttaggaggaacaagtaaaaaccaaatggttacattgtgctgctagaaataatgtcattctcaattaaaagggttacacctgtagccacttgacactaacaccatcgagggcaattaatcaggagaaaagtaaatataaaaactttgctcttaacgtcacacactacagggtaattatgtaattctctagcactcaattaagaagcttgtaggttagcaaaatttcagtttctctagttcagccagtgtcttgtccttagtaattatttgctttccctgcagttcaatttctccttggaactctaacaggactaactggaaaaatactttgaccatagctctagtacttccaaataaattcatatctagattttcaaacaaagccccaagatgaagtctaattctgaaaatatctcacaatttttgaatgttctttttatcttaccgacctaacttctcttttccctcccaacttggcctcccacacgttccatttcattttggccattatagtcacatccgtttgactttggttgtgacatcttcctttcacgatgatggaattagatgcagtctgtctttgagtgagactggtcaccatcagaggagtttttttctaagtgacgtgactagaaagttgaaatctacttctctgctaaagggcacaggggtggtgtacaaagaaag

SEQ ID NO: 17506 - DNA, 936 bp, Homo Sapiens
gcacgaggaagaaatgcaacctcaccacaagtacaaagaccatctttcatggactactttgataagcaagacttcaagaataagagtcacgaaaactgtaatcagaacatgcatgaacccttccctatgtccaaaaacgtttttcctgataactggaaagttcctcaagatggagactttgactttgtaagtacattttaattcttcaatttatgttttctccttctatattttatcatcaaattgagaagcatagttcatatgtatatgaactgtgtgtatgtatatacaattatagaccatatgttaatattcattatacagccatatacatggttagagaaattgtgaaactgtagcttgcttatagaaatgtacttgcagagaaatacttttttatagttaaataaatcatagctcaaatttaaataaatattcaggactccttaaaactaaaatgacaactattttaaaagatgttttcaataatgcaaatatgagatacttctgacattcagtaaactcagttgccaaaattaatgaagcaaaggtatttatgacatagagtttgagaatttgcttcaatttttaaagtatatgagttggtttctatttgagtaagtgttaattccacttggtttctcagaaataatagtcctattctgtacctaggagcatataaacttcagtataaaactgccttatcacctattttgttacattttctcattatttcttctaccctggttcttcttacttctttaaagaatacataaaaatacagatgacctattttaaagtacctgtttccagaactgagagagaaattctcaaatgagttatttaatggagtgaaaattctatggagtaaattttacctaacacattttaaatataatggtaacttttgcatatgttctggaagattttttttcc

SEQ ID NO: 17507 - DNA, 581 bp, Homo Sapiens
  misc_feature (64)..(73): n is a, c, g, or t
  misc_feature (103)..(136): n is a, c, g, or t
ctgctgtgagttttaaataaaaatgtaaatgctcttctccattttcttacctctccttttaaannnnnnnnnnaatgtcatataagtaatacgtattcctggnnnnnnnnnnnnnnnnnnnnnnnnnnnnnnnnnngtcacaatcatcctaattatcactatttgtaaataatcactacattttgacacatataattctaaagttttacctatataaatgatacacttattactatctgtaggcactatgttaagcattttatattatctttgtttttctttctaatggctttataaaatttggtttgtgtttatattctaagtagaaaactaaggtatacagaagcttgcttaacatcccaaagaaagattataagtatagttggaatttgttatacattccactaaaattttcttctaataaaaattggatctgtctttaacaaacattctgcagcatttatgtccattaaatcttcatgtgtggtttaagggttattcctgaagtctctagatcacatgctcccaaagttttccctgtgcttcttattttgaggctcatattacccttgtaaatactg

SEQ ID NO: 17508 - DNA, 758 bp, Homo Sapiens
  misc_feature (119)..(140): n is a, c, g, or t
  misc_feature (270)..(278): n is a, c, g, or t
aagaaacccatttaatagaaaaggtagatgccttgacttttgtccctgttgtggggactaaagtgttttttgccagaattgtcaaaagctccggttcaaactctgtagagtttcatggnnnnnnnnnnnnnnnnnnnnnngatgcttatcgtcccggagaatgtgtaagtaagttctccagcacggcttaggttttccaaaatggaaagcaaagcttgcagacaacctgttttctctagagacacacaatgattctggccctcagtctgnnnnnnnnncccttgtttactctttggtcaccgatcgagtcaggctagaggggtaatacggtgattaaaagaagtaaattctcactgtaaacttggattgattaacagaaacaattaaaccaaacaaaatcattgccccaaatttctatctccaagaattgctttgtgccattttgaattcaggtagttattctgtatatacttagctaactattcagagcttcttcaatctctagtaagcttgaaggtggtgtctgggaagacacagggcagggtgacatttagactctgttcattcttaaaaatagggataagccagaatgatgtgacatctagtatgtggtagatgaagaattcagtggaaattcttaattgcacagactttataatccattatataaaagcgtaattccatacttttttactgtggcagggtgtgatgtgattgtttaatcttttttaattttttgaatccaaactgaatttaaa

SEQ ID NO: 17509 - DNA, 516 bp, Homo Sapiens
  misc_feature (249)..(269): n is a, c, g, or t
gcacgaggatcacctttgaaagatgaccgtgcttgaggaggaagaatgggttcaagatcatcatattcatcagaaggggacactaaatagaacccttaacctgttgtacttgccaaaattgagaatcagagatgtgtaaaatgcagcaaattaattataatgtaagttaagatttgctttttgccaagttgcaaagttgtatccacatcaggtcactgtaaaaatgtattatcttgtaaaacttatgtnnnnnnnnnnnnnnnnnnnnnggcaaagatactaaaaattttaagtccgactttatttttcctacaattgtttagaaatgcttctgggatttgctaatattatctgtccttgggaacagtattgaaaaaactgcttagtggtattacagctttagcaaacctacctcacagctgggatgagaggataaaatacaactaattttgtaccctatagtgcctagagcagtccaagtgctaaataaatatttactgattaaaaccaaactat

SEQ ID NO: 17510 - DNA, 576 bp, Homo Sapiens
  misc_feature (212)..(248): n is a, c, g, or t
gcacgaggcccactgctgagacctgtagggcagcttctaacatgcttttttcaaggggagaggagtagtgacaagtcgtgtgtcggaattggatttgagaacactctgaatgacccctgggaggccgagggggcaggcttcgggcgtgaactgaactccagacccctctttgtgttgggcagtgtcatcttgcttacaaactgtaagacacnnnnnnnnnnnnnnnnnnnnnnnnnnnnnnnnnnnnncagcactcacgactctgacagtcttttgggaaagagtaacacccacatacagaatttgtcacatccagagtagcactgttccttaatactggcataatgcttccaggaagtttttcttttttatatttaaaatgttacttttctgtatgatgtgcatgcaagtttaccgtaacttttcttaaactttttagtgccgtttctagtatattcctgtaaatgtcagttactgaaaatgagtccaatgtaagtagtttaacttgtttattgcaatgctggcctcaacacaacagaataaaaatggtacaaagtactcttttgatgtttctgg

SEQ ID NO: 17511 - DNA, 900 bp, Homo Sapiens
  misc_feature (641)..(660): n is a, c, g, or t
gcacgagggaaaaaggaattctcaatccatattccttgtattgaaccttgaacaaaaacttgtatgacagacatttttaaaaatgtgacaacacttttattctctgaattttgatctcaaaggacacagaaaaaaaatggccccaggagatctgatcacacttcctcctgaggcacctctcatggatgttgcaataagcattcgggtactatcacccagaaatatgaattgccagaatagaacatttagcatgttaagcgttgatgcatataaaatcagaaatagatgtgagaatggtggaactttttaaaataacccagtcaaatgtattttctgctgaaatctgcatatttggaggcatttcccaccaccgattcacagcccatttgatagtgtggtagttagggacttcgtggagtggtgttcagacgtcccctggggcttaaatctcttcatattagtcatcatttgtaactatggctttatttgcagagcttctaaaaggcgtataactgtgtgagtggccagatattcactttttaaatcaaaaacctctcttatggaagctttaaaagtttccgtcacacacaattctcttctcaggaagtatttctcatttaggtcttcaaagtagcctgacnnnnnnnnnnnnnnnnnnnnataggttatttataaagactttggatagaaggagatgtattttattacctcctattctagagccccatgctccctaacaagccagagaggccccaaacaggattgtttctttcctccacagccccttctgcccatctgagattgagggagcatcgtctacttgagatcatggatgggggtggagaatgggtcatgtcatgtaatgagaaaagccctcttcgggatcatgagacttggttc

SEQ ID NO: 17512 - DNA, 305 bp, Homo Sapiens
gcacgaggccccaaggctgacaagccagggttgatgagtgcatagtggaatagctttggatactcctctgggggatgacatgtaccaaggagaggaccgcagtggccagaggagacatgatttggctttgctggagcgccagtgtgctgtggcctttccccgcctcccaccctagtacccacgttttgctccacactccttgaccgcaggggctcggacacaaacccctgtcaccaggagagtcagtcagcactacttgggagggctaaagggaaatttggaaataaaattccaaagtttggagt

SEQ ID NO: 17513 - DNA, 831 bp, Homo Sapiens
gcacgaggccaccttggtgtgggtcaccgggacagtgtactcctctcctgccagcctccccttccccgaggtgtggtggctgcagtctcaggaagagcttggtacttgtggggacttctgttttctccctgtggagatcagtgaagactgggaggaaagctgcttcaacctgagtccggctcttcagcaggctgcacaagtggaagcaactaattctggtgctcaggctgggctctccacccaagttaggcctgctctggcctaatggatcttactgtatgagcaggacggctgcattggattgtacaactgttttgtgatgcccccagacactgtcatcctgggccgagaagaacctgctagcttgacataccccatgggcttatccttaggttttggaattggtcaacagtgaggcagtctcccttcctgaccattcttctccacccagtcacagataagggaataaccttggccatatatttgctcaataaagattgaaggaagcatggtcatagttgccctgggttcagagcataatgcatatgtgaagcatggggtgacattcctactgtcatgggtttgggatttgtaacggcaaattcctgcccgacgacagggtgtcttatgcaaaggctgacttgcctgaacgctaagaacatgacttctgtctgagctaagctggcacccatcccagggctcctctggagctaatcccttaagcaaaatgtgcttgccttttaaagatccctgaccccagctttagctttctccaccagataaccagctaatcccaggaatttgctgcctccaccagtggcttctagggaa

SEQ ID NO: 17514 - DNA, 929 bp, Homo Sapiens
  misc_feature (201)..(438): n is a, c, g, or t
  misc_feature (489)..(519): n is a, c, g, or t
gcacgagggcggcccgccaggtcccggttgtgttggcctccctgtgcattgcattgagaggatattcaaactgaaggggagaagcacggattctgaaggatgaaaaaggaacaatgtcgttttctgatgtgacggctgagacatgagatcttcagcctccaggctctccagtttttcgtcgagagattcactatggaatcnnnnnnnnnnnnnnnnnnnnnnnnnnnnnnnnnnnnnnnnnnnnnnnnnnnnnnnnnnnnnnnnnnnnnnnnnnnnnnnnnnnnnnnnnnnnnnnnnnnnnnnnnnnnnnnnnnnnnnnnnnnnnnnnnnnnnnnnnnnnnnnnnnnnnnnnnnnnnnnnnnnnnnnnnnnnnnnnnnnnnnnnnnnnnnnnnnnnnnnnnnnnnnnnnnnnnnnnnnnnnnnnnnnnnnnnnnnnnntgagccactgtgcccggcctggggtctcttttataaggcactgttcccatnnnnnnnnnnnnnnnnnnnnnnnnnnnnnnncctctcaaaagtgtcacgttgtaataccatcacattgggttaggatttcaacatgtgaatttgggtgggacacatgcattcagtccacaatagtaagcagttgctgggtcagatgataacacttggtttaaccttttgaggagttgccaaattgtctttcaaagctactccaccattttacattcctaccagcaatgtggtgggttccagtttcttcacatccttgacaatacttgtcaatttccatcttttttattacagccatcctagtgggtgcaaagtgggcatttcattgtgttttgatttgcattttcctaatgtttagtgatgttcagcatcttttcatgtgcttattatccacttgtatatctttggagaaatgtctatttaacccttttgtcacctttaaa

SEQ ID NO: 17515 - DNA, 847 bp, Homo Sapiens
gcacgaggcacaccttttaggggaagtcctttcagttgatatgagatctctttaacacccctcagtctatgtaggaaatgccttgtgatacatagagaaccctcagcttctctctgcctctggaggaccaaggtctttcctgacagtcggagacacaccttgatgtatgttaataaaagcatttcaggctgtggggccaccatgtatattaatactccttatgtgtccagcatctgtgtattcattcgagtgcccaatccctggatgagatgaactaggccttataaaaagtcaaagcctcaaagaaatggcacaaccatgttcttcggcactcaggctcctaattgcagatcctcacgaagggtggtatgtggagctggaaggtcttgtggccacaggacatgctggtgagccctgagctggccttgtgcagagggctccgttcaaaggctcggggtgtctttgaggttgtttatcaagctggggaactcttccaagtctgacaatgtttcgaaccctttttgcaaggttgcactattagtataccatcatgtccggaaaacttttaatcttctcaaatatctgatgtaactaccagaaagtcccttacttccctatgaccaatcaggaccaagtcttggaggtgatgtgttacattacgtgcagcacaatagtacccgatcagtttaactcagcgctgaagggcttgtttttatgaaaggtactattccttctttcacattaactggaaacctcttttttacctgttgttcacaactagttttcttattgactgtattggactgtctcttcttgtagagactgatttttggccaacatattaatg

SEQ ID NO: 17516 - DNA, 891 bp, Homo Sapiens
gcacgagggggattacaagcatgagccaccgctcccagccgtgatttctgacctatgtatgttaacattaccagttccttggctcctcactttttatttggattgtcactctagttgcttaatttcctcatttctatttttactctttctccagtttatcttgctgtctagtacccttctaatatttctaatgtactgcttttataacttttttctgttcttaaattaacaattgcttctgtttacctttcatttccagttcagatctgtcctctatagtctgttctcacttaacctccccatcatgcattctctttttcatctagaccctgtggtaccttaggagaaaaatacttttcttccattgtttctttattctgttcttgtggtttagattgcctttgcttctttcttacatgttttaagtcctgctactctttaaagggtcctcacaaaacctacctttctgtgaagtaaacacagtcatcgttgatttgtcaactttctgtagtatgtaagaaggctttgattacaagcagtagaaaccaatgtgagctagcttatgttgaaaggggggattattttaaggatacaggatttcctggaattcaagagtaggaatatataggcagacctcataaaggcttgtggtggtgacattgccctcttggtttcagtcagggttcttaggagagctgatgatttttctcctattgatttggttttctggtttgttttttgctataccatgctgtcatttcttttaaaaaattaaactatttgtcagtagtttgggaggatatccttctgcagatctgtgcttataccacatatgcttataagatctttcctcttagcatgaaaacaaggatcatttctcctaatttaaaa

SEQ ID NO: 17517 - DNA, 828 bp, Homo Sapiens
gcacgagggttcagcttccacttagaagtgagaacatgcagtgtttggttttctgttcttgtgttagtttgctgatgataacgtcttctagctcatccatgttcctgcaaaggacatgatctcattcctttttatggctgcagcggtattatttatatatgcataaaatgctcatggggagcagaggagaggtgacctcaggttgcatactgaatgaatggggacatccttatctcagataagcatacttggactgacttacccacaggcttctcaagcccagagacctactctgcttgcaaaggtaatttgcaatgtgcttacaaaactatacccttaatagaccctggataaaggctggaacgatgtcgctgaaaaataaatgttaccagtgacctggagaggaggaatggctatagcagaggaatggaatgagcttggaattcaaagacacacaacaccaaatagcaacgtgatgactcctctagttcttattttcagagtaaaagaagcagcaggtgcacctgtagattcagatgaaggtgcataaggagactaggcagccatgggtaacacctcacaaggaaatgagcgtgttatctgtatagtggtgtcactctggctgaatgtcaatttaggtgattacttaaaggccattcacctgatagggctgggggtcccaggggtgagaggtggggaggggattcttgctcaccttgaaatctgagctctgcaccaggaagcagaggtcaaagggcatctccttctggaaaggcatgtgtgtcttcctctccctcgggcccccagcttccgttctgcctcgtgttg

SEQ ID NO: 17518 - DNA, 924 bp, Homo Sapiens
gcacgagggtgaaacttcacattttaagaactgagttgagggggttgttatgcacttctgtaacttgaggctaagcaaggggttaactcttgtgagagccaatagagtgtgtctgtattcgcagtccatggctcattttctttatagtaggcatatggatcttcccctctgactttgaatatcatttggtgtggcctgtgggttattttcattctttaccaccaaataaagcggcttattagctactcagttacttgctactcaaaggttaggtcttccctgttcctgcttggcagtgttaaagcttacagggttaacttatgatgattctcctggctcattttcatcagaggcatgatgactggaaagggatcacatgggtcgttggtggtgacacctcactgtttcctaggtttggatagagagatgtatacaagacctttcctgttaaattacgtgactacagagacttgccaggacaaaattttcctaagaaatcagaaaaatgattaagtgagataagtacctgggtgacacagatattagcccgttggtaaaagacaacaaatattagcttaaaatctgcatatgtagaatcattttcattagatttagagcttgaagcaccttggctctcagctactttaaactcctccccatataaatcagggcaccaataaataagtttcagctttttaaaccctggtttgatgttaagcattataaagtacgaagtttgttaccacagtagagataatttagtagaaaatgctttgaggcttcagtatttgtaagattttgcattagccagatgctaggttgttgaggcatttcagtgttgataatagcctgagcagacttctttacaaatgggatctgtttctatatgtgtatatgcccacttaccattcagagagactggtc

SEQ ID NO: 17519 - DNA, 836 bp, Homo Sapiens
gggaaagaacttttttggaattttccccccaagggggaaaaaagggtggtcaaaaaccaaggggtggtatatttaattctgggtcacaaattaaatccaagaaggtgttttaaaagaggccagtctatctaaaacccctatttttgaaataaatacttcttttgaagcccagtaaaactttaatatgggttaaaatcggattggaaaatttgggtggtgggagaggttatataaatttccactgggtcaaaaaagattacacagaagggaaatttgggttttttcagaaataaaggcccctgggaacaccaacactggagggtggtgtaggattttaagtcctgagaaaaaaggagacccgggatccttttaaaagcctctggtggtccttctttcccaccaaaaattgtggagtggggggaagaaccctccccaccaattggtggcgtgagagaaagattccaatcgtctgctccaccaaaaacgagtgcgaggggggaaggagataaccctataccttaaatcctgtgatgcatttctggcccatctaggagctctggcggagggatccaggatgagtgcgcgtgagcagacgaggattcgggcaccgcgccgagagtgaggcgcctaaaataagttgggcagagtagaggcgaactggagtcggaggcgcgtcttaggtgaggggaaacacgtctggttgtgcctctctgagttcttctcatccatccgccgccaatttcatttgcggtatatcatagaagaaaggggggaaaaggttatacgaaccacggtagagttaaaaaatatgttttgtgggggggcggggaaccaaa

SEQ ID NO: 17520 - DNA, 887 bp, Homo Sapiens
gcacgagggacggaccgcctgaggacggccggccagggcggtgaaagcgccagccctatggcgcgggtcgcgtgaggcggaaggccgaggacggccggcggcggcgcccgccccggcgatgcgggccccgcccgtcgcctcaggtgccatttggattgtactttagtggcacgatgtactctgaatttctaagactgttgaactccagtttgggaactataacacagcagaacagtttgataggtgatcactgtaaaaataaaaacaaatcactcccaagagcttactgtttaatcaccagaatagaagaaacacattataacccatttgatagaagactttgggctatctagtgaaatgggctcccagacacaatcatactcctgctgataatgatgatatacattttagccataaactttcttttaaaagtgacaattttagttaaacataagccttttgaggagaaaggcttttatgcatctcagttaaacacgtgcattggtagtatcaacaaatttgcaatatagaagttgaagatagttttttacctcactttttaggaggttgtattcaaaattaaaatctcagaatcttacaggacatttaaagactcatgttgatagcatggaggagaaggaaagaagtcacagccttctactcagttgtaggtcttcttgtcatccagctgtcacactgacaaaaagaaaagatgatacatgttttttgctcagataagaagcctgacattaaaagatgtcatatttttttctccacatttcaaaaagttgtccttctcatcactgcacagatctgtctgaaagcctcagtttctgagtgacccaggaacagatcagaaatggagcatggccttgtcctttaatggg

SEQ ID NO: 17521 - DNA, 971 bp, Homo Sapiens
gcaccaggcccaccatcacggaggccatggtagcacgcagccggagaagccatccctgcctcagaagcagagcagcctgaggagcaggaagcttcctgacatgggctgcagtcttcctgagcacagggcacaccaagaagcaagccataggcagttctgtgagtcaaagaatgggcccccttatccccagggagctggccagttagattatgggtccaaagggattccagacacttctgagccagtcagctaccacaactctggagtaaaatatgctgcatccgggcaagaatctttaagactgaaccacaaagaggtaaggctctccaaagagatggagcgaccctgggttaggcagccttctgccccagagaaacactccagagactgctacaaggaggaagaacacctcactcagtcaatcgtcccaccccctaaaccagagaggagtcatagcctcaaactccatcatacccagaacgtggagagggaccccagtgtgctgtaccagtaccaaccacacggcaagcgccagagcagtgtgactgttgtgtcccagtatgataacctggaagattaccactccctgcctcagcaccagcgaggagtctttggagggggcggcatggggacgtatgtgccccctggctttccccatccacagagcaggacctatgctacagcgttgggtcaaggggccttcctgcctgcagagttgtccttgcagcatcctgaaacacagatccatgcagaatgagccctgcgagcaatagagttgaagcagcctctgctggacagtggactgttctatttttttcaataaccaaaaagattaaacaaaaatactataaaacccctgaccacatttaaaaatgataataaaagtaaacaaatcagcatctttttccccttccctgcttcattaccccctcttccatctatagactttggtcatttttgtctttagaaaa

SEQ ID NO: 17522 - DNA, 925 bp, Homo Sapiens
  misc_feature (47)..(65): n is a, c, g, or t
tgagtgtagtgttttcaaactagaggaggcaagggtaagggaacacnnnnnnnnnnnnnnnnnnnaatatgggaggctatgaccacatttcactgccactgttgcaggtattacagcttcagcacccccctcaacctcacctcccatccccactctaacaactctcttgtctgatctagcaaaaggactgctgtggccattatggtaaatagtggcagggagagggtgatggttgggcaagaaaaaagtgggggataaattcatagtcactactaacttattcttctttttccagccacattttgagccaccttcaaatccaacagaagaggggaggcatggagggagaatgttagaaggggaaatggaatggagagaggggagggattccctgttccatctctttgttcttcattgcctaatatttttcagtgacttaatgccagccatggtaacctctttattttcttcaaaatgttgtttaaattattaaactaaaacaagaacgttgtgtagaatttagaaaatgtagcaaagttcaaagaagaaaaaattctctagtaatctgtcatctagagaacaccaccattaacattttggcagttttcttatggatatatgtttataaaacatgaatttattctgtgtattcaatatttataatgattctaccccatctagattattaaatatcatgtataagcacatcttaatggttgcatgattttattactttattgtaccaccatatttagttgaacatttagatgttcacaggatgctgcctttattttactacttatatcactctgatgtgaacgtctttagtccatagatctttgaaacattgtcagaacgagaaacacatgaagagttgttacatttactgttgctggagtatgaaactgatgagtcctgatggtgt

SEQ ID NO: 17523 - DNA, 889 bp, Homo Sapiens
  misc_feature (64)..(177): n is a, c, g, or t
gcacgaggcctcagcctcccaagtagctgggactataggcacacatcaccaagcccagccaaannnnnnnnnnnnnnnnnnnnnnnnnnnnnnnnnnnnnnnnnnnnnnnnnnnnnnnnnnnnnnnnnnnnnnnnnnnnnnnnnnnnnnnnnnnnnnnnnnnnnnnnnnnnnnnnnnctgagccactgcgcccagccaggatttgaattattttaactcatccatgggctgccctagaatgtcacaaatgagggttgtttaatgcctttcttatagctgctactggaacactattatgacctaatttatgagccatccttactcatctacaagtgctgaagcaatgttacatacttttttgctaaactcagattttttagcctaatttcttgtcctcctatccacctgcatccacacatggcctgcatggggctgccttccctgcagtgttctgcagccatgcttcagggtatagctgttggtggacagcctcaggtcttgggggcactacagccactaaacgaggtgtgaaaggctcaagaggatgaccagcaattaattatccccagaaagtgaaggaaaagagacctttagggatgttgctggtcaagtcttgatttgaccggagtcaaatcaatcttcaagcaatcttggaatcctcaactgcagtaagcatttcaaaatgcaaacaaactgcttaacaactgacaagacaccagcccatacgctgctcttccaacagtgggttctagctttgacaaaagtgctaaacatttccttgaatatattcttcctctttttgtcctcatcactcaatactggtgctcttgtcacaggtagaacagcttgtttcttttccatctattcaagtgtgtttctaattctaaaa

SEQ ID NO: 17524 - DNA, 641 bp, Homo Sapiens
  misc_feature (453)..(465): n is a, c, g, or t
gcacgaggctctgctttaatatttgatatcttacatctaaaataaattctctccacatataaaacccatagcctttggagatatggaaaatggtatctttcagatttctagaagttcaagtgtcatacaacaaaacaggaaccccctttactcttatggacctcatttcaatatactgtttacagtttgatggaattgtataatttaatatttctcttgtactgtagtttatatttatttacagatttttttgtactgtgtgatttgaactttttgttccttgctatgatcaatgtttatgtagtagagcacttatgatcacaaattaagttttttggtttgattgcactacattaaattttttaatgcagttctgatttttgactggactaaaactgtgtcttaatgtatgtgatgagtacttaaaattttaatccatgtggtccccccccnnnnnnnnnnnnngcattgtatgtcaaaagcgcttgttctttcgtgcatgtgtaagatttaatggttccattgtattatttgaccatgacattttggagaaacattcccagctgtaatgttgtgtatggtagttctcactggatgctagagttttcaaaaccactattcttctaataaattttgttgtg

SEQ ID NO: 17525 - DNA, 632 bp, Homo Sapiens
gcacgaggatttttaggaaatatatcataagtatcctagaaccccatgggctagcgtcttaggaaatagttttcgttatatttgatgaagctgtagaaacataagcccaagtattttgtgtcttctgcatatgtcaggatgaacaccaggcatgtaagaaatatcctaaagtacccaagtgataatctcatgaatgatatgagaatcgtttttactgagtgagttctcttttgaatggatttgactatgcttttaaaaacgtttttaaaatgtacttacatctttttcgatagcccacggatttcataatatcctcttgatagaataatatcactcaatgtgatttttagaaaaagaaaaactcggtggtctcatatcttttgacagttgtttgtgaataataccctccccaacaaccttcccagtactcaactgctatgtaagaatgctttcttatgtggtaaatgtctcagtattttgctgcctggtatttgttcagtttccttgtatatctcagggtcagaaggaatcaggctttctcccaactctgaaacattcagacttactttctttttggtcagccttttaacaagcaagacaataaactccttttgtcagaatcgatttgatta

SEQ ID NO: 17526 - DNA, 761 bp, Homo Sapiens
  misc_feature (591)..(616): n is a, c, g, or t
  misc_feature (627)..(690): n is a, c, g, or t
gcacgagggtgaagccctccttttcatccaactgaaccagcactgtgtggaaagaaatacaaggcaccccacagcctgtgggaccatcaagaacaacacctatataataacttcagcaggaagtgaaagagaaaagagtgaatttgttgaacccccactctgtattacgtggaggaggcaggtgtaaagtgattaagtgaccagaatgaggaggcgacagagctttctgtacagcttccaagtggctgctccgccgtgtcccctgctgcctctgcaagtgatctgtgtgtgcacttgacgtcccgttaggtcagtgtaggagctccatggacgaagcgttcctgtggctctggatccttactccttccagtcgaagaacgggagaattcctaaggttaaaagccatagttgggttatttcgaagggaatgatcaaagctcccatgtggatttggtggattttcctagccctgggcctcttccttttcctccccttcctgccctcctcatgcagtgaccctaaacataaggtctggtaggaagagaagcagtccacttgtggcctcttgatggatttgatggattaattccnnnnnnnnnnnnnnnnnnnnnnnnnngagacagggtnnnnnnnnnnnnnnnnnnnnnnnnnnnnnnnnnnnnnnnnnnnnnnnnnnnnnnnnnnnnnnnnaggctcaagtgatcttcccacctcagcctccggagtagctaggactgcaggcatgcaccaccatgcaaagc

SEQ ID NO: 17527 - DNA, 966 bp, Homo Sapiens
gcacgaggcaactgttaaaattgcctctacgttaatacaattttattacccagtggtaaatatacataacataaaaggtaccatttaatcattttcaattctaaaactcagtgatattgaatacattcacaatgttgtataattaacactgttttcataacttttctatcacatcaaacagaagttctgtaccattaagcactaattctccattccctttgccccagcctccatgccctggagacatgcaatctgcattccctctacatgaatttgactattcatgatctttcatataagtagaatcatatactgtttgtccctttgtgtctggcttattttgtttagcataatgttttcaaggtttatccatgttgtaaacatgtatcagaacatcattccctttttatggctaaataatcttcccttgtatgtacatgccacattttgtttatctacacatacaggtttgttttcactttttgactcttgtgaataagaatgagtgatagtatctggtgtgtgcatacagccattttcttactaaaggccaatagcatcaagcagtctactaatggttgttatttatctgattaggatccagagttccaaaaaggttaattcttattttttccagtttaatggcagtttttgtggagggattgacttctataactccctattccaatcttctaaaatccactttaaaagaatggtttaaattgtgtgcttgtaggatgaaattgataaacaattattttacaactttcaaaattacatcatagagataatgtcctttgactattgggtgttcacatatttggcatgttatgaacaactttctggaagataaaggccttttatctcatacttaattattaagacaggaaccagtgtgctagcaatggctttgggtttgatgtgatatatttgtatgtatgattttttaaaagttaggtgaaaatc

SEQ ID NO: 17528 - DNA, 408 bp, Homo Sapiens
ggagttaatgatctttaatgatttctcccatttatactgtgtttttaacaagcataataaaggaaaatataccagaggtttattaagtatgacaaactgtactttaaataaatgttgctattgactttaggacttcttgcacaaagtttaaagattaacaatactaataccttaaaaatgctttttgaaggataattcttacccgagctaagtaagcccttacagtctacagaataatgatggacgttatgaacaatactatgataacgtaaattgtccacatgcccttaaaaccttatctgatttaaaaacttcccctctatatagaagaataagcttacagaaataatgtttccctaccttcggggaaaaggatttaaaataggaaagaacatgatgtatttaagg

SEQ ID NO: 17529 - DNA, 896 bp, Homo Sapiens
gcacgagggtatcatctttattctgaagaaatgccttttagtatcgtgaacattgattataggccttgaaaaaaattactggttaatttttttcctctgtaaaatggtattaataccgattttgaaaaaaaggaaaacaaatagattccattgtttgagagctatctgtcagacaacttaaatatgtaaaattgtttaatcttcacaacagatctatgatgtagatattgtttgcattttggctaggaggaattggagcttcagagaggtaagatgaactactcaaggtcacacacaggtaaaaagggacagtgccaggacttgaccctgacctggtgctgttcatcaccacatctaaccattttcccacatgtctcagttctcacagctgttgctgtgaacagtggcagttacaatggttaacgctttataaattatacacacttctttagaaataatgtcagaatgaaaatgacagtttcagtatcatcactaatgacagttggaaaaatgcatttttctagtgtagagagggtaccaggcttgttttgcctctttgacaacagaattcatcatttatcccaattaccagaacaactcttcatttttagcaaatggctgaggccgagcgcctgtcctctagattaaagtacctgcttacctcctgtgattgtaaaaggcttagtaaggcttatgatcagaaggttcaaagttctctactagatcatctgaaaatgggtctgtgctacaataaaagaaaaataatattggaagctcaggatatagggctagagcaagattttctttttttcttcaccatttctaaattttgttgaaaatggattcagttttacatttttattcttttattggaactttaaattctccccacctct

SEQ ID NO: 17530 - DNA, 528 bp, Homo Sapiens
gcacgagggccaagaaggacctggaggagtggaaccagcgccagagtgaacaagtagagaagaacaagatcaacaaccgggcatccgaggaggctttcgtgaaggaatccaaggaggagaccccaggcacagagtgggagaaggtggcccagctatgtgacttcaaccccaagagcagcaagcagtgcaaagatgtgtcccgcctgcgctcggtgctcatgtccctgaagcagacgccactgtcccgctaggtgcctgctaggtgcatggccacagagcatgggctgggcctgggcacaggaggagcagctgctttggtcggggtggagactcgcagcagctgctacccacagcctattccactcctccccatctccaggcgctgggaggggggccctcaccccatcacgcctcgctccctcctggccctctggtccagcccctcacgcctcctctcagtctactcaattgtgactgtccctcctgatgtattttttttcttggcttaaagggtgtgttgttgactct

SEQ ID NO: 17531 - DNA, 889 bp, Homo Sapiens
  misc_feature (525)..(554): n is a, c, g, or t
gcacgaggctttacaacttcattcctgagtttgattaccctttgcctctttagtttgcatacagtccaagtctcttctcttggatttcccactaacctgagctttaatctacgtgaactcagacatcttctgagtattttcccactcatagtgaaactttccctttctgggagtagttttgtgtttcatcctctctgggctgtgtgtctcctctattccatgtaatcaccacagtctctggctgactctctttgtaggcatgggctgtcacttttttctgtatttgagtatctgttgcttagtggtgatttgaaattagtaatattctccatctcctagttatgttaaagtcatggattgtttagatagtgttatttgctccacttatggtgacctttataattcttgggaggatgcatggggaaacgcagatgtaagcagctgctattattcttcttacactagaaaccaaatgtgtgccttcaatagttaaattcctctctgtttttccactagcctaggacnnnnnnnnnnnnnnnnnnnnnnnnnnnnnngaccccaaacccatgaaatacaaaaaatatgcacttgcaattatgttcatctctggaaactggccaaaaaaccagtcagctgcaacatggggcatttgtttagcgatttcattccctaagaaatattttggtatttatgtggtaagattaattttgcttgtttctagaagtctggacagctgatcacctgaaagagaggagccaagaaaaccaatctaaacatttgtgggaagttgtattcatcaataatgaaatgctgactaagaacaaggtgatgtaataggataccatttaatgtggatgtaagttcttttcctttcagaaaatgttctgtc

SEQ ID NO: 17532 - DNA, 897 bp, Homo Sapiens
gcacgaggatagcaataaaagatgctttgaatgaaaattctcaacttcagacaagccataaacagctttttcagcaagaagctgaagtatggaaaggagaagtgagtgaacttaataaacagaaaataacatttgaagactccaaagtgcacgcagaacaagttctgaatgataaagaaaatcacatcaagaccctgactggacacttgccaatgatgaaagatcaggctgctgtgcttgaagaagacacaacggatgatgataacctggaattagaagtgaacagtcaatgggaaaatggtgctaacttagatgatcctctgaaaggagctttgaagaaactgattcatgctgctaagttaaatgtttctttaaaaagcttagaaggagaaagaaaccacattattattcagttatctgaagtggacaaaacaaaggaagagcttacagagcatattaaaaatcttcagactcaacaagcatctttgcaatcagaaaacatatattttgaaagtgagaatcagaagcttcaacagaaacttaaaataatgactgaattctatcaagaaaatgaaatgaaactctacaggaaattaacagtggaggaaaattaccgaatagaggaagaagagaagctttctagagtggaagaaaagatcagccgtgccactgaagggctggagacctatagaaagctagccaaagatcttgaagaagaattggagagaactgtttcatttttatcaaaagcagttattttcctacgagaaaaagaggacatgataattggttggcagctcggactgctgaagaaaccttcagtgatttaaggaaagaaaatgctcacaacaaacaaaaattaactgaaacagagttgaaatttgacttttaaaaaaa

SEQ ID NO: 17533 - DNA, 667 bp, Homo Sapiens
tttaaaaatcccccgggctgcaggaattcggcacgagggtgcccttgacaggcagggagggctaggctgtgcatccctccgctcgcattgcagggagatggctcagcgacttcttctgaggaggttcctggcctctgtcatctccaggaagccctctcagggtcagtggccacccctcacttccagagccctgcagaccccacaatgcagtcctggtggcctgactgtaacacccaacccagcccggacaatatacaccacgaggatctccttgacaacctttaatatccaggatggacctgactttcaagaccgagtggtcaacagtgagacaccagtggttgtggatttccacgcacagtggtgtggaccctgcaagatcctggggccgaggttagagaagatggtggccaagccgcacgggaaggtggtgatggccaaggtggatattgatgaccacacagacctcgccattgagtatgaggtgtcatcggtgcccactgtgctggccatgaagaatggggacgtggtggacaagtttgtgggtatcaaggatgaggatcagttggaggccttcctgaagaagctgattggctgacaagcagggatgagtcctggttcccttgcccgcgtgggaccccaatagaactcagcccttccatgccag

SEQ ID NO: 17534 - DNA, 401 bp, Homo Sapiens
  misc_feature (145)..(158): n is a, c, g, or t
  misc_feature (238)..(252): n is a, c, g, or t
  misc_feature (301)..(324): n is a, c, g, or t
gggggggccgggacccccttccccccatagggagacttaaaacacgcgctcccggggcgccgttttacaacgcctggggggggaaaaccctggggtttcccaacttaatcgccttggggaacatcccccttttccccccgggggnnnnnnnnnnnnnncccccaccaatatcccttcccaaaattttcccaccctgaaaggggaaagggaaacgccccgtgacggggcataaaacgcnnnnnnnnnnnnnnnttcacgcaccgggagccctaaacttgcgagcgccccaaagccccctccnnnnnnnnnnnnnnnnnnnnnnnncgccccgttcgccgggtttccccgccaagctctaaaacggggggccccttttggggtccaatttatggtttttcggg

SEQ ID NO: 17535 - DNA, 898 bp, Homo Sapiens
gcacgaggagaagaagagcctcaacaacccgggacttataagttatttttatgttactagacttgcataaagattcttgttttccaactcttcattttgttgcaatgtgttattacaggatatatgaaccaattaaggtttttcactacagttcttgaataaaatttaaaaatcattttttattttaattaaaaatatttcccatttatagaatgcatatatttgcaatggacttccactttcatcaactttccatctcatcgctttaaacaggaacttgaacaagcactgttagtttagacctaaaggataggaaagcattaaataatactttggatctcctgaggaaaagataagtttgcttgcaatttacacattccatggggaaagaagagccatatttccttaaaaaaaacattaataaagcttgttattgagaaaaattgtagtgaaaagccttaagtaccaaattttaaagcagcagtaacttaatttttatatcagtgtttttgttttgcacaaactaaatgcagtggtaggtgggtttatgagtatattaattgcctttatccatttgtgaagttaagttgatgagggcaaggtttttgtttgtttaatttgtatatgtctaaaggtatttggaactttttacaggaattaaacatatatgcaaatttgtatataaaaatagcatggccatcatttgaatgcttgtaaatgaaaggattatcttttttgagatctatatataaatagaaatagaaaatccagctggactgattaggattcttttttaattcatttgtgtataacatttttattacaattacacatcagttttgacacagtcatagcaacattaatattttcccatgatgcagatcctttttgtaatggg

SEQ ID NO: 17536 - DNA, 372 bp, Homo Sapiens
gcacgagggccccctttgaagctcccacaaagcactctaagggagatggggctgaggacagctcaaaaaggagaggacaggcctggcaggggcccactggtgcccagcaccaaggcgagctccgggctcagaccaactccaaggtcagctggccacaggcccaggcctcctctgaagcagggaccagagggagccaggcagctgtgtacagtgagaagggatccggatgggggagctctgtacagagggctggtgattgtaaaaatttcttttgtaaagtagaagttgggggtggggtgggtgctggctgcaaaaatttctggcttctcttacccctattgcccccggcaataaattgtttctatatgccag

SEQ ID NO: 17537 - DNA, 861 bp, Homo Sapiens
gcacgaggccgccctggtggcagctctgacccgcttctcccacctggctgcggataccatcatcaatggcggtgccacctcgcacctggctcccaccgaccctgccgaccgcctcatagacacctgcagggagtgcggggcccgggctctggagctcatggggcagctgcaggaccagcaggctctgcggcacatgcaggccagcctggtgcggacacccctgcagggcatccttcagctgggccaggaactgaaacccaagagcctagatgtgcggcaggaggagctgggggccgtggtcgacaaggagatggcggccacatccgcagccattgaagatgctgtgcggaggattgaggacatgatgaaccaggcacgccacgccagctcgggggtgaagctggaggtgaacgagaggatcctcaactcctgcacagacctgatgaaggctatccggctcctggtgacgacatccactagcctgcagaaggagatcgtggagagcggcaggggggcagccacgcagcaggaattttacgccaagaactcgcgctggaccgaaggcctcatctcggcctccaaggctgtgggctggggagccacacagctggtggaggcagctgacaaggtggtgcttcacacgggcaagtatgaggagctcatcgtctgctcccacgagatcgcagccagcacggcccagctggtggcggcctccaaggtgaaggccaacaagcacagcccccacctgagccgcctgcaggaatgttctcgcacagtcaatgagagggctgccatgtggtggcctccaccaagtcacgccggagcagattgaggacagagacaccatggatttctccggcc

SEQ ID NO: 17538 - DNA, 712 bp, Homo Sapiens
gcacgaggctgctgtgaatcgacttacacatcttccccacaggttggtccttcagcgtcaagattcctgggccacttattaatagaaggcaccaggacacaggtgcagggatgcagagctggatgctgccttctcaataggagaagccaagaaacgcagatgccgatgcttaatcaactccgtctctccctctagtgactcggggatagctgccctgatgccaaggcgattgtcttctggaagcagccacgccgtgtgaggttcctcatcactgccctgcatctccctgcgagctctcggggataattgcaaaatcacgtttgattccaggggagcagaaagcagcaggagccgtgaattctccaactcttaactggtcctcgactggagccacttttccctgcccacccatccctgtggcggattcattacagttatccaaagccggttttaactttgctccccctggctcagaagtctgtcagtgggtcctgagcggcttcaccattcaagtttattcctatcagcctgtaatacaatgctctatctggctccgcttgcttctccaaaccttctctcccaggtctcattctgcctctctgtctaactagacaagatggcttcctgtcctgtgcctgtctgctccctgcagcaggaatgccgttccctcttccctacagattgaaattatatcctctttcaagtcttactc

SEQ ID NO: 17539 - DNA, 783 bp, Homo Sapiens
  misc_feature (227)..(272): n is a, c, g, or t
gcacgaggctcttctttccaccaaagtttgtcgtaatattttctcctgaaagtgcattctggctcctttaaattagtcagtgttatattgtaggagactgtcatggaaaaaaggactcagtttactttcgtcattttcacaggggaaccttttaaaacaatcttttcagcagcagatacctttaaccctaataatctcaggccttgatgaaaatactatattttgtnnnnnnnnnnnnnnnnnnnnnnnnnnnnnnnnnnnnnnnnnnnnnntgagctccatttgacttctgatgtctggtttagcattacataatatgttgatcttacactctgcttttgtccaaataaaatgcaatagtatcaatatcaatttcaaaaaaatggactgaatatgcttttttggtgatgaaatctcatgtacgatatttatagtgatgtgcttttattttctcatgagatactaaatattaattgtgttgtacatttgttcttagcatatattaaagttttgaaccaaatgtgttaaagcttacgctttgccatgtaaatttcccagaagttgttgagctcaaatgtatcctacatccagctgtagaaatttgtcagaaattgtttaaattttgtatataattgtactgtttaattctagccattgcgctgaacagtatttgagttaccatataatatggcttttacacaaggaaatgtgtggcttttgttttgtattttttcagtatagaagttcctgtgtcttatttaaataaagttattactaagactg

SEQ ID NO: 17540 - DNA, 287 bp, Homo Sapiens
ccacatttaagtttatttgccatgaaagggaaagaacatacatgagggtttttaaaagttactactggggtaacaaaacaacattatcctcttaaccatttttcctcttaaccatttaaatttatcctcttaaccattttttcagggtacagtacggtagtgttaagtatattcacatggttgcaacaaatctctaaaacatttttacccggaaacactaaaactctataccactaaatactaactccctctcctaccagcccttgataaccacctttctactgtct

SEQ ID NO: 17541 - DNA, 833 bp, Homo Sapiens
gcacgagggggagacccggggagcctgggaccagctgcgagagccgcctacctgccaccgccgcccactgaagggtggcctccccggcactcctgctgtgcttcgaggtcctgtgcggaggactgtatttcgcggtaagtgtgagaatcactactcctgagcagatgattgaaaaagcgtaggggaaactgcctatctgccatggaaatttacgaggttggtgtggaacctgtgaccgctggacatgaggtggctgatatcaaatactgatatcattcctggatcaagtgattattttaattctggagatttctttatgatgactactatccagatctgaaaggcctggttattttacgagtaatgatctcaaatctggtgatgcatgtacctgtaatacgaatttacaactgtcagatattggcacatatcaatgcaaagtgaaaaaagctcctggtgttgcaaataagaagattcatctggtagttcttgttaagccttcaggtgcgagatgttacgttgatggatctgaagaaattggaagtgactttaagataaaatgtggaccaaaagaaggttcacttccattacagtatgagtggcaaaaattgtctgactcacagaaaatgcccacttcatggttagcagggaagatgtgccacctccaaagagccgtacgtccactgccataagctacatcggcagtaatcatacatccctggggtccatgtctctctccaacatggaaggatatttcaagactcagtataacccagtaccagtgaagactttgaacgcacgtctcagagtccgactctcccacctgctaaggt

SEQ ID NO: 17542 - DNA, 760 bp, Homo Sapiens
acattcaaccaacatttattgagcacctcctgtgtctgggcactgttccaagttctagagatccagagatgaataaaagttaagacttgccctcaaggagctcacagtctagtggggagataaacacagaaatattacaacacaaggtaatgggttctagaaaagaagcatgtctaaggtgctattaaaaacatagtgcttattttagtttgggggacaggaatttgggattggggatgattttataggaagtcagtatttgggttgacacttggaagttgagaaggatcttccaggcagataaaggaaaaataagggagggggagaagcatgtaaggcatagagatgtgatagcactttgtggatttggaaaacatccagagaaccaacagatttggtgacaaaatccttatggtagacaagggagaactgaaaatggttcccagaattttagtttgagggactgagtagtgatcattgttatttactgcaataggagatacaggaggaagagcagatgtggagaggcagaagacttctggtcttatggaggttcatcctgaaatatctgtgggatgggcaggcagatatgagtctggatataaggagaaaggcatggaatatggagttgagagtcatcaccatgggctggtgatggccttagctggtgccatgggctttctgagatcccccaggaatgagaggaggaggaataaacagtggactagtttattcccctacccctggggtaagaacagga

SEQ ID NO: 17543 - DNA, 600 bp, Homo Sapiens
gcacgaggctgcaccagctagactccattctgggaccatctccaggagtccatgagaggctttcttctcctatgtcccaattctcagaactcagatgtggctagaccaaccagtgggaaactgccccagcttctcccaccatagggggccggacccccatcaccagcctaggatccaggggctgcctctggcctcttagggagcagagagcagaactccgcagcccagcccagaggagtgtcacctcccacctttggagaggaatccttccctcccctggacaaagttgctgacaagctgctgaagtggcctctccatattccagctgagcctgaatctgactcttgagggttggggctgcacttatttattgcggggagacagctctctctcccacctcctccccagatgggaggagagcctgaggcccaagcaggacccgggggttccagcccctagctgctctggagtgggggaggttggtggaccatggagtccctggtgctgcccctcaggtgggacccaggcgttctcagctgtaccctctgccgatggcatttgtgtttttgatatttgtgtctgttactacttttttaatac

SEQ ID NO: 17544 - DNA, 567 bp, Homo Sapiens
gcacgaggtttctttttaagaaaagctaaatttatattaaattatcataaagtcctaaaatactgaacatagtggttaaataactccagaaagtccaatctctccagtgagtaacgttaaaaccattacacatgagcatgggagaatcgcttccattagtttaggacagagagattttgctttttacagagtaaatcagtgctctaatagatacttcctcaaatatgtcctttctacattctgaacagcccaagtgcaataagatccttccccctttccaatcaagaaaatgccacttttctacttgctcttcctccccagacatgagtctaaggacccaaagtgctcactcctttactgcttgttaagtgtaatgtggggaggctcaaaactggggctgacgctactgagagcaaggctaagggcctggtatctctctctagcagtcttagaactgactagaaaagaattgatcttgtcctttttcactttggtagctgatttctcaataccagtaaccacaggagaagtttcaactcaggaaacttcccctagaaaattctcccc

SEQ ID NO: 17545 - DNA, 648 bp, Homo Sapiens
cagccagcatggcttatgggagtgaggagggaacagagaaatgggcaggggccagatcatagagagtttagtaaactaggactaggaatttggattttatctaaagtgttaatgataaacaggggaaacttaatctgatctttttgaatgatcactttgttggctgtgtagggaacgggacagaaatgaaagacggaaatccatgagaaagctatattttagtagattaggggagaggaaatgatgggtttgactaggatgatggttatttagatggaagaaggaaatggaatatgtcttggagataaaagggaatcttggagacaaaaggaaaataaaaatcactgatggattggatatgaagtgaggaaaggagagaaatccacaaagattaaaaagcaggtgtggtagagggaaaactaggagagtcttggaaaccaaaatttaaaagtgaaagagagactgttgaatgctgcagaggaggaggatgaaaccttagaattgacagtgaatttggttacatgaaggtaattggtaaccttgataataccattcttgggttgggatgttgtaaagagaaatttagaggtaaggaagcagtaacaaccattggcatacttttgacgaagttctgcattgaagaggagc

SEQ ID NO: 17546 - DNA, 908 bp, Homo Sapiens
gcacgaggaaataatttcaggggttaatgaaaaagagccctgcatcccaaatgcctagtcctaccacaaaaagtctgcactttccattcctttgaaagccatggaagcttccagtgcacaccttccttgggagctctggtcaggctcggcagaacagatttaccatagaggcagccaccaagctgagcctcaagggaaggggatcaacagcccacattgtgatgggagagagggggtctcagccagagaaaaggccagggccaagcagactgccagaggaatgccatagtggagggcccttggcagcctcctgaagtccccagacctctgagatcagggacaagtcaccacagcagagggccgtggaaggaggccggcagggcaccccaacaagcttgggagccacctcacagtagcccaagccctgggtggggaggtgaggggcagaggcagcttcttcctcccttgcttagccagaagccatttctcatgaagtcacacagagactcagcactcagccctcggtgctcagcctgcggactccatccccccatttctccaacacaccctgcagcatttagcttgtcctagcctggagctgcctgggaatgaacaagctagaagagaaaaaaggaggaggtaggtgtgggacagaagagggtcccagctgcggaaactgaccaggagtgttgcaatgggcatgcgtggtgggaaggcacccagtgggcagtggcctagcaagcgctgtgggcacaaagtaaccataagttgtgtaatttcagccccctcagacacatatcaaggagctctgtatatgctggggttctttgggggaatggtgcctccaattcatgtctggtcttcttcccaagggatgatgccttctccgacagcctgagccagaaagg

SEQ ID NO: 17547 - DNA, 686 bp, Homo Sapiens
gcacgaggctggaacgtcgatgcatcaaacacatcactggatgtgtttgatgagaatgtattgagagtaaagctgcccagaatccaagtgtgtgtcatctgaactcttgaatcatggatggaaggtatgtcctctgttgatgtctcgcagcctgagctgacaatctgtaagaaggttttgttatcttcatgttacagatggtgaaccgaaacttacagagctcaagtcacttgaccaggctccatccctacaagaggcagcacgcaaactaaaaaccaggcggccttttccaaagcttgtgctctgctccactgctggaaggaacccttcggggaattgaagcagcactgaacaaaggccatttttaagaagcgacaccagaaacctaaggcggggtccccggctcaacaaggatctcatgttttgtgggtcagagattcttgtgtcgtgtctgggtgaggtcaaaaaccatgcagagactttcacttcctgttctgtggcagacaagacatctgaaaagctcttctgcagcaacacttctagatgccaaataaatcacagcaagtgcacttttaaatgtgttactaagatcataaaaatgaaggaaaatgcccaagcatatccccaacccctcaccccacaaccaccaccaccacaataaacaagttgctgacagcggattggcg

SEQ ID NO: 17548 - DNA, 930 bp, Homo Sapiens
  misc_feature (679)..(722): n is a, c, g, or t
gcacgagggaaccgagggaggaatgggcggggtcctcaggtgcccggcgacgtcatccagcccccaaggctccaggacgcaaagggtcccctgatctggcagtccctggacctaccctggagagcgtggggggacaaaggccggacgcgccgcccgctgccgcctccaggaagccctcccttgccaggacagtggagttggccgggtccttccaaagtgcctacggaaagctttgtcccatccttgaaaaattgctaatgggtttggagatacgaggtggagatgactagcaatcaaactcaaaggtggaagtcacatcgaggcagatgagcagatgaggggacctagagaagaagagaggtgcaaggagagcccagccagcaggaacatctgccccagtaggcagcactgccccacatcagagtcgaggaaagcaaagctcggattggataaaagaaacttgcaaacacggtcagtgcttactgcatgtgggctcagagcacgttaccctccttccctgcatgttcctgtgaaacgggtttactgctctaactctcagggacactgtgaagaccaaacgagaaaatagaaacaaacataatttataaaccataaagtactgacaccaaaagaggggcgagcacagcattgtgaatgtgctggtactaaatggtttgtnnnnnnnnnnnnnnnnnnnnnnnnnnnnnnnnnnnnnnnnnnnnttttaatggagttcatggggacgctgcaggatgtcatttaactttggacattttagcagcgctttagtgttaaaattattttttaaaaaatacaggatgaaggggaaaagcttcatgacattggattgggcagtgattccttggatatgaccccaaaagcacagataacgaaagaaaaaatagtaaattgtcttcatcaaaattaaaa

SEQ ID NO: 17549 - DNA, 371 bp, Homo Sapiens
gcacgagggtcctttgcatgtattcactcaaacaatcctcacaacattcctatcacatctcccatttcacagtgagggttctaaagcacgtagtgggtgaggaacttgtccagggtcacacaactaagtgggggtggagaaacatcaaatctaggtggtccaggtggtggccagaacccatcagcacctcactacagctgcctccagtttctcgctctaggaaatactcttccctgtcaactcctgttgtcctctgggctcagttgacatgtcatctccttgaggaggacatcctgagatgctccccgactagggtgggcacccacttccacactccaaatgcctatttgacctgtgtatcgctgcatccc

SEQ ID NO: 17550 - DNA, 845 bp, Homo Sapiens
gcacgaggaagaagagaagctattggaaagagagaggcaaagattacatgaggagtggttgctaagagagcagaaggcacaagaagaattcagaataaagaaggaaaaggaagaggcggctaaaaaacggcaagaagaacaagagagaaagttaaaggaacaaaaaaagaggaagctttgcagaagatgctggatcaggctgaaaatgagttggaaaatggtaccacatggcaaaacccagaaccacccgtggatttcagagtaatggagaaggatcgagctaattgtcccttctacagtaaaacaggagcttgcagatttggagatagatgttcacgtaaacataatttcccaacatccagtcctacccttcttattaagagcatgtttacgacgtttggaatggagcagtgcaggagggatgactatgaccctgacgcaagcctggagtacagcgaggaagaaacctaccaacagttcctagacttctatgaggatgtgttgcccgagttcaagaacgtggggaaagtgattcagttcaaggtcagctgcaatttggaacctcacctgaggggcaatgtatatgttcagtaccagtcggaagaagaatgccaagcagccctttctctgtttaatggacgatggtatgcaggacgacagctgcagtgtgaattctgccccgtgacccggtggaaaatggcgatttgtggtttatttgaaatacaacaatgtccaagaggaaagcactgcaactttcttcatgtgttcagaaatcccaacaatgaattctgggaagctaatagagacatctacttgtctccagatcggactggctcctcctttgg

SEQ ID NO: 17551 - DNA, 644 bp, Homo Sapiens
  misc_feature (474)..(516): n is a, c, g, or t
gcacgaggagaaggtaggtggagagttcatgccaggaggactccccagggtgcctggctacctgctgagttcagccctgctctgggaggcaatgaacagcccatgtcagggttacagttctggcccaaagtaatcctaataacatctctcattatatagtgctttctctatgctgctcaggattcttagcacttaccatatattatctcatttaatcctcacaacaatcctaccagatgcaaactatttttatctctactttacagataaagaaactgagtcacagataggataagtgacttgtgcctgcatctactctgttcccagtctctgttgtgagtctcattctctcacctgtactcactgcttgctttctggaatccagttgaataattagtatttccggagagcccccatggctttaaaacacttgtccaagttagcaatatccttcaaaatttaaattgcacatannnnnnnnnnnnnnnnnnnnnnnnnnnnnnnnnnnnnnnnnnntcactcaagtatataaaaatattgtagcacaacactgtttgttgcagccttgtttccagtgctaaaaaattggagacaagagggagccattgtggctccggctggttgcgctggcactcagggtaggc

SEQ ID NO: 17552 - DNA, 900 bp, Homo Sapiens
gcacgaggaattattcctatcagcctatgagtatatttctatatttttatacaatttttattcctgttttacaaacagagaaactgagatggagaggtcatcagcccaaagtcatagtgtgaatggtggagccaggatttatgctcaggcagtgtaacttcatagcctttggtcttagccacaatgctactctgcttcccaataaatatttagtcaaagtttattcatcagtatagaatgatgacattatttattatttattgactgcataaacccaaattatcaaacactttttcaacattctctcaaagaagtaaattcaatatatctaacttgaaatttaggagcattaaaaaattaggaaaactattttatagaaccagagtttttcatggggacaggtgctagggttctctgctccagaattctgatgcttaaaatgttgcatatttgttttagatggaaaaagagggtgctggcagaaggatccctggttgggcagcaacatgccagtgtgtccagaggagttccctgcctgccaggaatctcagcagacacagtgatgtgaaggagcaagacaaaatgccaggtagagacctactttaaatagtacttagaaataaaaatcataagaaatgttgaaccatgcagtgatgagaatcacttttataccacccaaaatcccttttcctgaaatctctatctgcttgatgatactgtccacattaaaatttttaaatattttacaaagtactttcataaaatagctaaacaatctgaaatccatccttctcttgccatcattggttttcctaaggctttgatatcctctacttccattgttgattctcctgttttcattttaagtcattttctttggccttctgctcttcccgtttt

SEQ ID NO: 17553 - DNA, 952 bp, Homo Sapiens
gcacgaggcttgaccaattcatgcatattgtgaaaggaaagcttgaaaatgttcgagtcatgcttgttcctagtccaagatatgttggtcttcaaaatgatgaaccaccgagattaatgggagaaggttttgtggtgatgcagtcaaatgatgttgacatctactactacatggatgagccagagattgtttgtggaagtttttctttccacctgactatcaagttctgaaagtttctgaaattgcacagcctgggagaccaagacagatccttgcttttgaattacgaatgaatattattgcagatgctacaattgatttgctgtttaccaaaaatagggaaacaaatgctgtacatgtaaatgtaggagctggctcatatttagaaattaatattccaatgacagttgaagaaaatggttacactcctgctattaagggacaactcttacatgtggatgccactaccagcatgcaatatcggacccttttagaagcagaaatgttagcattccacatcaatgccagctacccccgaatatggaacatgccgcagacatggcagtgtgaattagaggtttataaagccacttaccacttcatctttgcacagaaaaacttctttacagatttaattcaagactggtctagtgacagtcctccagacattttttcatttgttccatatacgtggaattttaaaatcatgtttcatcagtttgaaatgatttgggctgctaatcaacacaattggatcgactgttctactaaacaacaggaaaatgtgtatctggcagcctgtggagaaacactaaacattgatttttctttgccttttacggactttgttcagctacatgtaataccaagttctctttaagaggagaaggatgttgatcttcatttgtttctaccagactgccaccctagtaaatattctttatttatgctg

SEQ ID NO: 17554 - DNA, 346 bp, Homo Sapiens
gcacgagggtcccataagtcttcatgaaatgctatgtcatttcatgtcctgtgtcagtttatgttttggtccacttttccagtattttagtggaccctgaaatgtgtgtgatgtgacatttgtcattttcattagcaaaaaaagttgtatgatctgtgccttttttatatcttggcaggtaggaatattatatttggatgcagagttcagggaagataagttggaaacactaaatgttaaagatgtagcaaaccctgtcaaacattagtactttatagaagaatgcatgctttccatatttttttctttacttaaacatcaggttaggcagtatatagaataggac

SEQ ID NO: 17555 - DNA, 374 bp, Homo Sapiens
tattcgcttattgttaaaaatggagctgattaaacaaatttaacgcgattttacaaattatacgtcttacatttagttgcacttttcggaattgtgcgcgacccttatgttaatttctaaatacatcaatttgtatcggtcatggaacataccgtgattaggttctcataatatggaaaggaagatatgatatccaatttccgtgcgccttattcctttggcgcaatgcccccggtggccccccaaacctctgtggaatttaaagtgctaaatttatgtgtggcgagtgggtactcaactgtatcccaaacggataatcttgggagttttcccccaaaaatgtttcagatgaagctttttatgtctgtattgtg

SEQ ID NO: 17556 - DNA, 821 bp, Homo Sapiens
gcacgaggtgatgataacatgggtgccaaaaatacttcaataggagaagaatttatatccacagaagatgtggaattagaagaagctattagaagaagtcttgaggaaatgtaattaaagatattaccacacaacatcaagtggccttgaagagactgagataacgaattcttgagtttgttttctaaaggagaccagaaatccactattacaaatgtatttgaaaacatgtttttgctttcatatgttcaaaatctgatctttgttttgtatttttgtgctaatgtgcaaacatgtacagaagaaatagaatacatgttcatgcaaatataaattatgtattctaatataggtgtaacagtttcccagttaactttgaatttatatatttagatttaaaggattaaaaaaaaggaaagctcttgacagttgtttcccaaatagcattagttctttaattttatttgtactgtacaaatgatgctagtttatttttttagcagtgaaaatgaatataaaaaaggtgacataggtcaagttttccataaattctacttctcatgtggcactattatataatacctttgagatctttgtttatgtttattagaagagggtaatggaaactgatcatggaaacatttaaaattttatcagcaatgttctttgtgggtgccatgcctatgtaaaatattgctttaattagagcagcacattgctaaaataaaaaatacaccttaatttttaagaaataatttaaatgaaacaatttccattccttttactgcttagacttttatgtgactggtatggtctcctgg

SEQ ID NO: 17557 - DNA, 343 bp, Homo Sapiens
gcacgaggctgtgtttgataacagttcctatgcatggtttttaatgtgaggtaaatttgtttctttcttcagaatacctctctccaccccccaccttattcttcctctttaatgaatatttttattggagctcaaactccatgacttacgtgctcactaagttttcttttttccccttgtttactctgtctgtatgtatgtcaaaagctggcaaaacctctaaaactgtcaagaaaatgcttgaaagttgatttgtcatagtgcaaattcatgataaaatgtcttaatgttatttggatatgtagtacatagaaacagaaaaataaagtcatttttataactt

SEQ ID NO: 17558 - DNA, 631 bp, Homo Sapiens
cacgaggagagagtcatcgtgtttgaggaaaatgatgataaaattacacaagcttcacaatcacaagaaagtgaagactattctcagccatcaacttctagtagcattatttatagcagccaagaagatgtgaaagagtttgaaagggaagaaacccaatacaaagaagagagtgtggaatctagtttgccccttaatgccattgaaccttgtgtgatttgtcaaggtcgacctaaaaatggttgcattgtccatggcaaaactggacatcttatggcctgctttacatgtgcaaagaagctaaagaaaaggaataagccctgcccagtatgtagacaaccaattcaaatgattgtgctaacttatttcccctagttgacctgtctataagagaattatatatttctaactatataaccctaggaatttagacaacctgaaatttattcacatatatcaaagtgagaaaatgcctcaattcacatagatttcttctctttagtataattgacctactttggtagtggaatagtgaatacttactataatttgacttgaatatgtagctcatcctttacaccaactcctaattttaaataatttctactctgtcttaatgagaagtacttgg

SEQ ID NO: 17559 - DNA, 539 bp, Homo Sapiens
ccccgggctgcaggaattcggcacgaggcttttgacagccacgggcaggagagcagcggccagcttcccgaggagctctttctgctgctccagtctttggtcatggctacccacgaaaaggacacggaagccatcaagtcgctgcaggtggagatgtggccactgttgactgctgagcagaaccacctccttcacctcgttctgcatgaaaccatctccccctcaggacagggagtctgatccatcccattcacccagtgacttctttttgcccaggcctggactttttgcatcagtcacgttaaccagatgactttgcctgttaccaaacctcatgcatccacgtttgcgtctggggaggaataaaaagacatcgttcccgcttctgcgttttgttattcctactgccgccataggaattatttcgttggctgaacgttaccagcaccccgagaacacattttgatagaatcagagtataggacatggttgtcttctaaaaagccacgacatgaaaatgacaatccctttcgtctcct

SEQ ID NO: 17560 - DNA, 863 bp, Homo Sapiens
  misc_feature (124)..(146): n is a, c, g, or t
  misc_feature (265)..(303): n is a, c, g, or t
gcacgaggcagcaacattcttggtctatttttgtaggcaatagatatgaggattaggttctgactggaatcctttaaatatttaacattcaagttttctttgtcttaaattcagcctcttcctnnnnnnnnnnnnnnnnnnnnnnncctcacagaattgtgttgagatccaccgctcacacgccgtacaccacccagtggcttcattctggcttagccgcagaggcaagaaagggaccccacttgctcccatgcccacctcaagnnnnnnnnnnnnnnnnnnnnnnnnnnnnnnnnnnnnnnntctacctcagttgacaggattccacctttagggtttcttcaacttttaagtcttacctgttgagtgtaacttttgtagcatcttgcttttccaagcaagctagtgaggcatgacagagcagaagtctgtaaatgtccctgtgatggacctctttctagcatgttgcagttttatttttaataaattggtaagtgaaatgaacgtaaaggtaattgtgtacgttttagacatgacaatgaaaatttaaaatgtagcttccatacttgtgcataattccaaagtattttattttttatcaatcagtgttaaatagctttttgtacaggcttcaatccatgtttcgaagtgtgctgttttttaatgaaagtaactataatcttttcacatccatggaactgccgtttacacattgcaactttttaaacttaaccatatttttcaaaattaacgtttttggagggagaaaaatccccgcttgctaaatgatactaaaccgttgtttgggctctatattaggtcccgaagattttataaaaattagtctgtagctttttaggttc

SEQ ID NO: 17561 - DNA, 867 bp, Homo Sapiens
gcacgagggggttctgtgctgtgtgtaaggacaggtgtgtagttcagatccctgcctaggctctaaggcccatttatcacccacccacccggaaaatccagggatgagagatgttactagatgatcatagacgcaaacatgagattgagaattcattgcacacaggattagcttttgaccagccttggtaacttccttcacttctgtgcttcagacattgctttaatctttaaatatttttatgtgccaggcaccctgagtcaagacatctaggatcctttgtttacagtagtttcttgattagctatgcgagatttatagttactaatgttaggacacatttctattcacagtgctttctggttacaaacccttaatgctagttttacactaatagcatacgtaaccttttaatattctgaacaacactgttatgaactcataactgtctctggcctgtaggatgcaaggtggcagagaggaatggtggattattatagttatgagcagatacccagtgcctggccactgtgtctcctgtgaggtagatcccgcctgtggtccgtgtccggggctcacagttctctcttgatctagaaattgtccttccaaacaagatggctgtgcattgtttaggtgtaaagtatatgggtaattaagtacaaaatgaccaagttcttgtgcctgattgttctgcatcctggtattttatgagtttccaaattgccctttttccactgcaggctctacagattctcccctgcccctggagaaaggaggagcatgtccgacttcatgctcggaagtggctggaagagcagctcaaacagtacagggtgaagcgccagcaggagagggtgagtctcc

SEQ ID NO: 17562 - DNA, 521 bp, Homo Sapiens
gcacgaggcaggaagggggtctgcatcatggtcttccttctcttcattgccttcaactttggacctgtcagcatcagtgagcctccttcagctcccatctctcctcggatgaacaagggggagcctcaaccccggagacacttgctggggttctcagagcaagagccagttcagggagttgaacctctccaggggtcctcccagggccctaaggagccccagcccagccccacagaccagcccagtttcaacaacctgacagccttccctgggggcgccaaggagctactactaagagacctagaccagctcttcctctcctctgattgccggcacttcatccgcactgagtccctgaggcttgctgatgagttgagtggctgggtccagcgccaccagagagtccggacgaagatccctcagagggtccatgagagatagaagtctcagccacggaagaagtcccctccagttaaggcagtccccatcctaccccctggatccccagaaagggattctgt

SEQ ID NO: 17563 - DNA, 292 bp, Homo Sapiens
gcgctccccaaaacctccgaattttattatccggggctcccattctgggacagattcctatgaagtttgcctcccctggagggaaaagggagaaaacaggggtgggtgaaatggggctgccataaggatggtctcccgctgggttagcgggattctgagaacccctggtggtcactgggcctcctgggacccacaggattggctcaaacactgaagaactctgggacactcaaggggactgaatctatcattgggtccgcacctctggtatgagagtggggttttcgggcat

SEQ ID NO: 17564 - DNA, 231 bp, Homo Sapiens
gggcccccaagggttttgaaaattttccccactgtagggggaaggacctgaaggggggaaagaatgcccaaatccaaaagcttcaccatttccttaatgggcggattttctttcataatctcccgattcccgggggaaacccccggaacataattggttctccttttttcctccccctcccggaacttggaggaaaaacctctttatgggccccctcgaaattcctttttc

SEQ ID NO: 17565 - DNA, 832 bp, Homo Sapiens
gcacgagggatccttggggccaggtatggcatgcccattgatatgtggagcctgggctgcattttagcagagctcctgacgggttaccccctcttgcctggggaagatgaaggggaccagctggcctgtatgattgaactgttgggcatgccctcacagaaactgctggatgcatccaaacgagccaaaaattttgtgagctccaagggttatccccgttactgcactgtcacgactctctcagatggctctgtggtcctaaacggaggccgttcccggagggggaaactgaggggcccaccggagagcagagagtggggtaacgcgctgaaggggtgtgatgatccccttttccttgacttcttaaaacagtgtttagagtgggatcctgcagtgcgcatgaccccaggccaggctttgcggcacccctggctgaggaggcggttgccaaagcctcccaccggggagaaaacgtcagtgaaaaggataactgagagcaccggtgctatcacatctatatccaagttacctccaccttctagctcagcttccaaactgaggactaatttggcgcagatgacagatgccaatgggaatattcagcagaggacagtgttgccaaaacttgttagctgagctcacgtcccctgatgctggtaacctgaaagatacgacattgctgagccttactgggttgaaaaggagtagctcagacctgtttttatttgctcaataactctactcatttgtatcttttcagcacttaattttaatgtaagaaagttgttcattttgtttttataaaatacatgaggacaatgctttaagtttt

SEQ ID NO: 17566 - DNA, 810 bp, Homo Sapiens
gcacgaggcttaaggctcaggatcaagacaaaaagactaaatttcagtcttcaattgtagcacattttgaatggaaattattacttttgcagagaattggtgtcaacctttttaagaaggaagaaagattggttagcagttctcatttgaattacatttccaggaaagtgttagtaagcagaaagtctcaacacagtagaagcatttaagttgactcagcataaatgtcactttgccctcctccatcctcccttcaaaaggggctggtgggggaggaaactttctattggtaatgcacacaggtcctgtctatcatttctacgtcaaagatacagcatgcaagtcaccaactgtagagccaattagagcaaattttggggtccctcattcttgggagagctacttgagatggaaattatgccccagattttcagctgtgctttttcacttcaaaagaaattcctgaattaagctgttccccatagtttagaagcttttttaaaaaaagagttacttcattttttattcctcttggaaatgcctaaaactacagcaagagaaattctagacttctggatttttatgcagatgatttaaaccagatgatcataacctttttatggaagcagtacgtatatttagcccccagggacctgagatccccagtgctccagaggagacgctctgcagaagaatgtgtgtgttccagaaaagggagtaggtcctctggtggcagctgctactgtgcagtttatatggggccagttagatagaggctgattggccagctaaaaaagctgattaaaacac

SEQ ID NO: 17567 - DNA, 937 bp, Homo Sapiens
  misc_feature (345)..(780): n is a, c, g, or t
gcacgaggcctgagtcaggtagagctgtctgctcgaggtcgaatccagtgatgggtgactaagctctgctcggttaatgtaaacagacaagtgttgatttctgtcatgtggaacggtgtttcgacagttaagtctagcacccagtagtctccttattggtagacgattctaatttcattggattcaaaaatctctgactcaagggtctttccttagtgcgttttaatgggtgcatggctgagggaaaatccaagtcattgttaaactctaggtaaaagacaagagtatgggataccctcctaaccataccggtagttgtcagttttatttaaagtgggttccacnnnnnnnnnnnnnnnnnnnnnnnnnnnnnnnnnnnnnnnnnnnnnnnnnnnnnnnnnnnnnnnnnnnnnnnnnnnnnnnnnnnnnnnnnnnnnnnnnnnnnnnnnnnnnnnnnnnnnnnnnnnnnnnnnnnnnnnnnnnnnnnnnnnnnnnnnnnnnnnnnnnnnnnnnnnnnnnnnnnnnnnnnnnnnnnnnnnnnnnnnnnnnnnnnnnnnnnnnnnnnnnnnnnnnnnnnnnnnnnnnnnnnnnnnnnnnnnnnnnnnnnnnnnnnnnnnnnnnnnnnnnnnnnnnnnnnnnnnnnnnnnnnnnnnnnnnnnnnnnnnnnnnnnnnnnnnnnnnnnnnnnnnnnnnnnnnnnnnnnnnnnnnnnnnnnnnnnnnnnnnnnnnnnnnnnnnnnnnnnnnnnnnnnnnnnnnnnnnnnnnnnnnnnnnnnnnnnngtaagttccaaatgatcatgttttgtggcactgtcttcgtaagtggccgctggtgtgatggaaagcattgctaaactcaggtgagacactgctgttttgcttttgattttcctgtggaagagaagccactgcctgttcgtcttgttaaaagacaaga

SEQ ID NO: 17568 - DNA, 773 bp, Homo Sapiens
  misc_feature (380)..(417): n is a, c, g, or t
gcacgagggttaaaatgcagagttttgagtcgagggtctggggagggctgagattgtgcacttctaaggagatgccaggtggtgctaattctgctgcactggacaccacacttagagtggcgaggtcactaaataataggagcaaaaggatcgtgagaacaccgacatcagtgagaaggaggctggctgcagagaccatgctgccatgttggaggaacctgcaaggcaagaaatccagggcagcttctagtcagcatccagcagagaactgggtcctcagcccaacggcccaaaaggaagtgaaacctgccaacagccaccggatgagtttggaagtatatcttgtcccagttgaaccttgtgttgactgtagcccaacnnnnnnnnnnnnnnnnnnnnnnnnnnnnnnnnnnnnnnccagaatggagctaccacatggtcaggaggaagagactcacaaagaaagatgaaggttgcagagaggtgctatggaaatagcacatgctaaaggagtcttctaagcagcccagaggcgatgacataccagtgccagcagaggaggagaaccacgcttcagtataacaaaaacttcaatgaatcatgctcaatgtggaaaagtcgaatagacatggctgaggataaaagaaaagaacgtacacataatctcactacccagagagaagcaatgttgacatatttctcttcctcaatgcatatttatatattgttgatatttttactgtctgtgcaattttgctttaattaaacattta

SEQ ID NO: 17569 - DNA, 908 bp, Homo Sapiens
gcacgaggattgatgaaataccctcaggagaaactcataggaaaatgaaggatgttggctagagcataagaaaaggctaggcaaaaatgtgatttcagagaagtctagcttcagcccgatcccacaaagagtgctggaggataaatagtaccaaaaagttatcccttccagacaaaagaatgctgggctattacaccactgcatcagtcagttacaggtctgccccaggcagagggagagaagtgtgatctcccatgtatctctgaaccaacaagctcccctttgccaaggacaatctttcaaggaagtgtacaggtgtgagccactagagcagcaagcatctccaacagctggaggctgggtgtactcccttagtaaagggaatctgggcaaggtaccaacagtatcttctctagccatcacttacacagctttgtccacttgcttctcactttaaatatactccatctggtcactgcttcttcagggttctggttggttgcaatttccagtaaaatttacaggaggagagttactggggatgagcttctgcctccctgctgaaataggtttcaagaccttaactaatatacatcttcctcttcttccatcctttctagatttcctccccttctgataacacttctgataatttaggtgacttagctattgggaagacacaggccttcatccttgagtagtcaaagccccttgttagcaagcctttattgtttcatttgccagtttacaattgagattgggtgtcactttatcaagagatgtcccactggcccagtggatcatctaagtgccaaacgtattcctccctgccttttcatatggcagtaattttaccacttcagtggtgaaaagggtcaaattagccttcccaatagacaattcctttc

SEQ ID NO: 17570 - DNA, 833 bp, Homo Sapiens
  misc_feature (298)..(599): n is a, c, g, or t
gcacgagggaatagtgtacgttttgtgaggaaagttaacatttgtcagtgacaagcattaaggccacctaataaagtgtagacaaagtgataaatgaaatatacgctgatgatactcatttcaatatgctaaaatacattaaatttaggtattactcttaatctatttctacttagtcagtgctatctgattacctgttaatagcatctgaactggagagctggaaaaatccacttttttatgaagcattaattatagaagtactaaaaattacaatgtattagtaagtttaatattnnnnnnnnnnnnnnnnnnnnnnnnnnnnnnnnnnnnnnnnnnnnnnnnnnnnnnnnnnnnnnnnnnnnnnnnnnnnnnnnnnnnnnnnnnnnnnnnnnnnnnnnnnnnnnnnnnnnnnnnnnnnnnnnnnnnnnnnnnnnnnnnnnnnnnnnnnnnnnnnnnnnnnnnnnnnnnnnnnnnnnnnnnnnnnnnnnnnnnnnnnnnnnnnnnnnnnnnnnnnnnnnnnnnnnnnnnnnnnnnnnnnnnnnnnnnnnnnnnnnnnnnnnnnnnnnnnnnnnnnnnnnnnnnnnnnnnnnnnnnnntttactattttaaaactggttaatcatttatgtattttgccagtaaaaattactttaaaagatattttaacaaaagtctcatatccttgtacttcagtttttttgtgtgtgaatactatccctataccactacccctaaaacctcagaattatttgctttattttttcatacaacttggggaagggaaccatgggagtatgcccatggggatcataatccattctgtggtttgg

SEQ ID NO: 17571 - DNA, 249 bp, Homo Sapiens
gagggacacacttccttaaccccttattacaagtcccggctctataaaaatatatgtggactttcgtgaaaaaaatcaattgtacccaaaataaaaaacaccgcccataaagtagtatatggcttcccgttgtcccgcccaaaaaggggggcgcccaaataaaaactcttctaaaaacggctgaatgggggcgcgcggtgggaaagggttccgggctcaaggacaatgtgggggggctctgtcttcccc

SEQ ID NO: 17572 - DNA, 578 bp, Homo Sapiens
  misc_feature (193)..(292): n is a, c, g, or t
  misc_feature (471)..(525): n is a, c, g, or t
gctctcctccccagatttgtgaaccttgtgactgttcagtggacacctcacatattgctggtgggaaggtcacgtggagacagctgggcaaagccttggggcgttaaacacagagtcactcatgacccagcacttcctctcctatgcaccttgtacaccccagatcaatgaaacctacatccacacagaaacnnnnnnnnnnnnnnnnnnnnnnnnnnnnnnnnnnnnnnnnnnnnnnnnnnnnnnnnnnnnnnnnnnnnnnnnnnnnnnnnnnnnnnnnnnnnnnnnnnnncaggagagaaaaaggagtgaggcaccagcataggcaccccgtggatgaacccggaacctgacgctaactgaaggaaggctccggctatagggagtgtcccaggcacagccagagattgaagggtgccggggccgggagttggtgggggttggggctggggacacagtggccagtgtgtnnnnnnnnnnnnnnnnnnnnnnnnnnnnnnnnnnnnnnnnnnnnnnnnnnnnnnntcacctctataaaccttttactaaaaaccatggaaaagagaatagaaaagaag

SEQ ID NO: 17573 - DNA, 745 bp, Homo Sapiens
agaacctgcctaagcagcacttccccatgtcctttcaccttcatgttaacgtcccttctgatggtctcactcttcacaggtagttcacactctgagacttgaagtaagctcatggttcagtactctgggggcgcagggctgcgcaggacccttggaaatgttgcaagtgttactagtaccagtttcactttttgttgtcacaatttactgtattttttactttttctgttacagttttgctaatttatcagaaggtccaaaagtctgacataactatttcattttgcattatttatttatgatgcttttttcattgtcttttatacatttgggattataaattatgtaaatgttaaaatgagcatctcaaagaagtctgttaaatcatgactgaaaaaaatcaatcagatgtatcttcaaaaagtggagtcccagttttatgaatcagagatataaaccagaaattctataactgatcatagaagaagaatccagtaattgaacaaatcctatttaatgacatccttgtagcatagatggtctataatgctgaccacagatttcttagaaatgctgctctctctatttaactaacattttgttcagtttggcctccagtggaagcagaaagggttttttcagctgttaaatcctaaaaatcaatataatttatttatgtaagaaaaataactcaatcaatatatttttgaaccttttaagtactaattttctttttatcacgtag

SEQ ID NO: 17574 - DNA, 232 bp, Homo Sapiens
gcacgagggagttccacctgggagcagccctggagcccacctcccagaagcccggtgtgggggcgggccacgggggagatcccaagctcagtccccacaaagttcagggccggtcggaggcaggggcaggtccgggtccaaagcaaggacaccacagctcttccgactccagcagcagctccagcgattcggacacggatgtgaagtcccacgctgctggctccaagcagca

SEQ ID NO: 17575 - DNA, 412 bp, Homo Sapiens
  misc_feature (92)..(226): n is a, c, g, or t
  misc_feature (315)..(330): n is a, c, g, or t
aacttaaccaaggttttatattacccacaacccttcgggaatggaaacccaaaaaccccgggagaaccgtctgtgtttattcttaagtagtnnnnnnnnnnnnnnnnnnnnnnnnnnnnnnnnnnnnnnnnnnnnnnnnnnnnnnnnnnnnnnnnnnnnnnnnnnnnnnnnnnnnnnnnnnnnnnnnnnnnnnnnnnnnnnnnnnnnnnnnnnnnnnnnnnnnnnnccaaccaaggaaaagggcgcaagaatgactttctcaggtttaatgacttgaattggggaaaaataattctggggtccataccttgattnnnnnnnnnnnnnnnncggtaagggtggaaaaaccttatttcggagagccttcaaatcttctttagtcaaaatgcgcaccacaccacatatttggggg

SEQ ID NO: 17576 - DNA, 342 bp, Homo Sapiens
gcacgaggcttgtttataaatagcatttggaaaccactaaagtagggaagttttatgccatgttaatatttgaattgccttgcttttatcacttaatttgaaatctattgggttaatttctccctatgtttatttttgtacatttgagccatgtcacacaaactgatgatgacaggtcagcagtattctatttggttagaagggttacatggtgtaaatattagtgcagttaagctaaagcagtgtttgctccaccttcatattggctaggtagggtcacctagggaagcacttgctcaaaatctgtgacctgtcagaataaaaatgtggtttgtacatatc

SEQ ID NO: 17577 - DNA, 448 bp, Homo Sapiens
gcacgaggcgcccccgtccctgattatttccttgagcatatatctctgcctaaaactttagaaggtgctatagaggatacatgaaaagtatgagatctggttccatccagtacgacattttaataaagaagatcaaaatgttacctggcagttggggaatactctgagttcattgggatttggcctgaacttcttaatcattgatccaggaatatttcaaccagagacacaactttctggcagacagacaaattgtacaatgtggaaaatatcctggaccttgaaattctgttttcttcagtccattgtatccttcaaggcgcctgtgctaacctatattttgtaataacgctgatttgtgataatggacaaaagtggtagggaaattgttccctctccacttctgaaaatatgatgatgtattaacgatggaagaattattataaat

SEQ ID NO: 17578 - DNA, 289 bp, Homo Sapiens
  misc_feature (135)..(143): n is a, c, g, or t
  misc_feature (174)..(184): n is a, c, g, or t
ggggttttcccaacaatttatttcggaaaatcttttccaaatggcccccacagtttccccggggggattggggtgaataaaaaaacctgggaaaaattaacaaatttttccttttaaaaatctgaattccttttnnnnnnnnnggattttaccccggcctccggtgaaacaaannnnnnnnnnnacaaattttaattttaaaaaatcataagtactgggaattttggaaaaactgggggaaaggaaattagttccttttttttaaattttaaacccccactttcccccc

SEQ ID NO: 17579 - DNA, 596 bp, Homo Sapiens
gcataataatttattacatcccaaatatataaaaatttgagtgcctttgcagttgggatggttcctaaaattgcgtatagaattaaggcacagaattgtgtgtaaggtcctgaatctggctaaaatacagtggatgtatgtattggaattatgaggcataagtagccagtatctatagttagaatctacaaggcctcctttttgcacctgtagactagaatataactgttattggtgcctttgagtgttatctctcagtggctagaggtgctgtttcaagcacaatttagactagggttgaaccactcattgttcaaatcattggtgggctccaatgtaaaatatcactacatcagtccacaagcaacattaaggaaatctaaaggaaatggaatttgactttttagagtataatgatgttctagggcataatgaggaaaatttttaaaaaatagattataatgatacatattgggtatcattaagacaacagattggagcaaatacatttaaggtgtcttattttttgcatccagtattatggcttgtgggtctttctactccacaaaaaatattttctttttgcagttgaaaat

SEQ ID NO: 17580 - DNA, 223 bp, Homo Sapiens
aggacctactttggagttccaggtataagttgggcccttggcttcttgccctgcctaccagcctgaacttgtttgagggcagggtctgctcttgcctccctcccttctgcttgatgccttgtgtacttgggcccttcacaaatgttgattagattagtaatagctcttacccagggctggtcctggaaagcaagtggcactgtgtattctcaaagggacagag

SEQ ID NO: 17581 - DNA, 867 bp, Homo Sapiens
  misc_feature (492)..(523): n is a, c, g, or t
gcacgaggcaggggtacaaacttgcctctgccagcatctccacatggattcccaagaacccacttacttaatttagaaagatattttggttcatggggtggggaaattttttgatgtctcagttgatcagaattgaatgaccgaatgcatttatgggcacagtattagctcattatatatttttaaaaacaatccattatcatcataatgtgaaaaaattactttgccacctaccacgctattatggggctaatttttcaatctagcctgatgcttcacagtagctgttaggaaaaaaaatgattaccagtcactaaccaagaacaaatcatggcagtaactatcaaagaggcttggaaatactcttccaaacatgctgaatgaattaatttatcacataaagctatatctccagattgaccaaacctgattataattgatcagtgagttatttcagacatcagttcaggttaaaaaacaatttgctcagtnnnnnnnnnnnnnnnnnnnnnnnnnnnnnnnngtcgtgcattttgtcccctgacttgactggtttcttaaaactggtttaacaaatttgatatcaggcatgaggccatagttgattatttcagttataatattaaatttgactaatctactaagtttctaattctaataatgagaaatgtccaaaaacatcttgtcacccatagttatttttattctgttgctgtcattctcagcagttatcctaaggcaataaaatcctatactgaactattgtatataatcttgtttacagaaagcacactgtggagtccttgaaacacctttgtatagcattttattttgaaatggctgcaacaaagggcactttaatgaaac

SEQ ID NO: 17582 - DNA, 266 bp, Homo Sapiens
taagccaccatgccccacctaagcactcttttgaaaacaagttttctagttagaaactaggtcagttaatagttaaacttggaaaacatagaaaaattttcttatgaaaattaaaatctctgtaatccaataccccatatccagaagtaactttcacttactcattttttcatgtttgtgaatattcttccaaaatgtgattttaaaggctgtgtaatactatattagtataccaaaatctagttaaataaaacctttttgactag

SEQ ID NO: 17583 - DNA, 536 bp, Homo Sapiens
  misc_feature (205)..(302): n is a, c, g, or t
  misc_feature (342)..(351): n is a, c, g, or t
  misc_feature (364)..(427): n is a, c, g, or t
  misc_feature (444)..(456): n is a, c, g, or t
  misc_feature (460)..(493): n is a, c, g, or t
gcacgaggtatgtatagttttatgtttgttttcttagaaacaaatgtgtttctttgggtgggtaatattgtgttttactatgtttaccttttataaaacataacctgtttatttatattctttggctttgtttattaaaaagcatgattttgctgtgcatgtaccattttgctattaaaatttatttttaatatttgtaacttgnnnnnnnnnnnnnnnnnnnnnnnnnnnnnnnnnnnnnnnnnnnnnnnnnnnnnnnnnnnnnnnnnnnnnnnnnnnnnnnnnnnnnnnnnnnnnnnnnnccccccgggccccaattccccccaaaagggggcgatatannnnnnnnnngggggccgctttnnnnnnnnnnnnnnnnnnnnnnnnnnnnnnnnnnnnnnnnnnnnnnnnnnnnnnnnnnnnnnnnctttccccccggggggnnnnnnnnnnnnngccnnnnnnnnnnnnnnnnnnnnnnnnnnnnnnnnnntaaaggggaaaggggaacgccctgggaaggggcaatataacgc

SEQ ID NO: 17584 - DNA, 389 bp, Homo Sapiens
  misc_feature (310)..(319): n is a, c, g, or t
ggatcccccgggctgcaggaattcggcacgagggagaattaaactagtactatgaaatgtccttttgaatgttaggtcaagaaatccatgtacagagtcgtgcacttcattggctgtaactgtcaaacttgccttgtattagaagttaaatcccatcgtaaatacatcacgaggccagctgtgtgatttctgagacctagatgagagtccatttacttcagcctttgattcagtaaatgttaagcagcagaagacttcgaatggttgaaattcgttgttacaggatttaactcataaaccaatgagagannnnnnnnnnctctgcaatggttgctaagtctattccatgttaacactgtggaaataaatatgaagatgtggacattgaa

SEQ ID NO: 17585 - DNA, 334 bp, Homo Sapiens
gcacgaggtgtattggccacaaataggcctatgatttagctggcaggccaggttttctcaagagcaaaatcaccctctggccccttggcaggtaaggcctcccggtcagcattatcctgccagacctcggggaggatacctgggagacagaagcctctgcacctactgtgcagaactctccacttccccaaccctccccaggtgggcagggcggagggagcctcagcctccttagactgacccctcatgcccctaggctggggggttgtaaataaaagcagtcaggttgtttaccagccctttgcacctccccaggcatagggagcctctgttc

SEQ ID NO: 17586 - DNA, 832 bp, Homo Sapiens
aacacatcacacaaaactttttagtgaccagagggatacaaaaactttgatgaaatctagatctgcaaaatttaacacaggagaattagctatggtagaagtaatagcaaccaaagggaattcagaaggcagagctataattaataaaatatgacatgattaaatctatttaaattgaatattttctttaaaatttcggtgaaaacaaaatgaaagaaaattggagcactccaaatgagtaataaagttgatcaaggaataaaactgacctaatggagttttcgttctcgaccctagttattcaatattgggatttaaaaaccttttatcagaacatctctagaatcagtaacatcgaaacgcactgagctgccttagggcctcataaagaggtaagcttgagaagctgttttccaatagatataaccaaacataactggagggggaaaaacactagtatgaaagggacctggaatcagtggttttcttggtacttgataggttttccattcctaacactcctctgaaaataggggaaaaatttacctcacagggtcatattatctcattaattctcaaagtttctaagctcagaatcagaaagatacaatgaaaagttgtgtggaaacttcagaactttttcactttaacctctacgcatggggatctaaatgtcatatacttctgtgtccccttaaagtgttttcctaaacaaagtataccttttcttgatgcgccagggtcatcattatgaccaactgtgacattatgcactagcagtgctggacccccccaagggtatgaggcagagtcagatgggggctggtgctgg

SEQ ID NO: 17587 - DNA, 564 bp, Homo Sapiens
  misc_feature (492)..(509): n is a, c, g, or t
gcacgaggccctgctggagctggaaaatagtgtcaccctgggtcccaacctcctccccatctgcctccctgacaacgataccttctacgacctgggcttgatgggctatgtcagtggcttcggggtcatggaggagaagattgctcatgacctcaggtttgtccgtctgcccgtagctaatccacaggcctgtgagaactggctccggggaaagaataggatggatgtgttctctcaaaacatgttctgtgctggacacccatctctaaagcaggacgcctgccagggggatagtgggggcgtttttgcagtaagggacccgaacactgatcgctgggtggccacgggcatcgtgtcctggggcatcgggtgcagcaggggctatggcttctacaccaaagtgctcaactacgtggactggatcaagaaagagatggaggaggaggactgagcccagaattcactaggttcgaatccacagagcagtgtggnnnnnnnnnnnnnnnnnncaactgaccagttgttgataaccacttagagtctctattaaaattactgatgcag

SEQ ID NO: 17588 - DNA, 409 bp, Homo Sapiens
  misc_feature (262)..(287): n is a, c, g, or t
tcgctgcgtggaaggaagcttaaagcttgtgaactcttcttgaaccgagattggagtcatatgggccataaatcattgagacatactctccgccattcacaaactgatagcctatttcagtccagcttaccttagccaccgacgaggggagaacaggcagacataatatatattcacatcgagccccagagcgagcggcaggcgacaaatctcccctccttgaaggcaaaggaaaaaaagaccactgtttaaagctgcgtcnnnnnnnnnnnnnnnnnnnnnnnnnngcaaagccaccccggctggggagcccgaggggcagaccggccagaggagccgcgcggcgtccgcttcaattcactcggcttaggagcaggggtgcgcaggagggagggggtgggggagcggg

SEQ ID NO: 17589 - DNA, 873 bp, Homo Sapiens
  misc_feature (570)..(579): n is a, c, g, or t
  misc_feature (768)..(831): n is a, c, g, or t
gcacgaggccttggtggcactgtctcactgctctttgacactgcttttggtaccctgggtggcctatttcaggtggtttttagtggctgcaagcggattggctacaaggttacttttgacaattctggggagttataaactcaaaaaactaatagtatccagtcacagtgaatttgaaagctggaatagtttgtctttacaatgggtttctgttcactgtcagttatcattatattttggcctttggtggggatgtctgcttgtttttgcaaaagaagatggcagaatttagacttgacagaggagaaatgctcagggtgagattaggtgtagtaatctgctgtttacctccagttatatgtgcaaactcccaagccactaataacttcagttatgcactctaacacagacgaccacctgaaatgcactggtatttatttctgataattaaaaattacaggggagggaagaactagaaaaagaacaactttagaccaaaggtgtctgagaaaaggagaaagggagcttgttcttcccattgctctttgtgatttaaggcaaaacagattnnnnnnnnnntctgcagccaatttcttggcatttgcttctctttctcctcaactcgactgacgttggtggaatgcagataatgcctctttgttgaaataactttgtgggaatgtacaattttctatatctcttagctttccgtggttctcagggatatgtacagttttcattttcctccaaagttgaattttgctacannnnnnnnnnnnnnnnnnnnnnnnnnnnnnnnnnnnnnnnnnnnnnnnnnnnnnnnnnnnnnnnatgccaaatgtggcataacagagtttgaattgaagggcaaag

SEQ ID NO: 17590 - DNA, 884 bp, Homo Sapiens
gcacgaggagaaaggtcccttttgaccccctcactctctttttggacctccatactgctaaatctctgacttgaaggtcctttcctggcttctgtgaattcctggcttttttcctttttagggtctgtgtctttcttccatctgtaaaacagctttacttcccagcatccatcatgatcattgctgttttctaacttgtccttcaccccatgactgagttaatttgcgctgaagacactttactctcaattatctacagtgtttccctaaatctgtgtctccaggttggatgtttctcatgtcgttaaccactggtcatccttccacaccttttctgtatttgcactcactgagcctatatgcatgtatcatgtggccatgaccttggccgtggggatgcacccataatcatcataagagaacacaaattattactgtgtatcagacattgtttcgaatgttttacatgcgtcagctcttttaacctttatgacaactccataatgttatttcccccctttaactgattagaaaactgaggtacagaaagattaaggaatttgtcaaagatttcacaattatgaaatttgggtttggggactggaagccactgcactggcttcagaatccatgtccttaaccactttattgcttctcataaggtgggtctttgtttcctggtcatcacttgtttttactaaaatgggtcaaactgtgctcatttatttataatctactattcttatttgacagtacatcttggcattccttcaagcaaatgagataaaccagactcactctttaatgcctgcataagctattggtgactgtagaaaagacgggaaatgtctggggtttgagatatgtgggaagggtggggaaaa

SEQ ID NO: 17591 - DNA, 888 bp, Homo Sapiens
  misc_feature (672)..(728): n is a, c, g, or t
  misc_feature (770)..(779): n is a, c, g, or t
gcacgaggagcagacagtcttttaatcctattggatgagcctgtattattgtctctgcagatgttctgtacccttctgcaaaagaggcaagctggcttttcccataactgatgaaatcaagagagcaggtctggaaaaaacaagggaaatctccttatatcttactacgtgtaaaaagatgattctggaattcccgagtgcctactgaattaataaaccaggaagctgatttattttaccactctaaatccaacatggaagaaaccgtcagacatctactacatgtcatccagcagtacagattggagaagtaaactctgtcagcccacctttatcaaacagtgtaaataatcaccaaaccaagggaagcagaaggcagcaaaagtcgaataatttccaatgaagagtcagaggatctctctcagacaaagggaaatccttcaagtggagaggagatggtaggaggaaagtggcagcccagaggagatgagactgtggcaaattagaaagaaataaaacaatacccaaaggaactcaaaggagaggtgaagttcaagtcagggagaagagtaagtcaagaggactacctgccaagcatagcacagagcttggttactggctccactgtggagctggctcaccccatgggtagagtacaatccttcgagatcnnnnnnnnnnnnnnnnnnnnnnnnnnnnnnnnnnnnnnnnnnnnnnnnnnnnnnnnnaaccccacggccacatctctgcatatacacaaaagaacaagnnnnnnnnnncactcattgtggaaataccctcaaaatctcaaaatatatacctaacctataggataaagcaaccggaatactcctgggaactgggaaatgattatcactatgtgcaggg

SEQ ID NO: 17592 - DNA, 277 bp, Homo Sapiens
gcacgaggcttttgtatttactgccatgtaattgaaatatatagattattgtaacctttcaacctgaaaatcaagcagtatgagagtttagttatttgtatgtgtcactagtgtctaatgaagcttttaaaatctacaatttcttctttaaaaatatttattaatgtgaatggaatataacaattcagcttaattccccaaccttattctgtgtgtagacattgtattccacaattttgaatggctgtgttttacctctaaataaatgaattcagag

SEQ ID NO: 17593 - DNA, 628 bp, Homo Sapiens
gcacgagggcggcggggtcggcggcggcctcctggagaatgccaaccccctcatctaccagcgctctggggagcggcctgtgacggcaggcgaggaggacgagcaggttcccgacagcatcgacgcacgcgagatcttcgctgattcgctccatcaatgacccggagcatccactgacgctagaggagttgaacgtagtagagcaggtgcgggttcaggttagcgaccccgagagtacagtggctgtggctttcacaccaaccattccgcactgcagcatggccacccttattggtctgtccatcaaggtcaagcttctgcgctcccttcctcagcgtttcaagatggacgtgcacattactccggggacccatgcctcagagcatgcagtgaacaagcaacttgcagataaggagcgggtggcagctgccctggagaacacccacctcttggaggttgtgaatcagtgcctgtcagcccgctcctgagcctggcctttgacccctcagcctgcatactggtatcctggtcccagctcctgccagggctgttaccgttgttttcttgaatcactcacaatgagaaactaacattttgctttttgtaataaagttaatttatattcagt

SEQ ID NO: 17594 - DNA, 583 bp, Homo Sapiens
atgatccaccacggccagccttcttatttaatattcataaagccagtaattcttaatagacacactatttatatgagtaatcctaaaaaactacaactttgtttttgttgttataacttaaaccctacacattccattaaattgatggaattattttcccttttaaaattttattttatactattcttacaatctgaaataatgtatcaattttagaacctgaaattattctgtaaaagtacagagctgcaatgccactctgcacgacaacaacttagtaaaagagaggcatttaccagcggggaagccaagtacgcagtaccttaagggggaccatccactgtaccgctgtgattttcttgatttgaatgttttcggggtatgtcattttttcctgtgaaatacttcttttgtgatttctgacgttgtatcaccaattaggaagttgaagttttgacggcgctatccagggtgaaatgcagccaaaaaatttttctgagtttcacttatataaacatcagtctctgaagactgccctgcacaggatgagataatttaggttccattcatttatgctaatttc

SEQ ID NO: 17595 - DNA, 619 bp, Homo Sapiens
tgaaccactgtgcctggcctgtttgtttgtttgtttaaaacatttctccatcactcattccaggtcccagagcaaactctctctgctctcggagcctgtgacactggctatgtgctccacagtttcagtcccaggtcatactctccaacagttttcagagctccatatatatgtagatgccatcctttctaaaaacttctcacgacctcctggaatattcctattgatctcattttatttagcatcagctcaagaaactaagtcttagtgcacagtatcacaacaaagaaaaagctttgtttttataactggtaaaaacaagaaaagattctcatcaaaatgaaaatataaaattaatcatttctcaccaaagagtatgcctgggagcctccagctgttaaaagacaatgctattactacttcttatcaaaaatctgtaatgccctgtgatttttatgatacttcttcaatacaaagtgttaatatgtgtcatcagtataataacaaccaacaaaatgccactttcagaaaactgtatgtaaattttttgtaacaatgtaaaaaagaaatgggggagtaagtgttcacatcattaaaaggctttgaattcatggaaata

SEQ ID NO: 17596 - DNA, 854 bp, Homo Sapiens
gcacgaggattccttcagccccttggcatgcttaggcctcactcagattgttggagaggctcacgcaggccttcctgcctgaggcaggccgggtggtgccgctggtatgccctctcgctgggccctgtgatagagcagtgggcaaacccacacccagctccccaccctcagaggaagaccacatgcagggaaccgatggggacccagggcgttaaggtgtagtgtgcttagtgctgggcggggccgtgcagggcttgtgggtgtccagagggcggccactgggccttgccttgaggggtcaggcaggcttcctaggggagggcctctagagccaaatctcaggctatggagtcaccagatacaacatttatcggtgcacctgacaaagctgattgaggatctgttccgtgctgggcaccaggtaggtgaggagaagggaggaaggaaaacgaaggaatgagggcctcatcagaacccctcctagagatgagccgaagtccctgactgggcctcccctgcctgtgggtggcagcccccggccctgtgctcccggccgccgggtgtgtgtgggctcacagcgctggtccccatctttggtttgctgctgttttcctcaccttgatgtctctgcttctcacacttcatccacagttcctttctcacaatctctcctgtttttcctttgaccactctttcctctggattcctgggccttcccacttaccccagctgttactatactgagcagctggtgacctggtgggtattgccctgctgtgtgcctttgccctggtgtgtgaacggggtacgccctggctgggtgggccccagccctgggtgggacatccctgggg

SEQ ID NO: 17597 - DNA, 877 bp, Homo Sapiens
  misc_feature (260)..(294): n is a, c, g, or t
gcacgaggggtggcaaatcctccatcagttctgtgctcaaagatccagacagcaatccatacagcttacttgataatacagaatcagatcagactgcagacactgatgccagcgaatctcatcacagtactaaccgtcgtaggcggtctcgtagacgaaggactgatgaagatgctgttctgatggatggaatgactgaatctgatacagcttcagttaatgaaaatgggctaggtatgtaagcacttagggaagagaannnnnnnnnnnnnnnnnnnnnnnnnnnnnnnnnnnattgtaaactattgttagtatatgaagcttttttcaaagaaatatgcaattcacaaattgactttttcttagtgtttactttgaacaaggtagatagctttttgtctatcttaaatgtttagttctcagatttgttatagccaaattatttgaaacttggagggttaaagtgccctttgatgccattaaatcagtacaaatattcagctggcaaggtacttagtgcttttattgtccccaagctaaaatcaggctttcatcttgcctcttttaaaataattataaatgacactggtaaaggtacatatatcaagagtaggcattaattttcaagggctaaaatgtcattaacttcggtataaaccaaactgtactagagaggaagactgtgtccctgaatgatggcagtttaagtctgagttttactgtgagttaaaccctctgaattccagatgataattccatttttaatccatttggatgctgaaagctacaaaaatgtattcctgtcagtaaccattgttgttttatttttgtgttaataaaagtttatttttccccttaaatccttgaagggaagagg

SEQ ID NO: 17598 - DNA, 254 bp, Homo Sapiens
  misc_feature (122)..(130): n is a, c, g, or t
  misc_feature (204)..(213): n is a, c, g, or t
ggggggtcttttggctttcgggttccccccgggtttgttgggccggggcgccgggggacgggttttcttaggccccgggcccggggggttggatttttggcccttgaaaaatttccggaggnnnnnnnnngaaggcggggtaaaaagggggaaaaacggggaaagggttttcgggaaaactggaatttaaaaggggggggaggnnnnnnnnnnggaaaacggcaggggggaaacccccccctttgggtcctcca

SEQ ID NO: 17599 - DNA, 661 bp, Homo Sapiens
  misc_feature (106)..(147): n is a, c, g, or t
gcacgaggtacaatcatcagctttattctctatgacatggggcatgatgtccagcagatcattggcaaatccaaaaacctcatgacaaatgaaaattaaataggtnnnnnnnnnnnnnnnnnnnnnnnnnnnnnnnnnnnnnnnnnntggaaacataccgtacacaaaatactcaattcctagttttctctttaaaaatggctagaaaaaattcatcaaaatgcagcactttaatcaattatttacaatttctatgttacaatgaaaaaatgtacatcttatagaacatatttcataaaactgctccactggaaacaactagatcaaaacagcaaaccttccatttaatatccacaaagttggattatttttcctttttgaagtagattcgccacaatcaaatttgaatacagagaattttgaagtttaagcatcaaacaacaaagtaaaagtccccaagatacaacaaagatctaggcaagtcttgttcctgtcccactcccaccccacccctaatgaaacttaaaaggtattcccatttcaattatggcctgtatcattcttggcagtttgggaagagaacttttggcttccattggtaactcaacataaatgttgcatagaatttatatatttcaaaatttggcctaactgtagaaaa

SEQ ID NO: 17600 - DNA, 839 bp, Homo Sapiens
  misc_feature (499)..(601): n is a, c, g, or t
  misc_feature (669)..(754): n is a, c, g, or t
gcacgaggatttagggggacagaattcagcccgtagcagctgggcagcaggactcatgggtcccagttctcaggccccaaggactcagagcagcaaaggatacgtgacacaagcagggctgaactggacaccagactttctttggggttgtaaaaggagaagtgtgactccactgccaagggtaagcactcttgtcttatgctaccctttattcttgaaccttggggcagcctgtgtctcccttccctaaacgtcatctgttccgtttttccagtcttccagacctggtccttggactggagaccttcacccttcctattttgtggctttctcttcaaatccacctcgtccttcctccatgacttataagtcatcatctctgctggtttctgaaatgagatatgcttcttggggtcttcagtgaagaggaatagcaagtgaaaggaggatggtggcagggtacatgaacccctaccaggcttctaggcttcccctgcannnnnnnnnnnnnnnnnnnnnnnnnnnnnnnnnnnnnnnnnnnnnnnnnnnnnnnnnnnnnnnnnnnnnnnnnnnnnnnnnnnnnnnnnnnnnnnnnnnnnnnctacactattgaagaaatgagagtttgacttctgagggtaagtcataaaatacatcgtggcttctgtnnnnnnnnnnnnnnnnnnnnnnnnnnnnnnnnnnnnnnnnnnnnnnnnnnnnnnnnnnnnnnnnnnnnnnnnnnnnnnnnnnnnnnacaagggatggaggctcccaccaatagccatgggagtgtgcaatcttgaaagctgggtccttcaattccagccaagcattcacat

SEQ ID NO: 17601 - DNA, 753 bp, Homo Sapiens
gcacgaggctccctctgcaaaagcacctggagcaatttaaattaagaagaaattttaaaagcttaattttgcaatgacatcttattcctaagagaaatacttttgatatttccttctacaaaggatttgagaaatagaagtttgggtcaaagtgaaaatatgagcgatagttcaaactttatgtacatagagaaataggtaatacatttctaaaatggtaacttcttttgaaaagtaattaccaaaggggtttatctgcatgtctgggttaactgtttcattggagatagttaagaagatgtgacgataatatttattacttttttcaagagggcaggcagttcctcttctatatcttcgatctctcttcctacagcactagtaaagtactctggatataacagtccttcaataaaggttgttgaatgactcttttatttttacattatgcagaaaacatagctttattattatttacacattgatttttaaaattaatcccagattttacactgagtgaattaagccggttactatttatctaagcctataatctcacccgtaagatagagatgatatttgctcaaagtgattgttgtggaaataaaactgtgaatgtttaaaaagtgcttagcacagttcttggaacattagtaggtgttcaagagaccatagtaataatagctgttgctataatgaaactacactcttgttttaaaaaatatggtatgtgattataacaggctgaatacc

SEQ ID NO: 17602 - DNA, 900 bp, Homo Sapiens
gcacgaggtgaatgacacacttggctttattagattcactagtttttaaaaaattgttgttcgtttcttttcattaaaggtttaatcagacagatcagacagcataattttgtatttaatgacagaaacgttggtacatttcttcatgaatgagcttgcattctgaagcaagagcctacaaaaggcacttgttataaatgaaagttctggctctagaggccagtactctggagtttcagagcagccagtgattgttccagtcagtgatgcctagttatatagaggaggagtacactgtgcactcttctaggtgtaagggtatgcaactttggatcttaaaattctgtacacatacacactttatatatatgtatgtatgtatgaaaacatgaaattagtttgtcaaatatgtgtgtgtttagtattttagcttagtgcaactatttccacattatttattaaattgatctaagacactttcttgttgacaccttgaatattaatgttcaagggtgcaatgtgtattcctttagattgttaaagcttaattactatgatttgtagtaaattaacttttaaaatgtatttgagcccttctgtagtgtcgtagggctcttacagggtgggaaagattttaattttccagttgctaattgaacagtatggcctcattatatattttgatttattagggagtttgtgtctgggtcccaggaacatctactggggatgactgttaggcagcttgtgatgatgttttttaaaaaacctaagtaacttggggagacagagcatttcaaacccatatagacacctatcatacctgtatatcccctaatacatggaacataaatttcattcagctttatgcattaatggattgaagagcaggcttttttt

SEQ ID NO: 17603 - DNA, 777 bp, Homo Sapiens
  misc_feature (552)..(625): n is a, c, g, or t
taaataaagttatgctttttcctctattcctagttaaatcacaacaagttagtaatccataaatgatggggcctggttctctttagtagaaattatatttttggctaccagttaagaaacttggactcctttgtcccttatggtactataaactcaagatgatgagttttggggtatttgacttcataggggaaatcaaaatttttactttggtggtattctgttttatgaaataaacttctggctatgcatttgaactaagtttcagcaaattcaatctaaattgaataattccagctcccagttttatcctatgttgctcataaaacagttccaagtatactggattatcttgagatttgaagatatggggcccacggggattatactagggaaatgggttaagcagctctggcctaggtgttgggtattttaagagactctatcttaggagagcttaagtgattgggctgcaggaagaagacattgtaacccaggaattaaaaatggattcagattgcctgattttaacactttagtttcaccataggnnnnnnnnnnnnnnnnnnnnnnnnnnnnnnnnnnnnnnnnnnnnnnnnnnnnnnnnnnnnnnnnnnnnnnnnnngtggtaacttattaataagatttttgtgagagataaataagacaaatacattttgtaaagggtgagtacttgggatattgtaaacagtgtgccattagcaatttggaatgctgtgttatgcaggtcataggttctagcttgacttttttctc

SEQ ID NO: 17604 - DNA, 923 bp, Homo Sapiens
gcacgaggggctgcccctgcccagcctcacacaggacacctgagcagctgctgagagggaggctggggtccccgggagtgtgtgcatgggtcttgttgctgggccaaaggcacgggacgaggctgctcgcccctctcttagccaccagtggcaaggcctcagcctagtgctgtctcccctgagacccctggtcgccgccgtatcctgggccagcccatctgggccctcaacaggtggcagcctcccagatctctgacaactttacaagctgcaggggagaccagcgataaccctgaaaccttcccatgtaacccccagggcgctggccagtccaagagcagctgccacatcaggctggtgccagcagtccctgcctgccacactgcccccccaccaggccactgaatgaggcagctgggagaggcaggaagtggggcttcaggctgaattcttgatttgacccttcttggcccttttgcttgggagacctggaactgaagggcatggaaccccccttggaccctgtgggcaggaaaactgctccccttgtccctgcctgggggtaggacagataaggctgctcgtcctgcggcggccccccagcccacctgcttcctatccgtttcctgcaggatggtgccccctgcatcccctcacccattgctcacggaaggaaaagcagacgtggccagcctgcatcctctgctctccctgagcctcctggcctggctggccacagctggcatggacgccatcagcaggctccgtgcaggcggacgggccacccccacagccagggcaccctggccctcactcaccaggacccttttgttcttttctagcaaatatgcaaagtgtgacagtgtggaaaacccaaagtgagtgggttccggctgcaaaccaccaagcttcagctttggggg

SEQ ID NO: 17605 - DNA, 519 bp, Homo Sapiens
gcacgaggctgaaagctaaatcctcaaaacctagtaaggggaccaatgattcattaaagtaaattgatggttttgctactaattcctatcccatacatttgacacaaaagaagtgttggtaatggataaataacatatcccgggcagatgagctcaacctagtaggtaagagtttggtttggtcacagttgcctatgagtgtgggtttcaaaagaaacataaagccttaacttagaatttcattatgttttagaatcatcactgccttaatattcaagcatctatttaagtcctaataaaggagaaatgcatgtttatggcttttttgtaaatataaatgcagtgatctatggcttaaaaaatttgtttctgtgacaatgtttgtaaatctagccaatagagtcatttacagaagaaaaatgagcatgtaataatacaagaactgtttccccctcaaaacctgaacctgaattatttgtaaaaactgaaatttaatgattaaagagaagccagaattgt

SEQ ID NO: 17606 - DNA, 906 bp, Homo Sapiens
  misc_feature (693)..(701): n is a, c, g, or t
gcacgaggctttatgactttactcatgaaattattctaatactccttgaaaatccccaattattttagaggcagtttcatttgaaattttagagggaaaacaatccagattcttagttctttcagttgattaattgaacaagatgggtgacagagaccttttctcagaatacactcaagttcttgcagagatgtgatggcattgttatatgcaggggcatcattgaaacaccacgcaacatgaggactgaaatgcagctaaaatgcactgagagtagagtagccttcaacttagtgcaggtagatcaggaagactaatagcagggcttccctctgaaatttttcactctgtaggaaagtttgcagatattcctaacacatgaaagttgtctgctggattgaaattattttgttttttaaatgggtgtttcaatggagagaaaaaaattgcttggcttttgttttgttacattagctcctggttaaccttgtttttcagaggtggttctgaaaattaaaatgcaaattgaaccatcatttaataactggagatggccacttagtgaggtgactgaagagaacctttgggatgactcctattctaccttggcgaatgctttgatggaattattttgtgatttttgttatagcagaatagtatttgtccatttaagagtcttgtattactttcagnnnnnnnnncttaaccaggaaaggaattttattaaaacactgaaattgcggggagagaaatactcaggcttgaggatatacaactagcaactatatccaggctatcaattactctagcaaagtcttcgctgctactgactcaggggtcacatgcttgtatatagtccatttttggagggataatttaaaatatttgaaaatactttgtatttgg

SEQ ID NO: 17607 - DNA, 930 bp, Homo Sapiens
ggttttctgggaccattttattgactattacacctgttttagcccatgtggatatggctaaagagtgatggacccagaaaaagaaaaaacgattgggaatttaatgattagaccatggaaaatgaagtggttagatccttcgtgtgtggtgagtctttaattcctggaagttagagtcccgggcagttgtgtccccagctgcagacactcggtgtacatgctgcagggcggcatcctcacccagccacctgccctgtgctccccgcagctgggctggtggacgatgggtccacagatgggagttacaaaggcgaaagccggagggaaatattccgggatataaaagtgcgtctcgtgcttctacaaatcacattgggtgagactaaaacgcctctggaaacagcagcatctcccagcctctgcacatggtttctgcctctccactctgaggttatgacaacatcaccgtggctctcagttgcctgagatccagttcctccagttaaatgctgcgttcgccccgtgggtcagggtcttcaccggtgggttcaccaactcccattttccttcctctttattttcttcacagaagcacatgcccagggaagggatctggtggctcaagaatccagggcgctcggaaatgtctggatcataattgggacacaccaccctggagacattttgcaggggaagcatgtttctactcagttgcagaggaaaatggagcaagaaagggagattcgggtgtctgatgcctaattgctgagtgacaatgacccacggcaggcatgctcttcatgtgcgtaacctctcatctggctgctgaggcaggcgtagctagagagctaagccctcctgcagcacctggctggtgtcactggctgggcccgggagttgggctcctctgaagccctgacctcttggggg

SEQ ID NO: 17608 - DNA, 538 bp, Homo Sapiens
gcacgaggcacatctgcccctggttgctaaggtgcacacgtcccatgggagctgaaggcaggtcccctagtgtctccctgagcctgcatgggagctgctggttcttagaaagcctgtgcattttccaaggtcccagacaccagcactccctggggggccaccgtgatgtgggagttaccgagggctggagctgctcctctttctcttgccatctccatcctccaagtgctgcacgctggcatccaggttaagctgcctctcatacggggacaggacagagctgtggggtgagaacagcgggtgggccactgacccacctcctcagcctggggatctggtgggatgtgtaaggaaacgggccaagaggacagtcagtgggccaggatcggagccacacccaagtgctaaggccctaagcagacccccatgaggggtacaggcccagccagggggcccagccatgtgcctctgcctaggcaatggcccagaggagctagcaaacttggtaaatatagaaaaataaaaaccttggataact

SEQ ID NO: 17609 - DNA, 812 bp, Homo Sapiens
gcacgaggcgtgcttttccgcactcatttcttacctttttttaaatttcaaaagccatgctcattgtagaaaaattaggaaagtcctgaaacagaaaaagacaattaaaacttgcataatcctgtaattttaagataactactgccagtattttgatatttagatttttttattgtacatgtgtatacatgtgtataaaatatgtatatagaattgtattatattgcacatatatatcttccttatcaaatatacattatatttaaaatattcactatagttcatttatttatttaactaatgataaaatccacatagctatatttttgcttagtaattttttcataaacttttataagtgaaatatttaagtaaaaatatgtgtttaaggcttttgtttcatgttaatcccttccatgtagttgtaccaatttttatgctaacctataatttctaataggactacaaaatactttagaattatcaaaatatttaatcctcataaaactcattatagtaaaagtttatataacttaaaatgaggccacatgaagggttaaaggacttattcagagatatatctagttaatgccaaagctaggatcacttatacagtatcgtaggcctaacattcttctttctaggcaacagcttcattcattcatccgttaatttactttttaataagtatgttgagtatctagccagatgataaggatattgcattaaatgtatttcctaacctcacagagcttaaaatctggcatggaagccaaacattaactgaacaagtaaactagttttaaatttta

SEQ ID NO: 17610 - DNA, 895 bp, Homo Sapiens
ggccgctctagacctttttaggatcccccgggctgcaggaattcggcacgaggctcttcagctgggcctggggaaacataattactgcaggaacccagacaaccggaggcgaccctggtgctatgtgcaggtgggcctaaagccgcttgtccaagagtgcatggtgcatgactgcgcagatggaaaaaagccctcctctcctccagaagaattaaaatttcagtgtggccaaaagactctgaggccccgctttaagattattgggggagaattcaccaccatcgagaaccagccctggtttgcggccatctacaggaggcaccgggggggctctgtcacctacgtgtgtggaggcagcctcatcagcccttgctgggtgatcagcgccacacactgcttcattgattacccaaagaaggaggactacatcgtctacctgggtcgctcaaggcttaactccaacacgcaaggggagatgaagtttgaggtggaaaacctcatcctacacaaggactacagcgctgacacgcttgctcaccacaatgacattgccttgctgaagatccgttccaaggagggcaggtgtgcgcagccatcccggactatacagaccatctgcctgccctcgatgtataacgatccccagtttggcacaagctgtgagatcactggctttggaaaagagaattctaccgactatctctatccggagcagctgaaaatgactgttgtgaagctgatttcccaccgggagtgtcagcagctccactactacggctctgaagtcaccaccaaaatgctgtgtgctgctgacccacagtggaaaccagattcctgccagggagactcagggggacccctcgtctgttccttccaggccgcatgactttgactg

SEQ ID NO: 17611 - DNA, 276 bp, Homo Sapiens
gcagtcaacacatatttactgggcgcattctatgcacgagttattgaagacagctgttgtaagcatttcaggacaatgcacctcccttaacaccgagtccgggatttggggcggggtgccggaaaacgccaggtcccgccagcagagggcacggtcccggcctcgctgcagcctcgggacccaccgaggcttccaggctcccacgctcgctcccgagcgcgtccccgccctcgcgtcacgtgacgtggccgcggaacctgagctgcggggcctaag

SEQ ID NO: 17612 - DNA, 257 bp, Homo Sapiens
gcacgaggataaaggagcacactgtcgcactacattgtctaaattatgtaggaagattcctgtaatcatgtttttttaattattattttaaagctattgtataaaggatggttcccatactttgttatttttattggggggggttggggtggttcctttggattaaatctgatattttctaatactgaaagattttctaaatgtcactgctgacataactcccttggtcttcaatttaatagttgttaaatttttgc

SEQ ID NO: 17613 - DNA, 370 bp, Homo Sapiens
gcacgaggcacatactcaaaagtgccaagtcctatcctgttttgccaatgacttctttgtaacagtgtgttgcttgctttagagtctaattgaagtcatgcaagccatacagcattcatagatttactactgagggttataaatgaattcttagaaatattgcacttattttccaaactgtactgataccttgatatatagttaaaaattaatattctggttatatgcatctaaaggaagcatgaacttaaaaatgtactcattaaaacaataagaaatcactttaatcagaaaacataaaataagagaggaatatgatcaaatatattcagtatgagaaaaaagtgttctttattaagacaagcagaat

SEQ ID NO: 17614 - DNA, 271 bp, Homo Sapiens
  misc_feature (52)..(64): n is a, c, g, or t
  misc_feature (90)..(129): n is a, c, g, or t
  misc_feature (200)..(208): n is a, c, g, or t
aaaaaacttgtcaaggaccccctgggccggaaactccttgcccaaacccttnnnnnnnnnnnnnggggaaccaaccctttttgggggttnnnnnnnnnnnnnnnnnnnnnnnnnnnnnnnnnnnnnnnnaaatttttgggtgcccccacccttaattaggttgatttggtgttcaacaaaaagggccccccccaatttgnnnnnnnnnggctcatcaaggtggggagccaccacacaaaaaggggctggggccttgccaaagggtttggga

SEQ ID NO: 17615 - DNA, 835 bp, Homo Sapiens
  misc_feature (87)..(140): n is a, c, g, or t
gcacgaggcacaggtgcgatcagtgcctcacgcaggcaaatgcactgaaacccaggggcacacgcgcgcagagtgaacagtgagttnnnnnnnnnnnnnnnnnnnnnnnnnnnnnnnnnnnnnnnnnnnnnnnnnnnnnngagcacggcacacagttcagcctctgagctggctcacacgtgccatccccaccccggtgctccagggaaggaggacacggacccgacgtgggaggtcctcaggcagcagtggcgcctggtgtcaggtctgtctggctgagtcccgggcgtcccctgccatggcctgtgccttgcatggaggcggcggtggcactgaagagatagctttcaagggcccaacactttgcacttcggctggctgtgagtttctgctttgtaggttgtggtcacatttgcaggctgcgggcagtggcaccgacttgggcctccctttctatgtggcatatttatttatttaaacaccccagggagttacgtggtaacaaggttgtccataaagaggttgcttctatatactagaggtcccagatggccaggccttgggctacgtctggcttgcatggtctcccaagggaatcagccccatcaacaaagttcaaatcgggggcagaggctgcacttgtgcccccagatgtttctgaggagccagactatggctggcattgctgtaaagtgacggctgctgcccaaagcgtgtcccagacatcatagcggggctcagcagttcccacagcctctgcctggccttggctaagctggatttaagcagcaaacgctcctccatgtctggatgggggccgcaaggtctgtgtccc

SEQ ID NO: 17616 - DNA, 492 bp, Homo Sapiens
  misc_feature (41)..(63): n is a, c, g, or t
gcacgaggccagcctgggcaacaacagcgaaactccagctnnnnnnnnnnnnnnnnnnnnnnngaaggccagattgggaatcaagacctgtgttctaaggggtctgccatgagttagcatcatgaatttgcttttctcctctaaaatgcaaaggttagattcaaattatcatgattgtcagctgtcactctcacgatacatgtcttgcatgcgtgttttcattggttttctcccttactgcttcatttaggagggtgttgattagaggaagcaacaggacatggctgccaaatatccattagacattgagtgagaaacaggtcacaagattgccactcccttaagcaggatctaggtatttaggtagcttcttaccatcatgagaccagatttcaacacacagtctaagtacatggcaaatacttgctgcgaaatgtgtgtaggaaattcaagttcttttacataaaccagtgatttttttaaggccatttt

SEQ ID NO: 17617 - DNA, 525 bp, Homo Sapiens
gcacgaggccagagcttgactggatggagacaggaccatctctgacattcattggccatcaggatataccaggagttggtaacatccactcaggtgccacacctccctggatgatccaagatgaagaatacattgctgggaaccaagaaataggaccatcctatgaagaatttcttaaagaaaaggaaaaacagaagttgaaaaaactccccccagaccgagttggggccaactttgatcacagctccaggaccagtgcaggctggctgccctcttttggccgcgtctggaataatggacgccgctggcagtccagacatcaattcaaaactgaagctgcagcaatgaagaagcagtcacatacagaaaaaagctaatcatgctctctaccaactaccatgaggctaaaagcaaagtcaacaaacccctattataccttccaccaaattctttatcattgtctttcttaggaaacagacatactcattcatttgatttaataaagttttatttttccaaatgtaa

SEQ ID NO: 17618 - DNA, 393 bp, Homo Sapiens
  misc_feature (167)..(272): n is a, c, g, or t
gcacgaggcataaacgttttcagatctttttctttaatcgatccacatcattgttctactctcttgagttcaaccgttttgactattctcaaatccagcgtgtctccctggaagtcactttcccttttctagagaaagtttattagcttatagttcttattacactnnnnnnnnnnnnnnnnnnnnnnnnnnnnnnnnnnnnnnnnnnnnnnnnnnnnnnnnnnnnnnnnnnnnnnnnnnnnnnnnnnnnnnnnnnnnnnnnnnnnnnnnnngctatattttaaaaattattattattttgcaacacaggaaattccttcaaggaagggctcatctatctgtttatgagcatattggcagtggttatctaatttgccttgtttgtaggggtag

SEQ ID NO: 17619 - DNA, 647 bp, Homo Sapiens
  misc_feature (54)..(70): n is a, c, g, or t
  misc_feature (112)..(128): n is a, c, g, or t
  misc_feature (440)..(511): n is a, c, g, or t
gcacgaggctggccttatacaacgtaaaagtaaagaaaattcatcagtttctcnnnnnnnnnnnnnnnnncagtggctgaagtttttgttagcaataagaaaacagtaggcnnnnnnnnnnnnnnnnncactttttcttttttctgggaatccacgttctcctcctgggtaaaggagagggttgtattttgtgattcctttttcctgccccaagtggctggcgatacagcccccggcgcgccgggcactgaggccctggagcacagcgtggggggcctggcacagacacgactcacgaccgggccgatctccggccagaaagaactatgttccggccgcccgggtcgcgggcccgcggtgcatccctgcaggcctccatcctgcctcggcagaggtctgcaagaatcctgtgggtgtcccccggagcgggcagaggaggnnnnnnnnnnnnnnnnnnnnnnnnnnnnnnnnnnnnnnnnnnnnnnnnnnnnnnnnnnnnnnnnnnnnnnnnaaaggccgagacctggacgctgcccggtggcctcggcgggggccctgtccttggccgctgcctctctgaatcccaggtgagaagaataaaacgtcctgacgctgtccggctttccggttcttggagaggacgggcc

SEQ ID NO: 17620 - DNA, 731 bp, Homo Sapiens
  misc_feature (230)..(239): n is a, c, g, or t
gggtttcacaaaaaacactttttatttgcccctatttgaaagccgaactttaaaaaaaatcctgggcgggggggtcaaaaccctccaccccgtcaaacttaacacccggctcgtcccccgggggttttccaaaaatactggcctccccatgaaactccctgagctttccccaatcaaaactggggctcttccgcatttttacttttctaacgaagaaatcctggagaggnnnnnnnnnntgggcagccctttctatgtcctttcccaagcgggcgggagaccaattattggccacttccttccaggcatttggccgcgcctcccggggcaagaattccaacctcctcctcccgaattggcggaactggtggggccgagcataaaaaggcttccgcaaccgatagtgtcgttttttttgaaacccacccacaaacgactaagccaggtactcctcgtagtcttgagatcaacgtgagcttccatcctttgctggcattttttggacacggagaacattttgtcacggggaaaatacactggcatggagagttagccgggcgagttttttacctgagaatcttccagaaccacgctcaagaccctctctctaaacaccaaccctgagagaactcaaatgacgattgggtcccttggtgcttgggggagagacgcttttccatatttcctatataagaccatacacgagcgctcccatacatacaatcttttct

SEQ ID NO: 17621 - DNA, 882 bp, Homo Sapiens
  misc_feature (217)..(272): n is a, c, g, or t
gcgagaggagtagatactggttttctattaactcaaaacctacattgacaagtttaacattgagaagaatcttaacaaaaatatggatatgaattcagtagatatcttaaattcaataaaatcactggaagtttttcatgataacttattttaagatgccttaaaaatcttaaagtcacaaaaggaaaaaggtttttaacatttacatgagttaacnnnnnnnnnnnnnnnnnnnnnnnnnnnnnnnnnnnnnnnnnnnnnnnnnnnnnnnncttaagaaaacagttaaatcattatgcattcagttggaagaaagtagtggcaagaattctttcattgctatataatattcagtggctcatttatacctaataaaataatggtattttaaaataatgctactttcaaagtagcatttttttagttagtttacaggttacatacccaaaaccttaactatgactaagaaattaaagaagaaaaccagcaaactaaaacttctgggcagcaaaatatataaatgcttcagatgtcaaatacccatgcttgaaagctcgtgtaatttactttaagattatctgcctgctcttcttcaaagctgaccttgctttagaaatagttttaactagcttagttttctggtttccaaaactaaaatagattaaatcctacaaatttaaggacagttgtgacagtaatctgaccactatctataaatacattggacattggtttccaaatctccctttcttcttcagttcccttccttgttcaatatatacccttctctaaacttgtgcgggtaaaaggattgactgtccttgagagaaccattagtttaatcaaagtttatggtagtttttgttgctgtaccctaacctt

SEQ ID NO: 17622 - DNA, 417 bp, Homo Sapiens
gcacgaggctggtagcccccaccccaagacagagctggatgcccctcgcttccgtagggaaagcacttctcctgcaggatggcattgctctctccccttccatggcacgtagtatgtgctcagtaaatatgtgttggatgagaaactgaaggtgtccccaggcctacaccactgccatgcccgaacactatccatgctatggtgggcaccatctctctgatgacagttctgtgtccacaacccagacccctccacacaaacccagatggggctgtgccgctgttttccagatgtattcattcaacaaatatttgtagggtacctactgtgtgtcagaagatgttcaagatcagcatcatccgatggaaatagcatatgagccatgtatgtagtttcaagtttttcattagccacatt

SEQ ID NO: 17623 - DNA, 238 bp, Homo Sapiens
ggaagtcatcacacctatttattccacgttttggtaccccttatccccgggtgggggaggccccaacctgcctgccctgacttggtgaccggcgaagtcggcccccggctatggggaaattaaccataggcttaactgtccctacctctgtcaccgccggtgtgcttggaacccaaatattctcccactgcaaatcctggcgctcggatcttgggcccgtgggctcgtctgccacccc

SEQ ID NO: 17624 - DNA, 825 bp, Homo Sapiens
  misc_feature (155)..(177): n is a, c, g, or t
gcacgaggcccatcaatcatctggtcctctgggtactggtgagcatccctggtcttcatacctgtgagtgggctttgtggtgaattactgtaaatatgctaccctcacttttcttggcagttatgtccatgaaatcaagagtgtgatgttctagnnnnnnnnnnnnnnnnnnnnnnnaaatgttcaatattcaactattgaaacaaatgtacatctgtgaactagctaaaatcatcttatgtaccactaatatgcccagcacattttgtaaaacagtcctgatttggcctccaagggtatttattgaactaccagcagtatctaggagaccacgaaggaataccacgaaggaatttatgctccagtgcttgccataatttgtctgagaaggaatctgttaaataaaagcttttatcctctaacctttaccttcatcagaccttataaaaggtcaaatggtgattcttaagttttttagtcacaaatcttacttattcagtattagtgcgaagagtagaatactttcaagtaagcctaaacttacatgaaaacaaattacataaatctagctctgagaataggaaattggtgacaagatcaatctgtaagatgttgagcacttatctgaagtaaatgggtaatgagtttcacatcttataaatacaagttagcatgtgttttctcaagagtccaagggttttcattattggactacagctttaatcttctaaatgtgattccccaagattaaagagcatctcaagttagatcaccaaagatcaaaagctaaaaccagaagtatgtttgtcattgtggtggtggtag

SEQ ID NO: 17625 - DNA, 888 bp, Homo Sapiens
aatctgaatgcggtgcgggagaccatggacgttctgcttgagatttcaagaattttgaatactggcttagatatggaaactctgtctatttgtgtacggctttgtgaacaaggaattaacccagaagctttatcatcggttattaaggagcttcgcaaggctactgaagcactgaaggctgctgaaaatatgacaagctgactttctggagaaattctgatgagatatgtcaagctctgcaagagggtttgaagattgcattgtagttgagaatgtacaatgaaattactgcatgcagcagtgtagaaaaattttactttttaaaagaattataaaaccatagctttataaatcagtggaaagtggcttacagagagaactatcagatgtgtttacatcacatcttattcactttttttaacagctctaatgctttggcattgctatgttcatatttatgtattccttatttatagctctgatagctttaattttctaagcagtctgtctatcagatgtgcacatctgctgtgccaggttgaagtatagtggaacccatcagtagtaatgtgtagtagttatgacttgttgacattttcattataaaactttaatttttgaattgtttatgcattataactgtggatttatattgtattggggctgaaagttgacagggatttcagccaccacttgtgaatttttatttagattcattatgtatatcagaatctttgttttttgaaataaggatcatgggaaaacatttcttgtaatctactcttgaacaaagaaatatttagtttttcaaacagtttgttggccagctaatagtgtgaaccaggtcatttttgtattgagtaaaaaatcaaactttgagaaacttgg

SEQ ID NO: 17626 - DNA, 952 bp, Homo Sapiens
gcacgagggctgcactcaccaaggaccacaatgcccccggcctaaagtactgccattcagaaaagcaggtttttcttcctctctttccttttctctgtctgctactgactgggctttttcccccttgaaatgtccagattcctgtggttcatcccaaggaaattttcacacaaagcttggcctttgccctcaatataggtgttttaggatggtgacaaaccatggctgctgctttctgcccagctcgccagtcctccccaaagagttgcgcatcagcacctggggatctggaccctgcgggtgaagggatggggagggacgtccctggagtctcttctgtctttgttccttcttattttggcattcgatatcagcagcctctccccaaagtacttgaagtcagttttagatgctttattttatttttctagtcaaaaacgtgtttcccccagtgtttgaaaactcgtccgaatcttttcagtattttccatgagtattgtggtacttctagacttgtttaagcccagaactcattccttcaaaacagagagccttaatctttatgttgggacacagaccacatatttggacggcagccatgcatccatcgctgaagggctgtggacatgaatgtgtatttcccatggtctccgctgcccacaccaacagtgtggcatctcataagttaactgctaccctaaggacatgccattatgtctttccagtacggatcacagtgctgccatatcacagaccctgccagccggcacagaaccatgcctcgtcacagctctgcccaactcacaggctgccaagatgaggccacaggtccacctagggcggcagatgctggtgctatttgtcacgacttttgccaaacatgtacactgttgctcacatctttcgtaagatggttgacactaaggggtcatggaaaagcacttttaaaaat

SEQ ID NO: 17627 - DNA, 762 bp, Homo Sapiens
  misc_feature (435)..(518): n is a, c, g, or t
gcacgaggataaagtgggatcagggaagaatttacagtcaaggctataaagtaataacaggaaagaggccattttgctgggttcaggtggaggtgagcgaggagttcagaagttcaagacctccaggcatttcctgggtggctgataatcctcctggtgctgaacccggctgcaccccagtcctggggcttctcagggtctgagtgaagggggccattgttgatggttctcagcttggactgatggacacctgtaggcttgagtggtgtccccaagtgagggcactgggggtagggtgcacctttttgggctctcacttctatgccacctggggaggaggttttcccgggctcctgtctcattctgggaacataaacggaggggcggagtgtggccagggaagtcagctaagcttggccatgtggggttcctcgnnnnnnnnnnnnnnnnnnnnnnnnnnnnnnnnnnnnnnnnnnnnnnnnnnnnnnnnnnnnnnnnnnnnnnnnnnnnnnnnnnnntcctgggggaggataacacctcccataactgagcttatatcctggcacacagttggtggataacagaggcggctccctggtcttcctctgtcatcctcatgctctctcctgctggactttgcaccttcccagcactcagagacatggacccgatggggcttcggagtcatcctagcctgagaggggcagaggtgggagctctggcctctggagcccaaagcattagttctagttcctgtatgaa

SEQ ID NO: 17628 - DNA, 896 bp, Homo Sapiens
  misc_feature (322)..(343): n is a, c, g, or t
gcacgaggcacaattccagcacaagtaatgggaatagcttaggtctgaatctgatttgaatcttctgattttattatttcagctagtgatgctctattgatctttgaatgttcacattagtctatgtcagatgcttaaccttctgcatctgaactcataaattaatttgtctgtcattctcaagttgctgaaaactcaaaggttaaatgaataattgtcatctatttttatatcttcagttccaaatattattattatatgtttcacagatttatgcacattgaaatgccaggcacatttactgcttcctagagtgctctgnnnnnnnnnnnnnnnnnnnnnnccttctaccaagttcctaacatcctaacatctaaatagattaatatctttgaccatgttatgagaggttagatgcttatactgagaatgcacatagatttgaggcctgaataataaagttattcacaagtctatatcaagttctgttgtataactaaggacctccaattatgacaatagaaagtttgctgtttaaatatttggcaaccatttaggtatatgctgtacaaggtattagtggttttgaaagaaagtacaaattcaaactgatcaatagaaaaatataaaatagcatgaatattcaaaaagtgagaaagttatttcagtttgagaaatgagtttatgaagatgatatttaatgtgtatcttaaaggctaaattagtctgatatttaatgttgagggtaatctaatcatctacatggcctttgaaatattatgcttagatcacatttaggaagaactccccagtccccttttgtatttagattcaatctattctacctgtgatttcccatggacatataaacctctagctttgcttgtatattttta

SEQ ID NO: 17629 - DNA, 885 bp, Homo Sapiens
  misc_feature (261)..(269): n is a, c, g, or t
gcacgagggaaaaaggtaatatttgcataccatatgaggaagatattccttctctgggactcagcgaagtgtcggacaccaaagaagacgaaaatggatcccccttgaatcacaggatcgaagagcagacgtaacccctgccccacctcagcccggcagccagcgaggtacaccaggtggtgcttggaagagatgaaagatcttcatggctgtttccactgaaatggacacatatgctcatgttgctttttttgttttagnnnnnnnnncaacatagttttctgaaggggcgacttaaaactgtggagagtggggagagttcggaaagaaatatgtttttatatataaaatatatatgtggagttttgtgggatggggaagagattttagttgttatttaacttgagaaagactaagcgcctcttagtgtcagggaagttgcctcagtgctcccagaagtcctgtgactgtgacgagacctctgtctgctgcaccagctggggactctggcttccagagctttcccagggtgtttggatcagatcaaattttgtcctctcttggggactgctttttatctgaattatcatttagtcaaggtagagtgtttttttatacataccaaatggagatagcagcctctcctagttttatttcaaaacgtttcacattaaatggtgtgaagcgttgtttggcaaaccaacagctttggcttctggtgtggtcaatatttcagtctgacataggttttgtttgtagtgaacaaagttgaaacatttgctctggactaaagaagcctagtggtttgtgtggccaactccatcggatgaatgcacacgcagacagaccctctgtatatttctgcattattcttgtctccttttc

SEQ ID NO: 17630 - DNA, 903 bp, Homo Sapiens
gcacgagggacatcgtgctctatctcatcaccaaggcgaagtacgcggccagcggccggtgatgcccgccgggaccccggaccccggccctgcgcccgcgtcgtctctgctgtaccttcccgtcgagcactagggaatcctagacggaggacttggtccattccacgcagtcccaagcaggtccgcagcggagggacgcagcggtctccaactcctggtcacgacttcggcgaccctccaccccctgagagacctggtcccacggagctgtccccccaggagccgcagcgggaatagcaaagcaaaggggaccactcagcccccaggaggagccctgaagcaaaaaggttgctgcggggagccacgttccctctggttcacctcgaagcccaggagctccggtccctggaccaaggagtgaacagacctgaggaagaggtaagaggaggtttaacgagtaaaaatttggactctctcctcttatactgctttaaagcatgaggaatttgggccctgacttctctctccttgaagaagtttctcgcgttctggccagtccttgcgtgtctgcacccagggccggcaacaatttaaggaggaactttactgggtggtcgaggcttgagagttcatagttaccttttaaaaaaatcattactattacttaatatctaggttattttggactgagcccccatcttcgctccagcccaaattcggcctttaacagtactagggagtgcttcaaaagaggagggtcgtggaggaagcgactcagacggccccaagaggagagatgggaaggagtgagggctttggccttaatgatctctgcaagttaagggccattattcctataactacagctggggaaagggcagaggaggtaagacggaaagtggg

SEQ ID NO: 17631 - DNA, 707 bp, Homo Sapiens
  misc_feature (587)..(621): n is a, c, g, or t
gcacgaggccgaaactcagagtccttcaaggcctatagccaggtgatggaggacgaggagaaggcagtggagatcttgggcaacacggaagctgctcatcctccatcccccatccgctgctgctggctccgcctccgctgcttggcagctactagcattatctgtggctgctcttgcctgggagtcatggctctggtgtttgccatcaaggcggaagagcggcataaagcaggccggtccgaggaggcagtgcgctggggggcccgggcccggaaactcatcctggccagctttgctgtctggcttgctgtcctcattctgggtcccctgctgctgtggttgctctcctacgccatcgctcaggctgagtgaccctggatggcctctgctgagagccagccgagacctcctggatcctgcaatgcggcattgctaaggtcctgtgacagcagtggttggaaggatcctggttggaaggatggggactctctcaaggggctttggaagagctcttctagccctttataaaaggagggcagcagctgagactgatgagaggagggcagcctgctctgttctttcagggnnnnnnnnnnnnnnnnnnnnnnnnnnnnnnnnnnntagggcctctacccagcgggaggggttgaagaccaggcctggttttattagaattcattttgtaataaaagccttttttagtggtg

SEQ ID NO: 17632 - DNA, 875 bp, Homo Sapiens
ggattacaggcatgagtggccgtacccagccttgtttcttcagttctaaaatggatataataatgtcttatttaattatcactgttagtatacattgacatgtcttgtaaagtacccatccagtccaattccttaggaaatgcttaataagtaataataattatgagcctaattattgtttttattttggagcaagccttagctgaacattttccctgtggaaaaagattgtttgaatgggcattaaccaatctggagggatttataacatttcaaaaagactgttataaaactagggatagtttgccagaactgaaaatcaatgcatttaatgttcagctgttttgaatgaggaggtagtgcaggtaacagactcttggcagcccatccccattcctgtttcagtcctgaacccaggcatgggcttaatgtgagagatagaaatagggcaatcgatgactgagattcagaaatggggcagagccggaaatgtctgttgtaaattaattaattttaaaaagtcaattagtgaagatgtgtttttacattttgaagccactacttcccgacttgtctggaaagcctgagattaagaatcacactttggaggtaagggaatacactagtctgttcttgccctgctataaagaactacctgagactgggtgatttataaagaacagaggtttaattggctcctggttccacaggctctctaggaagcgtggttgaggaggcttcaggaaacttgcaatcatgcaggcacacattgcatggctagaacaggaggaagagagtgaagggggaggtgctatacactttcaaacaaccagacctcgtgagaactcactattatgataacagcaagggaggaa

SEQ ID NO: 17633 - DNA, 782 bp, Homo Sapiens
  misc_feature (260)..(271): n is a, c, g, or t
  misc_feature (471)..(484): n is a, c, g, or t
ttatactgttatgctggtctgtgggctcagcatcaaagtaggaattttgcaacacacccacagttaacactcacttttttcctcaacacctagactctttcaacttcttaacagagtcagaattttggaagaaaagaacattaacactaaattgtcattttataaattattaaactaaagcttagagaaatagtcaatcatagtccataaggaatgtattggctggatagtcccatttctatgccataccatggcaagtnnnnnnnnnnnntaataatgtttgcttaaggcttatatgggaagtgtgtcctgtgctttgattagaaaagtgcccccaaaatgttttttaaccttgtatggttcatgagcacctctgagaatctattgaaacctgtgagttctcttcccggaagtgattctataaggacacagacataattttgcatataattttagaaactcattcacttnnnnnnnnnnnnnnggaatcttcttcctggtcttgccgtgacagtccccagccctctccacatgaccagccatctgagacccatggtagagccacaagtctaaaacccctcacagcacagaaagtaactcagagcacggtatgtgacctctcctggtgacacttgagtagtaagaagtggcaactcagccacagcaggtctatatttgggaccttcactcatgggcaggcctgttgctatttgtggctgcagccagctcatgttactatccagctttggtgccccacttgcagaactctggtgtaaaatagg

SEQ ID NO: 17634 - DNA, 444 bp, Homo Sapiens
  misc_feature (135)..(156): n is a, c, g, or t
gcacgaggtacaaagctaaacatgagtttgtactgccgtcttcaactcaaaatttgtcccaaaattttgtggcatatgtttagattttaaagttgatattttccctattgacagaataaactcattaaaagagcnnnnnnnnnnnnnnnnnnnnnnggcaagaactaactttcagcagctctttgcaagaaatgtaatattgatactttaaaataatactgccttcaaatgatgcctgtctctttaaaatcttttgacatagttcttccagggacagatatggctgtatttatttcatagatggagaaactgagcacagagctgtaatgaagacagaattgagatataagggcaaaagctaattaaacgcatcctcacaggtagcctttctttcagtgaacctgtagactagtccagtaatacttattaaaattagttgttaga

SEQ ID NO: 17635 - DNA, 942 bp, Homo Sapiens
gcacgagggtcatatttcatctaagatgctactgattataagaaaccattattttatgtactactaagaaaaaagtaacaatttctcatcagtaagatgcatcctgattccaaagagattaaaatgttaaaattgtgtatcttaaactaaactcaacatttaatttgacatttagagactgaggcacttagaaattaaatttactcaagctcatactaccttatgtgttagaagatgtcctattcagcactgcttatgttttgttctcagaaaatgtccccttattcagttataagctccgaccttaaagagttttaatctttgaagaaacagttgttagtaactagtaatggatggtatgtattacccttagccctctcgtttctctaatataccagacaaaagtgttttctataactttattgatcttccttaggaccagactctggctgaactgcagaacaacatggtgctagtgaaactggaccttcggaagaaggcagcatgtattgctgagcagtatcatactgtgttgaaactccaaggccaggtttctgccaaaaagcgccttggtaccaaccaggaaaatcagcaaccaaaccaacaaccaccagggaagaaaccattccttcgaaatttacttccccgaacaccaacctgccaaagctcaacagactgcagcccttatgcccggatcctacgctcacggcgttcccctttactcaaatctgggccttttggcaaaaagtactaggctgtgggggaaagagaagagcagtcatggccctgaggtgggtcagctactctcctgaagaaataggtctcttttatgctctaccatatatcaggaatatatccaggatgcaatactcagacactagcttttttctcacttttgtattataccacctatgtaatctcatgttgttgttttttttattt

SEQ ID NO: 17636 - DNA, 912 bp, Homo Sapiens
gcacgagggcggcgcccatcttgcggtccttttcctggggccggtggtctggtaccctaaatctctcagtattgttgcccttggggctgcgtaaggcccactcgggcgctcaggggttactggcagcgcagaaggctcgaggtctgttcaaggacttcttcccggagacggggacgaaaatagagctcccagagctcttcgaccgtggcacggcgagttttccccaaaccatttactgtggcttcgaccccacggcagactcgcttcatgtgggtcatctacttgcgctgctgggcctgtttcatttgcagcgagcgggccacaacgtgatcgcgctggtgggaggcgccacggcgcgcctgggagacccgagcggccgtaccaaggaacgcgaggcgctggagacagagcgcgtgcgagccaacgcgcgagctctgcgcctagggcttgaggccctggcggctaatcaccagcagcttttcactgatgggcgctcctggggcagcttcactgtgctggacaactcggcctggtaccagaagcagcacctggtggacttcctggcggcagtggggggtcacttccgcatggggacgctgctgagccggcagagcgtgcagctgcggctcaagagccccgagggcatgagcttggccgagttcttttaccaggtgctccaggcctatgacttctattacctcttccagcgttatggatgcagggtccagctgggcggatctgatcaactagggcaacatcatgtccggatatgagttcatcaacaagttgactggagaagatgtatttgggaatcaccgttcctctaattacagtacaactggagcaaagctgggaaagtctgctggcacgctggttggctaaacagagatagacatctccatttgagttgta

SEQ ID NO: 17637 - DNA, 539 bp, Homo Sapiens
  misc_feature (65)..(141): n is a, c, g, or t
  misc_feature (190)..(240): n is a, c, g, or t
  misc_feature (265)..(277): n is a, c, g, or t
  misc_feature (336)..(345): n is a, c, g, or t
  misc_feature (373)..(381): n is a, c, g, or t
  misc_feature (402)..(412): n is a, c, g, or t
cccattaaattttttaaaggggcccaaaattttgggaacaaattttgggccaattttttcccatnnnnnnnnnnnnnnnnnnnnnnnnnnnnnnnnnnnnnnnnnnnnnnnnnnnnnnnnnnnnnnnnnnnnnnnnnnnnntttcccctttcctttaaaaggtttaaaaaagctttgtttacataacccnnnnnnnnnnnnnnnnnnnnnnnnnnnnnnnnnnnnnnnnnnnnnnnnnnncccttttcccccccttaaaaaaaannnnnnnnnnnnnaaataggaaaaatatttttttaccctttgaaacttttgggggaaaatgggggaccttgnnnnnnnnnnaaccctttttgccccctgttttaaaaannnnnnnnnaaatggggtttctaaaacccnnnnnnnnnnncccccccaaagggggaaagtttaaaaaactttcacacccaaggggtttgccagaaaccaaatcaaaaggggcgcctcccacaaacttaaaaaatttggggcctcttcccccttttttaacaaaaggg

SEQ ID NO: 17638 - DNA, 497 bp, Homo Sapiens
gcacgaggcacgatacctgtaattatttcacctgtggtgccttaccttgagccttactggaatttttaccaggaccacagatttcggtctaacccctttcgatgtttggcattctcatacctatatatgctcgagctgcaaccttgttgacaacatttgcccctgcaccctttcccactgatcctaattttgcaacagacccctcccagttgccttcaactctacaaccttcctcacattttggagactatcactcatatctgaaggacttctttccaaagatttctttagaccctacttctgagctcccagaacgaattaataagaacaggttacccccggttcttatacgaccaagtgggacacctctggtcaaaaagctttaaacagatcttcataacttttttctattgaaaggaacccgcggggaagggtgcgaggagataatacccttatttattcacacttgaattgcatttgtgatcaaaataaatgtt

SEQ ID NO: 17639 - DNA, 917 bp, Homo Sapiens
gcacgaggctttgtggagacagagggcgagtttgtcttcgccacctccctggacaccaaggacatcgagcagatcgccgagttcctggagcagtcagtgaaagactcctgcgaggggctgatggtgaagaccctggatgttgatgccacctacgagatcgccaagagatcgcacaactggctcaagctgaagaaggactaccttgatggcgtgggtgacaccctggacctggtggtgatcggcgcctacctgggccgggggaagcgggccggccggtacgggggcttcctgctggcctcctacgacgaggacagtgaggagctgcaggccatatgcaagcttggaactggcttcagtgacgaggagctggaggagcatcaccagagcctcaaggccctggtgctgcccagcccacgcccttacgtgcggatagatggcgctgtgattcccgaccactggctggaccccagcgctgtgtgggaggtgaagtgcgctgacctctccctctctcccatctaccctgctgcgcggggcctggtggatagtgacaagggcatctcccttcgcttccctcggtttattcgagtccgtgaagacaagcagccggagcaggccaccaccagtgctcaggtggcctgtttgtaccggaagcaaagtcagattcagaaccaacaaggcgaggactcaggctctgaccctgaagatacctactaagccctcgccctcctagggcctgggtacagggcatgagttggacggaccccagggttattattgcctttgctttttagcaaatctgctgtggcaggctgtgattttgagagtcagggggaggggtgtgtgtgtgagggggtggcttactccgggagtctgggattcatcccgtcatttctttcaataataattatcggatagct

SEQ ID NO: 17640 - DNA, 834 bp, Homo Sapiens
gcacgaggcactcactgtgtaaattattataggagaagtctaattttttccagtggatcttttgaaaacgtatctcctttaaaacataatgttaatagtgaaaaatagtttgaaaacacaggtggaattcatggtctcaaaaatgttatttttaagaacgtatttttaaaaagaagaccaaataacttctacttgtttgtaaaatccttgttaactaggtggagcattatttctgttattctgtgttagagtgcatttattattttatttttccatcagagttagtattgccagcaatagaaattaactctggatgattcaagtggaaaagaagtttgttgaaaggatattgagtagttcacagagtcatttggaacactagagaaaaggcttaaaaaatgggcaggcaggataaaacaaagtgcatagctttgaagctaaaattatgctgcagaacttgactagtgaggatattttttctgatgccagcaaatgctagatgaatggtttgtacctctcatttctctagcattggcattggcattgtttgctgctgacattggctactggatgacccccctgctataactgtgaccagatcctcgaggtaactgctactattgctgccagaactaattctccactgagtgcttcttttctcactagttcccaagtcaatatccaagctgaagtcagagtaactgagcctattcatgtgccctaccctcaaagtaatggaggctatgaaagcaagtatctggctttgcagcttctgcagttgaaggtggaaatttcacaggcacagaaagggagttcagatgccaggtagctaag

SEQ ID NO: 17641 - DNA, 895 bp, Homo Sapiens
  misc_feature (579)..(844): n is a, c, g, or t
gcacgagggctgtgttacatacacatactttcttggcttctgagtagctcaggtgtggcttttggctgcagatgttaaattttgataccatgtaaacctacccagcttctcagacttgggtcttgttttttgatgggaacagaggtgtttagagaaagcctctgagtatgcctttcagattttgaacaagcggccttttctaaacatcgacttctactactctctagccttaaaataccttctgcttagatccagggcccttctactggagataggaaaagtagaattcaggaattaaaagaattactctttattcaatttgaggaacttggtgaaagcccctcctcttatgacagccaggttcctgctggctagaccagcctattcagcgctttgctaggggattgggtggtccacgcactcgctaatacagttctccaggtgtggaatgatgtcaatacgattgcttggccttttccccctgtgcctttgctcggtgctctggtttcctcagcaacactccttgtaaggggcagagacagggtccaccaactccccaagatgaagaagccccttcannnnnnnnnnnnnnnnnnnnnnnnnnnnnnnnnnnnnnnnnnnnnnnnnnnnnnnnnnnnnnnnnnnnnnnnnnnnnnnnnnnnnnnnnnnnnnnnnnnnnnnnnnnnnnnnnnnnnnnnnnnnnnnnnnnnnnnnnnnnnnnnnnnnnnnnnnnnnnnnnnnnnnnnnnnnnnnnnnnnnnnnnnnnnnnnnnnnnnnnnnnnnnnnnnnnnnnnnnnnnnnnnnnnnnnnnnnnnnnnnnnnnnnnnnnnnnnnnnnnnnnnnnttttttaagactcttaaaaaagagcctggggcattttttaagactctgtct

SEQ ID NO: 17642 - DNA, 899 bp, Homo Sapiens
  misc_feature (477)..(486): n is a, c, g, or t
gcacgaggattattaccatacttttacattagtctgagaatttttgctaaatatgattaagtattccaaaatataatggcgtcattattcttgacttttttagagaatatacatcttaagactgtattagttctcagagcaaggcatcatctactcccctgcacctgagagtctggccccagattccagatgtgcggacagcccatgaccgaggtgcacacagtgccctcttgaataggaaggtcagccagtgaggcggcagcataacttgcaggatggacttatatcttaccatctcttcctgctaccaaaataaaaaaataaattgaaagacaagacccaccagtctagttttgtagacctgtgaaatgtgtctttatttcttggcattagaagaaagatatttttaatccatatcgtggttttagagttgaagtgaattgatacccaattttccatcttagatctcctttatcnnnnnnnnnngcattttttttctcctaacgtgtctcccaaaatgtaaatactataggcaaaaagagtaccctgtaaaattctcacactggagcacctcttcaaaagtcacagataactcaatgaggaagtgctggtactgcactcacaggacatgagacctatgaagctttcgtgttttgaaagcatccttctgtgtgagggggactgcctcccttagtaaagtaaacctctcagaacttctttttaaaataaaaacagacaagatgcagttactaagctgcaagttttcattggcaaacctagctgaatccgttttaaaatacttagcactcggacacaattctcaaactcagaagaaggaacagggttggtttggtttactataaaggttgcctcacataaaacactgactccttttagcg

SEQ ID NO: 17643 - DNA, 754 bp, Homo Sapiens
  misc_feature (427)..(448): n is a, c, g, or t
  misc_feature (586)..(704): n is a, c, g, or t
gcacgagggttataactcgctttcctaaaagctattttctccctcagtgcgaacatacctttactgtgctcttccactttggaaggccatgctcggtgttccattataactctttttcctaagagttatattctccctcagtttgagaatacctttagtgtgctcttccacttttggtgtcttactctcttttgagggggaaaaatagaaaaggagagaagatgtcagtatgtttagtaaaaatcatgctcgtaatggctgaataaactgagaaaagtaactccttatgtatccccagaagttcacaggtatatcgggtggagaaagatttggaaaatcaaatgtataaccaaaaggattagaaactagcccaggatcacgtagctaactaataatcctgtgggaatcagttttcttgcctgctaannnnnnnnnnnnnnnnnnnnnnccttctatagcacttttcccccttttgttttgaatctatgcaatattgactttaataccaccaaatattaagtcatgccttactttaggtcgcactacaaaattctagagaggcatccagattgaaaaggaaaatggnnnnnnnnnnnnnnnnnnnnnnnnnnnnnnnnnnnnnnnnnnnnnnnnnnnnnnnnnnnnnnnnnnnnnnnnnnnnnnnnnnnnnnnnnnnnnnnnnnnnnnnnnnnnnnnnnnnnnnnttgcatatgtttttgtatgtttctgtttgtcgacacctagtctcaatctt

SEQ ID NO: 17644 - DNA, 891 bp, Homo Sapiens
  misc_feature (232)..(283): n is a, c, g, or t
gcacgaggctttaatgatggtgctaaaattcttcctataaaattccttaaaaataaagatggtttaatcactaccattgtgaaaacataactgttagacttcccgtttctgaaagaaagagcatcgttccaatgcttgttcactgttcctctgtcatactgtatctggaatgctttgtaatacttgcatgcttcttagaccagaacatgtaggtccccttgtgtctcaagannnnnnnnnnnnnnnnnnnnnnnnnnnnnnnnnnnnnnnnnnnnnnnnnnnnaaaataaacagctgggaccatcccaaaagacaagccatgcatacaactttggtcatgtatctctgcaaagcatcaaattaaatgcacgcttttgtcatgtcagtggtttttgttttgtgaaattcctttgaccatattagatctatttcatttccaatagtgaaaaggagatgtggtggtatactttgtttgccatttgtttaaaagatacaacggataccttctatcatgtatgtactggcttataaatgaaaatctatctacaacattacccacaaaggcaacatgacaccaattatcactgcctctgcccttaaaaatgtcagagtagtattattgataaaaagggcaagcaatagatttttcatgactgaataaactgtaataataaaacatatgtctcaaagtgtatcacatatgaatttagcctaattgttttcagtttcattctcaatatttagtttacaacatcattttcccctaaactggttatattttgacctgtatatcttaaatttgagtatttatatgcctaaatacatgtgtgagttttgtttgacttccaagtccaaactatagattatataagttcatatagatgatcagaa

SEQ ID NO: 17645 - DNA, 852 bp, Homo Sapiens
gcacgaggctttcattctacccgtgcctaactgtattgcttataaatactcttgaaaataaagatcagtggacttcctttagacttaatccaaagagatgcagaaccaaaatattgaatctcattagacattcctataatttgaaccccataacattataccattttatattttaattagctgtcaatgtagtcaatatttatttgatttgtgatttagaaaccctttgaatagtttgatgaatattgctagataccttttttacatttaattatacttagaaaatagaattttgttacactttcatagtaatcatttctttaattttgagtgaaaattctggctttttcaattccattttaaatatgtttcttcagtctctaggggaaaatagaaagcaagtgtaggtcacaccattagcaagcaatttcggggctataattaccaagaaaacatcaactggattatgattctgtttacacagtagaatttaaaaaaaccagtcagtgaaataaagaattaaatttcgtacctgtttttattctttaggtccttatcttgcttccctgccattggacagctctctactttcccagccaaatttagttgcccctacaagtcagtctttgattactccacctcagatgacaaatactggaaatgctaatactccatctgccaccttagcatctgcagcgagcagcactatgacagtgacttcaggtgttgccatatctacttcagttgccacagctaattcaactttgaccacagcttcaacttcatcttcatcatcctccaacttgaatagtggagtatcatcaaataaactaccttcgtttcaccctttgg

SEQ ID NO: 17646 - DNA, 602 bp, Homo Sapiens
  misc_feature (529)..(542): n is a, c, g, or t
ttaaagcccttaatgctatcacgtaagtgatagatattctgtggataatctacagtgtggtagatcatatctatataatcaagactgactatatttttggagattgtacagtttatttgggataaggctctatgggccaagaaagcagagtttgtactttttggatgaaaatacaaaattggtatagtaatgctcttatccctttggagaattaaatgcaaataaatatagtttgacagctcagatctttcaaaacaagaaagtagggctgtataaaaaaacatgtctttggtgatggtgtgaaaggattggttaaaatctttcaagggtagtgttgcgaagcctagtacaggatcacctttttttctgaatgtccattagtttggatgaaaaacatctaaagataatgtcattcagtcattgtccagtgttgcatgtggtttctgtggctgactccaggaaaatattcagtaattgcagatttactctttttcttaattcagttgcctagaaaagatgttaactgggnnnnnnnnnnnnnngaaacaaaatagtcttaaaagttttgatataggcataacagatgatacatgttatcatag

SEQ ID NO: 17647 - DNA, 850 bp, Homo Sapiens
gcacgaggaaaaaacaaaacatactctctcccccaaaaaaacatctcagtggggaacagatgtatcttttcatctgaaagacaatgctgggggaagagctccactgagatgcgggcagggaggctgggctcgagccagcccctgcgttagcaggagggggagaacagataggtaactcttttacatttcctttatgatctggcacttctccccagctccttccctctgccccccacccctactcctcaacacttctggtttgccctgacttctctacggctctggcttcttcccgaagagatataggagccatgtaagcacgcagtgggtgaactgcttaatttcactacatgttgatgtacttgtcttccgtcctgtaggtcttttctatataactttatgccacccttaaatgaatcattgggtatacctgtcatgttggatcctgtaatcacagttttccctgctcacctttttgtctaagatctattgagaaagggaaatatgggaaggagaaccatttgatcagaatacaaccaatagtctttaagcattgttaaagtatgaaactgaaatacattcaaaacacttaatccttgaggcttgtgatctgagtaattagcaggtatgatgctgggactggaaaatagaaagtaataactaaagggttaatgtgcaacgttattttttggccttgttcatgattttatgttttcagtgtcctgtgtacatatagaattgttaaagttgtcatttcaatatttatattagaaaaattatttagatactttataattttaaccggcatttttaataatgacacttgcatttattgtattgtaataaattt

SEQ ID NO: 17648 - DNA, 309 bp, Homo Sapiens
  misc_feature (135)..(147): n is a, c, g, or t
gcacgaggcggagatgtcccgcgcttgcgcactgcaggctcgagggaagcggctgaagcgctctgtcggctgtaagcgcgcctgcgcccgcgggctcggagactgcctgagtgcgcttgcgcaagttacagcctnnnnnnnnnnnnnaagcgctgtattcacagctgaggcctttgagcaaaaagctgagcaaaaacagggctgaaggctgaatgggtgcaacgacagtgaggggtgaggcggctgaaataatgagtcaaatttttcaacagctcttgtgataaaaataaatacttttattggtctggt

SEQ ID NO: 17649 - DNA, 363 bp, Homo Sapiens
gcacgaggctcagcagcgcgaggtgctgcggcgctgcgtagaagtatcaatcagccggttgcttttgtgagaagaattccttggactgcggcgtcgagtcagctgaaagaacactttgcacagttcggccatgtcagaaggtgcattttaccttttgacaaggagactggctttcacagaggtttgggttgggttcagttttcttcagaagaaggacttcggaatgcactacaacaggaaaatcatattatagatggagtaaaggtccaggttcacactagaaggccaaaacttccgcaaacatctgatgatgaaaagaaagatttttgagactgcagcctattaataaagttaacataactg

SEQ ID NO: 17650 - DNA, 847 bp, Homo Sapiens
gcacgaggtcgcgtcgggggcactgcaagcgcccagctgagccatgctctgggaggagacaggcgccgcccctgcgcccgcgcgggcctcggacctcccctacaggatatcctcagaccatctcaaaaaggaggaaaagatgactatgatggctcaccagtacccctcttggatcttcattaatgagaagacattcataaccagggaacaacttaattctttattgaagacctataacattttttatgagaaccagaaaaatctgcatattttatatggagagactgaagatggcaaactaattgttgaaggaatgctggacattttctggggagtaaaacgacctatacagctaaaaatacaagatgagaagccattctcttcttttactagtatgaagtcatcagacgtcttctccagcaaaggaatgacacgctggggggaatttgacgatctctatcgtattagtgagctggacaggacccagattcctatgtctgaaaaaaggaattcccaggaagactatttatcttatcacagcaacaccctgaagccacatgcaaaggatgaaccagactccccagtgctctatagaaccatgagtgaagcagctctggtgagaaaaaggatgaagcctctgatgatggacagaaaagaaagacagaaaaatagagcctctattaatggacacttctataaccatgaaacatcaattttcattccagcctttgaatcagaaactaagtcaggagtaaacagtaacatgagaactgaagaagtataaagcaacttctcccaaaattaagattgaaaatagtcctcggattttgctctcccattattttgc

SEQ ID NO: 17651 - DNA, 272 bp, Homo Sapiens
gcacgaggattttttttcctccaaaattttaccccctcccccctgagcccgaggtgctgacgtcgcaaaaaattggatagtaagtgtcgaattttcaaaaaccagccttgcaacaagaaatcaacgtttcccgttgtgaaaccaaaaataatgagaggaagaaatgagaccatagaacaaatagagaactggagaaggaccaatctggtcacttaatctccattaaaaagggcctgtgggtctaaacagtcttgttctctctcccctaccac

SEQ ID NO: 17652 - DNA, 652 bp, Homo Sapiens
  misc_feature (69)..(190): n is a, c, g, or t
  misc_feature (289)..(409): n is a, c, g, or t
  misc_feature (464)..(533): n is a, c, g, or t
gcacaagtgatcctcccacctcaacttccagaatatagaagctggaactacaggtatgtgccaccgtannnnnnnnnnnnnnnnnnnnnnnnnnnnnnnnnnnnnnnnnnnnnnnnnnnnnnnnnnnnnnnnnnnnnnnnnnnnnnnnnnnnnnnnnnnnnnnnnnnnnnnnnnnnnnnnnnnnnnnnnnatgagccacctctcccagcctaaagtagatttttaaaaagtgatatgtaatagaagtcaaaacagtggttatctttctcagaaagaaattagaaggagnnnnnnnnnnnnnnnnnnnnnnnnnnnnnnnnnnnnnnnnnnnnnnnnnnnnnnnnnnnnnnnnnnnnnnnnnnnnnnnnnnnnnnnnnnnnnnnnnnnnnnnnnnnnnnnnnnnnnnnnnttatgtgatactttacttaaaaatggtgccatgtcttcccatttgttcctgcagnnnnnnnnnnnnnnnnnnnnnnnnnnnnnnnnnnnnnnnnnnnnnnnnnnnnnnnnnnnnnnnnnnnnnntttgtaatatagctaaatggctatgtaaagcaggcaaagcttgtgactcatagcaacttttgcttcaacaaaccaaaggcaggaaaaaattgataaccactgttttaagcagattaagc

SEQ ID NO: 17653 - DNA, 903 bp, Homo Sapiens
gcacgaggattatggtccaatcagatacaatattgtatctacaattgcaaaaaacacagtaacaggatgaatattatctgatatcaagtcaaaatcagtttgaaaagaaggtgtatcatattttatattgtcactagaatctcttaagtataattccataatgacatgggcatataccgtaacattctggcaaataacaattagaaaagataggtttaacaaaaaaatttacttgtatataatgcaccttcaggaggactatgtcctttgatgctataaaatacaaacaactttgaaggcaacagaagacactgtttattcaagtcagttctttgtcaggttcctgctgttctcctacagaaaagtgattctgtgagggtgaacaggaaatgccttgtggaaacaggaagtccaagtgattcatgtactgaggaatgtaggaaaaaaaatctgaggatagtgctttactctttctgtttttaaagggcactctatgaattgatttattgtctaagaaaataacaccacaagtagggaaattgttacggaagcttttcactggaacatttccttcatattcccttttgatatgtttaccttgttttataggtttacttttgttaagctagttaaaggttcgttgtattaagacccctttaatatggataatccaaattgacctagaatctttgtgaggtttttttctattaaaatatttatatttctaaatccgaggtatttcaaggtgtagtatcctatttcaaaggagatatagcagttttgccaaatgtagacattgttcaactgtatgttattggcacgtgttgtttacattttgctgtgacatttaaaaatatttctttaaaatgttactgctaaagatacattattctttttaaaaag

SEQ ID NO: 17654 - DNA, 657 bp, Homo Sapiens
gagacagagacattcatacatatatctaagtctacctactctcaaaagatgctagatattactattattctccaatgagttttatgacatttgcagtgattctgttttatgctttcattcttttagtgtcttcttgtatatggtattaacaattaaggaactttatatatttatgaagacccttctatcagtgtgagagcatttcatgcatattctttgttttcgcagccttttcaaatagcatctatcattttccatacatgttaagctaaaacatttaggagcagaaaaacttgcaccaaattattttaccacttggtaggagagctaagatgttgaaggacttgatcacttaaggcatccatagctgtttttcttgatacccaattgttatactcctgaggattttaacttgagacgtggaacagctttctttggccatccattgggagctgaatcacatatctacaacactttgagaaaaagtattcttctttcttaaagttgtttatagaattttttttaccaactatttataaattaaattgttatttaaagactaacttggagaggttcctaattatccagactactaatgtacattggttttcttttgcagaagctgagtatctatggtgacttggagttatgaatgac

SEQ ID NO: 17655 - DNA, 863 bp, Homo Sapiens
ccccgggctgcaggaattcggcacgaggggaagtaatacataatcttccagattttgaactactttcggcaaacacactagaggatcgtttggctcatcatcggtggctgttattttttcattttggatgatcatattcaagttggcaggtttgactgttcctctgcaccagacatctgtagtaatctgtatgtttttcagccgtctctagcagtatttaaaggacaaggaaccaaagaatatgaaattcatcatggaaagaagattctatatgatatacttgcctttgccaaagaaagtgtgaattctcatgttaccacgcttggacctcaaaattttcctgccaatgacaaagaaccatggcttgttgatttctttgccccctggtgtccaccatgtcgagctttactaccagagttacgaagagcatcaaatcttctttatggtcagcttaagtttggtacactagattgtacagttcatgagggactctgtaacatgtataacattcaggcttatccaacaacagtggtattcaaccagtccaacattcatgagtatgaaggacatcactctgctgaacaaatcttggagttcatagaggatcttatgaatctttcagtggtctcccttacactcaccaccttcaacgaactagttacacaaagaaaacacaacgaaagtctggatggttgatttctattctccgtgggtgtcatccttgccaagtcttaatgccagaatggaaaagaatggcccggacattaactgggactgatcaacgtgggcagtatagattgccaacagtatcattctttttgtgcccaggaaaacgttcaaagataccctgagataggattttt

SEQ ID NO: 17656 - DNA, 873 bp, Homo Sapiens
tcctttaaaaatcccccgggctgcaggaattcggcacgaggctcaaggcctgcagcctggccgccagtgaaggcctctcaagtgctcagcccaacggaccgcctgaggcagagccacggcctccccagtcccctgcctcaacggccagtttcatcttctccaagggctctaggaagctgcagctggagcggcccgtgtcccctgagacccaggctgacctccagcggaatctggtggcagaactccggagcatctcagagcagcggccaccccaggccccaaagaagtcacctaaggctcccccacctgtggcccgcaagccgtctgtgggagtccccccacccgcctcccccagttaccctcgagctgagccccttactgctcctcccaccaatgggctccctcacacccaggacaggactaagagggagctggcggagaatggaggtgtcctgcagctggtgggcccagaggagaagatgggcctcccgggctcagactcacagaaagagctggcctgaccaccaggtacctcactggcactgctgacccatcccagaaacacaatctcagggacccgagcagctccaaggacgagaggatacagcagacacaacctaatagagagggcgcctgcagccttaacctccacggccttcgatacttatgcaagcctggtgttgctcctgtcctcagagtcatcttgcgctcatgccttttcccgaatgggttcacctctggcagttgccgcttcagtcttggccttagcctcatcttgaagtgggtagctggcgggagagggtggctgcgccccctgctggcctgaggctgcagagtggggagcaggacacctccccctgagttcattttttt

SEQ ID NO: 17657 - DNA, 793 bp, Homo Sapiens
  misc_feature (466)..(490): n is a, c, g, or t
  misc_feature (610)..(631): n is a, c, g, or t
aaaagcaaacgaaacgtgtaaatagtctgttgatataaatatatgacgttactaaattcttaatctagatagactttataaaaaccgtttccagaaacccctctggttgtttgtctaacatggtcacaaaaacccaggcgctgctggctgtaaacattatcagaagtttaatggcagcaactttccttcaactatgcaagcgcttcccggcggctctgctggttgggggaggaaggttccgccagcgacctcccagcccctgggtccgtggaggggttgggtccccccagcagagcccctgggccagcagaacagcactcctgggcggctcctgtgggcttcaggactggccggctccagccgcaagggcgatgctgtggacgtttgtgtggatggtgcagtgttcttggaatctgtagaccagatcggtggaggtatagaagtgcaagagtctaaaggctgattnnnnnnnnnnnnnnnnnnnnnnnnnaaatcactgctgtgtgttttcttccgcctgaggcatcagcgtcacctcggtgtggtcgtcgcctcccaggcccttggcctggcctcctctcagtttgggttttgccctcacccacatgannnnnnnnnnnnnnnnnnnnnnttgcggccttttgtgttccccgatgtctgggctgtgtccctgccgggattcccagcccttcggggtcagccgtcgagccacttgcttttgctcagttctgtgtttcagccacatttccacggtggaccctgtttgtttaaatattctgttcccatgtcaatc

SEQ ID NO: 17658 - DNA, 950 bp, Homo Sapiens
gcacgaggctttatatgactttatgttctcttcttatgacatttaaattctttaagtagtttgttggtccaataaactagacgttgtataatctaaattgagcccttgtatatctaaaactgatgagttgtttctaaattgttgattgtccatttacttgcctttggtattaagataatgcaagtaaagtttagtaagtcattggataatgaaatgattatgtttctgaagaccatattatatttttaatttttagaggaatcatgccatcccccaaaaaatcaagaaatatttgaattttaaattataagttcatttgttaaaagacatttttacaaatgtctgaaaatcttaaaatactttacatctacctttaagtagtagaatacagagctgtaaatttccatgccttttttcctgatattaagttttatagtaaaaaagcaactagtgattgcacaaagaatataaaaatccactctttttacaaaggtgtgaatttaaataacgttattgattggaatatgaaaataaaccaatcatttaagagctttttagcaaatgattcaattcttactctttttctcccaagattgaaaagcataatgtatttctctaaagtaggaatctagagagcccctgtgagtggacaaatgtcagtaacacttgaacacatgagaagataagtgttatgttgtgataatttaaagttaaatttgctttttgggtaggatccctaaatagatgggatttttaaatagatgatatatagatgacaattgcaattgtcattttaattattttctctacagtaaagaacctagctctgagcagtgaaattgtaatggcactttaaaggaagtaagccgttatctgttctctagtggagcgatctcctactgtttggcactagggacgggttttgtggagaattttcacgggactggggg

SEQ ID NO: 17659 - DNA, 749 bp, Homo Sapiens
gcacgaggaggaggcatcttctccaatctgagagtccagggatgcatgccccagccaggttgcaacctgctcaatgggacacaggaaattgggcccgtgggtatgactgagaactgcaataggaaagattttctgacctgtcccaggagaccggcagtgtcctacctgtgtgcagccccttggaacctgttcaagtggctccccccgaatgacctgccccaggggcgccactcattgttatgatgggtacattcatctctcaggaggtgggctgtccaccaaaatgagcattcagggctgcgtggcccaaccttccagcttcttgttgaaccacaccagacaaatcgggatcttctctgcgcgtgagaagcgtgatgtgcagcctcctgcctctcagcatgagggaggtggggctgagggcctggagtctctcacttggggggtggggctggcactggccccagcgctgtggtggggagtggtttgcccttcctgctaactctattacccccacgattcttcaccgctgctgaccacccacactcaacctccctctgacctcataacctaatggccttggacaccagattctttcccattctgtccatgaatcatcttccccacacacaatcattcatatctattcacctaacagcaacactggggagagcctggagcatccggacttgctctatggggagaggggacgctggaggagtggctgcatgtatctgataatacagaccctg

SEQ ID NO: 17660 - DNA, 933 bp, Homo Sapiens
cctttaaaaaaatcccccgggctgcaggaattcggcacgaggccgagtactccagcaacgtggagctcgcctccttccactccacctccaagggctacatgggcgagtgtggttacagaggaggctacatggaggtgatcaacctgcaccctgagatcaagggccagctggtgaagctgctgtcggtgcgcctgtgccccccagtgtctgggcaggccgccatggacattgtcgtgaaccccccggtggcaggagaggagtcctttgagcaattcagccgagagaaggagtcggtcctgggtaatctggccaaaaaaagcaaagctgacggaagacctgtttaaccaagtcccaggaattcactgcaaccccttgcagggggccatgtacgccttccctcggatcttcattcctgccaaagctgtggaggctgctcaggcccatcaaatggctccagacatgttctactgcatgaagctcctggaggagactggcatctgtgtcgtgcccggcagtggctttgggcagagggaaggcacttaccacttcaggatgactatcctccctccagtggagaagctgaaaacggtgctgcagaaggtgaaagacttccacatcaacttcctggagaagtacgcgtgaggacgcctgagcctcagcgggagacctgtccttggctcttcctcccaatgcccgtcaggctgaactcgcctcccccgtgactctgcctcgggcctcgcagaggccgctggtcacttcgtcatcattttgcccctggagacgtctttctttgtgccttgatgttgagagcgcctctcttttgagcaaacaagcattctatatgcaaccagagtagaggggacctgctcagcagtgtgaccaggttctctgaatctgttattgtttttgcttctggaagttcatttggggtta

SEQ ID NO: 17661 - DNA, 702 bp, Homo Sapiens
  misc_feature (65)..(82): n is a, c, g, or t
  misc_feature (155)..(268): n is a, c, g, or t
  misc_feature (273)..(318): n is a, c, g, or t
tgcaggaattccgcacgaggcaccgttaaacaggacccgggttctgttgctgccttcctgtgtcnnnnnnnnnnnnnnnnnnctttctttgaaacggagtcttgctctgtggctcatcctggagcacagtggtgcgatatcagctcactaccacnnnnnnnnnnnnnnnnnnnnnnnnnnnnnnnnnnnnnnnnnnnnnnnnnnnnnnnnnnnnnnnnnnnnnnnnnnnnnnnnnnnnnnnnnnnnnnnnnnnnnnnnnnnnnnnnnncactnnnnnnnnnnnnnnnnnnnnnnnnnnnnnnnnnnnnnnnnnnnnnncgtgcccggtgcatccctaatcttgagcatgatctcattcggcaaatgaggctatctgttttcagcctgtttgaaaataagatgtggggaggccatgatggaaatagcacgtggggttaaacataactggcaaatgtgggagcgatggtggggcatgccattcaaacaggtcccaaaatgggtgcaacaaggtatagcacatctaccactcgctaacttgactgacttggagaaatgactacacttttgcctgtttcctcagttggaaaatagccatattaacacctctttcattggcttgctgtcagggtactgggatggggggagttgcatgggttggggtggccaccatgtggtgctgtgccacagcgggcagcccctctg

SEQ ID NO: 17662 - DNA, 481 bp, Homo Sapiens
  misc_feature (105)..(119): n is a, c, g, or t
  misc_feature (130)..(162): n is a, c, g, or t
aacattttattagtattttatttgtatttttggagaagatatagagtttcatgagaaacactgatttttctcaaacaatagaaaaagtgttttttgtgtgggtgnnnnnnnnnnnnnnnaaaaaaacccnnnnnnnnnnnnnnnnnnnnnnnnnnnnnnnnncaagtctcttcaccaagcatggggccaattcaaatgggaggaaccagtgaagttagaagttacacacaggaagtgagttcagatttatccacaaatgtcttctggtctagttctgtaaggctccaaatgggccatctcagcttaaaactggcaacaccctctcaaagctctcaggatcccatctggtttgaacctggggcctcattctccaggaggctgcatctgtttacagaactcatcaaactgctgctgctccagttctgtcatgactctgttgagggcataaatctgaatgagaaaaagagatacatctgttagc

SEQ ID NO: 17663 - DNA, 622 bp, Homo Sapiens
gcacgaggctcatctttgccagtacaggagctcgtgccgtggcccacagcccacagcccacagccatgggctgggacctgacggtgaagatgctggcgggcaacgaattccaggtgtccctgagcagctccatgtcggtgtcagagctgaaggcgcagatcacccagaagatcggcgtgcacgccttccagcagcgtctggctgtccacccgagcggtgtggcgctgcaggacagggtcccccttgccagccagggcctgggccccggcagcacggtcctgctggtggtggacaaatgcgacgaacctctgagcatcctggtgaggaataacaagggccgcagcagcacctacgaggtgcggctgacgcagaccgtggcccacctgaagcagcaagtgagcgggctggagggtgtgcaggacgacctgttctggctgaccttcgaggggaagctcttggaggaccagctctcgctgggggagtacggcctcaagcctctgagcaccgtgttcatgaatctgcgcctgcggggaggcggcacagagcctggcgggcggagctaagggcctctaccagcatccgagcaggatcaagggctggaaataaaggctgttgtaaagag

SEQ ID NO: 17664 - DNA, 481 bp, Homo Sapiens
  misc_feature (68)..(76): n is a, c, g, or t
  misc_feature (129)..(137): n is a, c, g, or t
  misc_feature (266)..(285): n is a, c, g, or t
  misc_feature (324)..(332): n is a, c, g, or t
aaaacccccctccaaaaatggaaaaatacaaaaatagtcaaacccattctacaaaatggcagtttcannnnnnnnntttcaagccaaagggatgtttggatgtaaagggaaaaattaattgggggatgnnnnnnnnngggaagaaagttgaacccaaaaagacgtgaagtccgggaaagcttggggctacaaaaaatgttaaaccctaaatgccgtcgaaaatggggaagggaaatttaaagtactctgaggcttggaggagggtnnnnnnnnnnnnnnnnnnnnttgtaataaacaggggttgaattatttggtttcggttgnnnnnnnnnaaattagggggaacttaggggattgatatctttgatgggaataaaacggatgtgtttaggagggggatttttaggggatttaacggggggatgcctgttgggggccaacgctctcctaattggggggtaggggctaagctggagggggg

SEQ ID NO: 17665 - DNA, 351 bp, Homo Sapiens
caccagcctggccaccttccctccagcctctcctcctccccgggttcagggggaggcccttcccccgaccccctaacccgcaaaccgtatgcggtgccggggtcagggcgggatgtcccgaggaagagagggagacggggtggaggtgtttgggggcgttcgcgggatccggagggggacctgagcaccgggccagcgcggaaattcaaaactcagaccgcttaaggagcacgtgattttgtgagtgcctcagggaagggctgcggaaactcggaaagcaggcgggcagcatgcgaggaaaatgacactgagttgataaagagctcagacggctccacacattgccagttt

SEQ ID NO: 17666 - DNA, 957 bp, Homo Sapiens
gcacgaggtttcttttcacttccccttccttccccttataagatcatttccatgtctttgttggtgatctcagcccagaaattacaactgaagatataaaagctgcttttgcaccatttggaagaatatcgtaagtaacagaagataaataaaatccttttaattagaaacaattatatgtagacataacttgaaaataattctgttgtgaattttgtacattaattttataacttgaatataatgtattacattgtttagagatcattcaagaagttaacagcaaaagattgttttcccattgatgaataaacctttggttttcaattatcttaaaatcctttttcaattagcatagctcttaagagacaaatttgccattgtacatgttttactttcttatataggtatcaagctagcttggtgacaatctttagtaaaattgtgctgtaactaaggaatttagatctgttgggtacttctatgataccatgcattttgtgttaatatattttaacaaaaagaaaccttaacaattcaacttaaaaagcagttattgaatattattttctagatatttacacccttttaaaaaaactgctaacaataatagtgccttaataatattttatgaagcactgccttgcttgcacttgttattagtcatacattttaggcccttatgaataaataccttacttgagatagcattcatcatagaagaactttaaaattttgaaaagcatgccatattagagtaagaataacaagttgtttacagtactttctgtagagtaattagcttagaaaacttcttcagggtttctgcttgctctgttatttttccacctagaagaatagtaaaaaggaagtgctagctgtggtttggtttgaacagaccacagcagagatgagatgagagactgcaaagtaaatgccagtagtaatggtgaattt

SEQ ID NO: 17667 - DNA, 256 bp, Homo Sapiens
gcacgaggctactaaatctagaatgatgtgattaatgaataggctttagctctataatatcttctaggttattagaattgaaacctgacagttttataaaaagtcatgttatctcatgagctgcttcccacctggctgtataattttatcatcatggttccccagtttcgatgagttctcacagtcaaatgagagtttgtttaaccaccttaggagaaacatactacaaagtcatcaagaataaaggttccaaagt

SEQ ID NO: 17668 - DNA, 533 bp, Homo Sapiens
  misc_feature (159)..(232): n is a, c, g, or t
  misc_feature (448)..(460): n is a, c, g, or t
gcacgagggtcattaggtttgattctgaatactatacaaactaattttgatttcaagatcttaagtaaaggtttatttatagtacattggaaagcatgtttgtagacatgtattttgtgtttggttcctcaacttgctttgtatatattttataatacnnnnnnnnnnnnnnnnnnnnnnnnnnnnnnnnnnnnnnnnnnnnnnnnnnnnnnnnnnnnnnnnnnnnnnnnnntgcttaaggatataatctgtgtatattgtatttcagattcatagcaacctaataacaaggatttacaaaagggtttttacttccctacttttttttggctgaaggaaggtttttgtattgacttggtttaacttacaaatcagaactttgaaaccaagaaacattatccttatttctctgctatataatagtaaacctgtttttttccagtgttcnnnnnnnnnnnnnccaaagaattgggactgaatagtatgaaagtgaaaatggaaataaattaattattaatcatcatcatatcaat

SEQ ID NO: 17669 - DNA, 647 bp, Homo Sapiens
gcacgaggagaatctaaggccaaggaggaggagggggtccctgacgaggagggctgggtgaaggtgacccgccggggccggcggcctgtgctcccccggactgaggcagccagcttgcgggtgctggagagggagagacggaagcgcagccgaaaagagctgctcaacttctacgcctggcagcatcgagagagcaagatggagcatctagcgcagctgcgcaagaagttcgaggaggacaagcagaggatcgagctgctgcgggcccagtgcaaattccgaccgtactgagctgtgagagccgcattgaatggctggaggtgcagggccaggaggaggcgaggcagggcctgcagcggtctctgaaaggccgagttctggccaacgggccccaggttgaaggccaccgcgtccaacagccccatcaaagtccacacaggccaggagggaaggaccaggccacccctcgggtcttgtgcttcatcagtcctggggacccaggcgtgccgagaggaggacttgtccttcctgcttcttgcctccacaccctcctctccaggaccttggatgaatccggttctgtgcttccttttcccctcaatgcaaaagcccttgctggcaacgaaaaagcctcaatagcaataaaa

SEQ ID NO: 17670 - DNA, 651 bp, Homo Sapiens
gcacgaggcagatgagaaccaaaaccgagtgaagaggattgaagatgaacccacattttaaaagttcttgtctgctggaggtggcattacctgtgacctcgcttcacttctccatacatggctgttatagcagaaaatccagctttctgaagcatatttcacgacatatgatgagacttatgtgatgtgagacctgagaaaactatgatagaaagaagcaactcaagttgcaaggatattcctcatgtatcatgcaaggatattcctcatatatcatgtaagtaaaaagtcaccaaatcctgacaacctgtccacatgtgcccacacatgtacaattatataataaaaagagcagaatgcaatataacaaacatcaatggaatatctattaaacttcttaagagtatcatttctttactgctatatatttgttccacttactgatttttttccagatgcatataattcttacggtttgatcaacagtaaaagaatgctatgagatttaaccataaaaaactatcttgttcctcaagaaaagttaatgatattggagagtactcattttctagtgttgaattgagaattcagggcaccaaattctatgtgtagtgggaccaatgaggatggatttgaagaaaagaaatggaa

SEQ ID NO: 17671 - DNA, 900 bp, Homo Sapiens
ctcacgtagatagattgaggttttataataatcatttcagaattttactctgcatcacaatgtatttcctctttaatgttgtaaatatttggcaatttaagacattgtgtaaaaagcaatctgtaaaaacatctccaggctttgatttttgtaccatggaaattgtatttaaccatacagggttttggtatgtttatattgtttaccttagtgatgtatttgtttaagtggctaacatccaaacgactgtttgaaggcatcagagtaatcttcagtgtggaatgttaaataacgcttttatactgtattttgtactatgatgtaactccccttccttatggctaggctactgtaacacttgcctgtaatcagtgaagggctgtgcaccttgtactatttcacaatgggttctgctggacagataatgggccagtgttattgaggtgatcaagatctgttccacagggctaatgccaccatctcccctcaaaattttgtagaggttctaaaaagaaagtggtatgttgtgtgatgatcagcactaagtcctgcattcctgttaaagccacttgggtcataagaagggagtaaaaaatgaagtctgactagaattctattgcagaggccaagtacatttagtatggcattgagttgtgatatagttttactttgatgtgcattttgaatttcagctacacctagatagacgtaaaatgataattaaaatgctgtaaccaacttatctaataaaattggcaaccagccactattttgttgactatgagaaagttaaaagtttatgttaatttttagggtctgatagaatatttcatgtgtattacagtggtattcatatgctatgtctctaaactttattttcaaaagcttaaggcccaaata

SEQ ID NO: 17672 - DNA, 720 bp, Homo Sapiens
  misc_feature (162)..(433): n is a, c, g, or t
tccaagatcactccagcacctggaatccagagtaaagagcaagaccatagcctggaacctgaaggtcagacccttgggaggttcaggcctagttctccatcactgaagatatctcagggataaagagttgagtgctcggccaggtgagggggctcacgcctnnnnnnnnnnnnnnnnnnnnnnnnnnnnnnnnnnnnnnnnnnnnnnnnnnnnnnnnnnnnnnnnnnnnnnnnnnnnnnnnnnnnnnnnnnnnnnnnnnnnnnnnnnnnnnnnnnnnnnnnnnnnnnnnnnnnnnnnnnnnnnnnnnnnnnnnnnnnnnnnnnnnnnnnnnnnnnnnnnnnnnnnnnnnnnnnnnnnnnnnnnnnnnnnnnnnnnnnnnnnnnnnnnnnnnnnnnnnnnnnnnnnnnnnnnnnnnnnnnnnnnnnnnnnnnnngaaaactggctagaatgcacttcaacttaagtcctgggagctacgctaattcatggagaaccacagaggtttaataggcatttctatacctggatcagccccaaggacagtattaccctgtactgctcttcctattactattttcagtcatttactaatattggggctgtagtactttcacgtgtaagctttggctattcagagctcactacgtttaatcttcagttacctgaatggtgtttaccttctggtgtggatcatcccggccttgtgttagtgctctctct

SEQ ID NO: 17673 - DNA, 887 bp, Homo Sapiens
gcacgaggggttactacttggagtcttagctcatagtgtgtctttatggctttctgcctcactggaccctcttcccaaaaggctttagaatgtgttcaccatcatgagctgaccaacaatttctaaattcctactcagaaacacagcaaggggaatgcagtcaagcacaaagggcttaaatgaccagataaggctgggctggatgaataaagaggaatatcctatgaatgtgactgtgtagttttagagtatcccgattcaactgttatatttgacttgtggccttgtagacagtgtgttaatgtcagatcttctttttcagaactgttttaatcatggacaaacaaagtaagtaatttattttaaatgtttactttcctccttataatgttaatctgttggtaacttgttatttgtcataatgttttattcagtgtctgaaagtgtataatttgttttctgttgtttatgctccagaatacaatgtctagttcagtattttgactatagagaagatgtacaaaaatagcactatcactaggttcttcattaaaaatacgaaagccttttggaaagctaagaaatgctagatttattgggaaatatgttctgtaacatatatttaaaccacaacaatattctctttgtgtattttatatgtataaagattattcaagtcatactaattaacagataataagatttgagttcattgtaataaactcctcagatacacacctcaatgtatatttcatcacagacacatgtttgtattttaagtaaataccagtcattatgttctggctttttttctctcaagaaattctaagtaagatggatatttatcaggcaagtaataaagactgtcttattagatatcaaggttc

SEQ ID NO: 17674 - DNA, 567 bp, Homo Sapiens
gcacgagggccaccgcctccctgggctcctcctaggctgcccctccgactgcaaaggcggctcaagcgcccagaaacccctactcatgatccggaccctgagactcccctaaaggccagaaaggtgcgcttctccgagaaggtcactgtccatttcctggctgtctgggcagggccggcccaggccgcccgccagggcccctgggagcagcttgctcgggatcgcagccgcttcgcacgccgcatcacccaggcccaggaggagctgagcccctgcctcacccctgctgcccgggccagagcctgggcacgcctcaggaacccacctttagcccccatccctgccctcacccagaccttgccttcctcctctgtcccttcgtccccagtccagaccacgcccttgagccaagctgtggccacaccttcccgctcgtctgctgctgcagcggctgccctggacctcagtgggaggcgtggctgagaccaactggtttgcctataatttattaactatttattttttctaagtgtgggtttatataaggaataaagccttttgatttgt

SEQ ID NO: 17675 - DNA, 422 bp, Homo Sapiens
gcacgaggaccacacctactgacaaatccatttcactatcatattcatcggcgtaaataatactttcttcccacaacaatttctctgcctatccggaatgcccatatttggggccccactaccccgatggtacacctggagataaaggccagctggagcttgctcattgctttgtctaacatatataatattattaagtatcatgggaagagaaggcttcacttcaaaagaaaaaggattaatagtatgaaagccctacataaccctggattgatggtatgggaaaaatctacttttaccaagtagggaggattgactatacaaaaatttttgtgcggtggaaggaagtctttgttggaaaatgttgatgctactaccgcatgacctccatgactttttcttttatcctgaatgaactttga

SEQ ID NO: 17676 - DNA, 231 bp, Homo Sapiens
gcacgaggctttttaatcctatttagcttgtttcagaaattctcacttttgttgactgccaacatacaaagtaagggaaactcaagatattaagatggctgtatcagttcttaaaatctgcagagcctggttcaaaatcagtcactcccttcagaagcagacatggcatctgttccttgcttgcttgttggttgtgtacctttcacgagacctgaatttaaaaattgccca

SEQ ID NO: 17677 - DNA, 538 bp, Homo Sapiens
  misc_feature (116)..(126): n is a, c, g, or t
gcacgagggggaacatctgaaagctaccatcttgaaaatttttgaggaagtgtttctgaaatatttaaaaatacttaagtcagtcattttgaacaaaagaaattgatacaataagnnnnnnnnnnnaaggatgattgtctaattttgtaatatgttgttttttaaaaacctgtctgatggtgttttatacatttctaactttttacctgagttatctctttagtcttttggaaaataccctacacaatactaacctttaaaactatcaaatttttgttataagataaatgttatctttgtactagatagcaaccctttataaggttgtaaggtataataaactgcttatttttttacatacttcatatcaagcattttgcagtccaattatatagttgaggatggtgtattttgatatgtatgaagttaatattttcaagtaagcaatcagtctactaccatcagattataagcttttttgtaataataggtacataaaatgtgtatgaaaaatctacaataaacatgtttatctgat

SEQ ID NO: 17678 - DNA, 590 bp, Homo Sapiens
gcacgaggcttcagcaggctccgattttgttgtatcatttaggtgacatctacataatccgatagcagatggctgatgagagcatctcagatagcttgcctgtgacaaacaagacaatatgtggattcagctaggtcaggattgtgtagaatcagccctagaagctgagaccaagacattgctgcataaacaggaggaaaaccactggtattctagcaggaggtctccaggggctgctggaccctccatagtcttaatgataaagcctgccttgtacacttaagcacatgactttttatggaagatgcatacccaagaatttaagtagtgaatttttttcccctcaattactgttggcaatcgaatgtacagttgtcttgttctccctctgccctagtttcctagaactactgtaacaaataaccacagactgggtggtttaaaacagcagagatttatggaggctagaagcctgagactaagtggtgggcagggccatgccctctctgaaggctctcgggaagaatccttccttgcctctttctggcttctggtggcttcagacagtccttggcattccttggcttgaa

SEQ ID NO: 17679 - DNA, 941 bp, Homo Sapiens
gcacgaggctaaagcggaggagaaactgttgagggaacctagaagtaaaggacatctggcttgctgggctccatttaaactttgagtatagcagagacacgagcccttcgggacacatgcctgtcgcagtgacactccaacttcggaagagtggaagccctgattccaaattcaagcatgctttgagtagaaattaagtttgcctctttttgcacaggaagatggccaatctttcctaagctgctcaccttacaagaaaacgaatcgtactgctaagaattcaaacttcagcagtcatggggagccttggaaggagcccgaatcactgatggaattggacagtgcatggagatggttcagcaggacaagggtaagtgcaggggcaagtccaggtcatactgagagacaacgagtggcgctgacagagacagacaaagataaaatcaaaagtttgtgcttcatcttcaaaaactcaaactaataacaaacttggccttatgagaaataataagtatttttctatttacatgagaatttaatctcaaaacaggaatcagaaacatattaagtccagggcataaaacctaaaccactgctcatatttattctttctaaatagagcaaagtgtaaaatcttctccataaaatgcacattgtgcttatgaaaaggccaaagtcttagtgagaatcattggtattccatagaagagtgaattaaacacagccaagggaagactcaagtctcatacttctcttgtatattccagagttccaggggaattccaggtgatagaagtgatctcccatactgttaaagcaaggttgcagacacttggggaattttggtctcagtactctaggaggtcacacctctgtcctgcaaaatactacaggaatgtatactcttcctatgactcattctggtcattcttcagcatcac

SEQ ID NO: 17680 - DNA, 545 bp, Homo Sapiens
  misc_feature (99)..(107): n is a, c, g, or t
  misc_feature (138)..(158): n is a, c, g, or t
agggctctctatcactaggatagactttatctacttcatctgttcctaagtcagcatgttagttctggggaaggatcataagaaaggaaatactttttnnnnnnnnntttggaaacatgtaacaaagcaagggtaaannnnnnnnnnnnnnnnnnnnnagtgctgtgactgtaaaagtgtactttccattaattattagccgagttaagagaatggtcacattgaagtactgtgtggactagaaatgtaccctgtcatcatgcaatgaaatattgttatcgttttaacatagctcatttatgtagaatgaattctggtggtttaccccaagtcacagttaggacggtagatggtgagatcgcagatgcgctattatctagattcagtgttacattttcgatgtttatcactcagtgggtttttattaatatgctgattaagttatttactgggccagtcattgtgctaaatagttgctcttttgtgtttcattgccttgatgtttgagtgtaatctagcattttaatacagtgtttattttgcat

SEQ ID NO: 17681 - DNA, 705 bp, Homo Sapiens
tgagccactgcgcccagcatttgtgatgagtattttccatggatacagaatgcagggatgacagctaaaattattttccattcttttaagataccattctggactcttgtttctgatgagatgttcaccatcattcacatggttcttcccctgtatatgatgtgtcctttttctttgcctgctgtcaagatgttttatttttggtttccagtaggttggctatggtgtgtctagtatgcttttacttattatacttgggaaatactaaacttcttggctctgtatgttgatattctttactgcatttggggaatttccaaatacttgccaaaaattttttctgccctctcttctcctttctttttttggtactccaatttcatatgttggactgattgatgtcactgagattctgttcatttttcttcaacctatttttgttgttgttgttgttctccagattggatcatttctgtggatttgggttcatcttcaagttcactgaacttttcttttgctgtccccaatgtgataggactgtccagtgaatattttagatgctgtattctagagtttccatttttcaaaatatttcttctctctctgctgtgatttccccttaatttcaatttattagaaacataaatgttatccatgaatatatgtacttgtaagagctgtattaaaacttttgtctgcagtctg

SEQ ID NO: 17682 - DNA, 812 bp, Homo Sapiens
  misc_feature (82)..(92): n is a, c, g, or t
gcacgaggcagtctcagaggaaatcccatttaatgttagattgtttggcttttgaaattacttcttatagaagattgcattnnnnnnnnnnncaactttgtgcttctgcatagcaatttatccattcagaccttttcttttagaataaggaaacttaaaatctactttctaaagactgaacaaagtgctagctgcaaattatcttgaaatcatttggctcttttctagcatgtgtgtaatcatgttttcttctgattcctgaatgaccatggtagcattagtgtttagaaattgttcaggggaaaattgagctattttccatagtggctagcaattgctacacatccttagatactcctctctcccataggataaatgttacagcacacaaaagaaattttctcaattctgatttggaaaatttcacaggtgtcattattgtatatctaagcaataattatctgaatgttttggcataaaaaattataatgttctaacttgttttataagttgaatgacttttcagtcccttgattttatattgttgagtgataatcagactgatagtagcaaatctgatcatacattactaaaatagattgctgattgtctatttaacgaagacaagtgggtaacatttaaaatatataatacaaaaattttctctaacttacctttttccagaactacttctttaagcacttttcctattaatgcctattgttgattaaaaggtggttaattctaaccatcttttagtcttcaaagtggtgctatattccatcaagagcaataaagtttttccaggtgtc

SEQ ID NO: 17683 - DNA, 718 bp, Homo Sapiens
  misc_feature (366)..(429): n is a, c, g, or t
cacatcactcaggttttattgaatttataaaattactacaatattttcgacaagcaaaatttttatgacaaaaatatagagtataccccttttggaatttggaaaagaaaaaaatactcacaaaataagtatacatatatttttaaatgaagtttattttcccctgggaaaagaaattctattctgaaactttttcaaaattaaagggtttagttatagcaatcaaaatctgtatttgctattaggtttcaaagttaatttagagactagctttttaaaccaattccattatttccaatttcttaacttctaaacttacaaatttttcacttaaatacccataactacttttgcaaaaatcatttnnnnnnnnnnnnnnnnnnnnnnnnnnnnnnnnnnnnnnnnnnnnnnnnnnnnnnnnnnnnnnnnacatcttataactagctacaataaagacatttaaaaggccaaaaaaattcatgtgcttatgtttctaacattattaaaacacgcaaagaaaagactattttaacagcaattatgctactttctaatgcttgcttatttattgtttaggttaaaaccatagttagggggcaaatgtgaatgataaatactattcaactagttaactgaaaaaaagggaatttttggaaagccattataattaagatagtctttgtatctaagatattaaataacaaagcagtgagtttta

SEQ ID NO: 17684 - DNA, 564 bp, Homo Sapiens
  misc_feature (478)..(514): n is a, c, g, or t
ctttttaatcccccgggctgcaggaattcggcacgagggtgaggatgaggctggcccatggatcctgctctccgatgacaagggagaccatcccccacccccggagtccaaaatacagagtttctttggcctatggtatcggggtaaagctgaatcctctgaggatgagaccagcagccctgcaccctgcaagctagggggagaagaggaggcccaacctcagtctccagctcctgatccgccctgttctgccctccacgaacacctttgtctgggggcctcagccgccccagaggcctgacttaggggtctggttgtggaaggatgtgtggcctcaaatgaggttttggttcccgccttcacagccctcgccaggggtctgccccaatcctggcctgcatcagggcaggacggggtctcagcccgcctccctctctacgtctctgtaccgagcctctggggccagatataagagtgnnnnnnnnnnnnnnnnnnnnnnnnnnnnnnnnnnnnnagctgactgcctagctcctagggctttgtgcaaactgcctgagctcatgt

SEQ ID NO: 17685 - DNA, 922 bp, Homo Sapiens
gcacgaggggtacagccgcgtgatttcccagaagatactttgagaaaattcttacagaaggcatatgaatccaaaattgattatgacaagattgtctactatgaagcagggattattctatgctgtgtcctggggctgctgtttattattctgatgcctctggtggggtatttcttttgtatgtgtcgttgctgtaacaaatgtggtggagaaatgcaccagcgacagaaggaaaatgggcccttcctgaggaaatgctttgcaatctccctgttggtgatttgtataataataagcattggcatcttctatggttttgtggcaaatcaccaggtaagaacccggatcaaaaggagtcggaaactggcagatagcaatttcaaggacttgcgaactctcttgaatgaaactccagagcaaatcaaatatatattggcccagtacaacactaccaaggacaaggcgttcacagatctgaacagtatcaattcagtgctaggaggcggaattcttgaccgactgagacccaacatcatccctgttcttgatgagattaagtccatggcaacagcgatcaaggagaccaaagaggcgttggagaacatgaacagcaccttgaagagcttgcaccaacaaagtacacagcttagcagcagtctgaccagcgtgaaaactagcctgcggtcatctctcaatgaccctctgtgcttggtgcatccatcaagtgaaacctgcaacagcatcagattgtctctaaagccagctgaatagcaactctgaactgaggcagcttccacccgtggatgcagaacttgacaacgttaataacgttcttaggacagatttgggatggcctgttcaacagggctatcaatcccttaatgatatacctgacagagtacaacgccaaaccacgactgtc

SEQ ID NO: 17686 - DNA, 867 bp, Homo Sapiens
gcacgagggatgtggattgggtttttatgtatagacaactggtacttgttggtggagttgaagggtatctcgacgattttggcgtatctttctctcatctccttcacggaaccacagcacagctctatgcactttaagagtgctgactcagaggcatctcctgcaactgcccgcttaagaataggtaggttttcctggttagcctgaaacactgccctgttacaaagacctgcaattctggacagagcaagccaggtagctgaagtcttgtcaaaagagacaccactctgattctctgtcgtatcagcttcatggatttgattgtcaaaccacatgtgggccactgtcatccggttctgagtcagagttccagttttatcagagcagatggtggacgtggaccccaaggtctccacagcttctaagttcttcactaagcagtttttccttgccatgcgtttggcagtaagtgtcagacagaccgtgacagtggccagcaaaccttccggcacattggctacgatgataccgatgaggaagatgacagcctcaagtcaggtgtactcaaggatgagagaaaggatgaagaaagacacacccaggaacacagccacacccgtgatgatgtggataaaatgttcaatttctgcagcaatgggggtctggcctccttccagcccagaagcaagtgtggcaattcttcccatcacagtgcgatctccagtgtagacaacaataccacgtgcggtgccttcaacacaattggttgaaaagaaaggcaatgttcctcgtctcagggggttttcatttgtgaaatctggagacctagtctggggttctgattcaccagtgagcgaggagttatcc

SEQ ID NO: 17687 - DNA, 915 bp, Homo Sapiens
  misc_feature (273)..(286): n is a, c, g, or t
gcacgaggcttagaaatcaggatagcctttgcattcattttggtaagaaaactgatgctgagaggataaattacctaaaaatcttaaaacccaggcaagttagtcaaagaatcaagattagaattcaggtttccagagacagggctcattctaatgcctcaggtcactggcccgaacaaatctgcttcacagaattccttagaaagagatacacaattctttgctgggattgggtccctggaggacaaccatactatattcttgttaatatgnnnnnnnnnnnnnnaaatttaaacttttgttcagttgagatgattgtgaaactaggtatctttcattctgactcctagtttaacatttaattttgactcccaatgagttacgtaaaagcaaaactataactaagaatgggaaaaagaactatttctgcacatttgtaacatatttaagatgttttcttcatataattgaaaactgcagatgagtaagagaatgactaggaaatgagatacagttatatgacacataatgatgttttagtcaacaatgaaccacatatttgacattggtcccaaaagattatattaataatatggtatctttagtgtgcttttctatgtttagacacacaaatactcaccatgatgttacaatagcctacagtgttcaatacagtaacatgcacaagtttgtaacctaggagcaacagggattccatatagcctaggtgtgtagtaggctacctacaccatctaggtttgtgtaagtacactctgatattcacacatgatgaaattgcctaatgacacatttctcagaatgtatttgtgttattaaatgatgcatgactctaattcttttcaaacagagccatatggggcaagggggatggggggacgcaagtcagttgtcaaa

SEQ ID NO: 17688 - DNA, 642 bp, Homo Sapiens
  misc_feature (167)..(294): n is a, c, g, or t
  misc_feature (304)..(340): n is a, c, g, or t
accttaaaaacccccgggctgcaggccgaggcagggatgggtgtgcccatgtgtgccttgacgggacttcatcttatagactgttaaactgtcacacacaaacaggctttccacccctgctctgagagcaccacgcacagatttccagttcttagtgtggctgtttnnnnnnnnnnnnnnnnnnnnnnnnnnnnnnnnnnnnnnnnnnnnnnnnnnnnnnnnnnnnnnnnnnnnnnnnnnnnnnnnnnnnnnnnnnnnnnnnnnnnnnnnnnnnnnnnnnnnnnnnnnnnnnnnccatgtctannnnnnnnnnnnnnnnnnnnnnnnnnnnnnnnnnnnntctgaaatttccatctggggattaacttctgtctttctggtgaacaatatagcaattcacgcattcttcaagcagcaaaagttcccggaacaattagggaagacgtatggtctgaatttatccaggcagtgggtctgctttggtttttgctggaaatttatatcagtgtctgggctcccaagaacataaatgtaattgccaaagcaagcagtgatgtggtgtgtttattttcttttactcatctaggaacttgacgcagctttatatttaataaaataatagagattgcattattttaaggt

SEQ ID NO: 17689 - DNA, 405 bp, Homo Sapiens
  misc_feature (57)..(178): n is a, c, g, or t
ggatcaaggggtcttcccacttcagcctcctgagtatctgggactataggcaccatnnnnnnnnnnnnnnnnnnnnnnnnnnnnnnnnnnnnnnnnnnnnnnnnnnnnnnnnnnnnnnnnnnnnnnnnnnnnnnnnnnnnnnnnnnnnnnnnnnnnnnnnnnnnnnnnnnnnnnnnnngtgtgagccactgaaccctggcccatgagtactctttttcttcctctcggatataaagaaatgatctgaacatccctggaagtattgataagaaagacagcaagatttaagagatcacataataatagtaatagctgacattattaataacatattaatcatgttaataatagtgtggattatggataattatggatattgtgctaacagattatgcagggtctctc

SEQ ID NO: 17690 - DNA, 490 bp, Homo Sapiens
gccattgttaatgaggcagatgactctagaggcaacattttgcaaaaccatccaacagaatgcctcctcatccctaaaggacccagttcctggtccctcaattgcttttcatgtttcttctcacctgaaaacaaaaaatacagtggacagttacctttccatcaaaacacagcatggtagagacggaaagcctgccgttgtctgttgctgtctaacagctgagacaggtattctggtgatgctactgtgcttcttagttacctgaacacattattttttttaactgtattaatggcatatcatatttttaactgttaagtacatgtgtaagtgtaagaaaatgattgcttatcagtagtacatgaattcagagtcaggaataatggtgatgccaaacaaccacagattgtccacatgggtggctgagttagtgacacctttgctttccagtgctcctcgtatataaactatttcatgcacagaattatta

SEQ ID NO: 17691 - DNA, 749 bp, Homo Sapiens
ttcctttgaaaacccccgggctgcaggaattcggcacgaggctggatctgtgggcggacagcatatctctgggtagttggtgcagctgtggcagaaatcaggcccctggggaagtcctgtgacatggatgcttccctgaagcagcagcagtgtgtggctcaggggtcctcagaggccggtggtgcccgcgggtggcacggggcactctcatgggcagcacttggtcttgtgtttacagtattggagggattcacatcgttattttctggattaagctgctaggagtatcatgtacttagaaattcagtgtttatagtaagatgtattaaacattgctaatgatgtatggttacaatgtataacaggttttccattgtcataactgtatggaattttcttggaggatgtcattagcttctgtttgcactgacttgtgagctgtgtgtacgctgtggtcagatttctgaatgctgtagagcacttaccatctctgaccgtgtcttgctggggccagcaggctgcgtgtgcagcagggccagctgtctcagggctgatatgtagacgtgtattctgtttacaattagttccccaactctgtggggaagaacttaagcggttttagtgttttataatatggtgaggcaatgagggtcagggcgcgtggtccctgagggagggtcttcagggcaagactcatggccctggcctggaactgtgctcccagggcgtggtgcctccctaagggatgg

SEQ ID NO: 17692 - DNA, 604 bp, Homo Sapiens
  misc_feature (200)..(227): n is a, c, g, or t
  misc_feature (318)..(518): n is a, c, g, or t
gcacgaggatttcttttcgtcaaaactgagtaaccaaagagaacctaaggatactgaaaagtgaaatgactggccacgcctctatagtgaggtccactattcaaaatgcttcacgcattgcacactgagcttgcattcagtgtgttagtgactgttaattataaatggataattaaagatcatcaaatatttaagacctnnnnnnnnnnnnnnnnnnnnnnnnnnnncaatgcaggaatcataaaaacagtgtttttaaagatataattactacctttaaagaactggatactataaaaagactgagatatcttcagnnnnnnnnnnnnnnnnnnnnnnnnnnnnnnnnnnnnnnnnnnnnnnnnnnnnnnnnnnnnnnnnnnnnnnnnnnnnnnnnnnnnnnnnnnnnnnnnnnnnnnnnnnnnnnnnnnnnnnnnnnnnnnnnnnnnnnnnnnnnnnnnnnnnnnnnnnnnnnnnnnnnnnnnnnnnnnnnnnnnnnnnnnnnnnnnnnnnnnnnntaaaaattaagaatgcttaaaaaatagactatagattagaaagtgagaagactagaaaataaaaataatcagaataaattcagggg

SEQ ID NO: 17693 - DNA, 376 bp, Homo Sapiens
  misc_feature (44)..(99): n is a, c, g, or t
  misc_feature (212)..(275): n is a, c, g, or t
  misc_feature (282)..(290): n is a, c, g, or t
ccacagaaagggtttggtttggggggcccaaattccaaaattgnnnnnnnnnnnnnnnnnnnnnnnnnnnnnnnnnnnnnnnnnnnnnnnnnnnnnnnntaaaccccttgggattttttaaattttcacgcccaaaagcccccaaacccgggggtttttaggccccttggggggcccccagggggaacccgcttttttttgaaaggaaaaannnnnnnnnnnnnnnnnnnnnnnnnnnnnnnnnnnnnnnnnnnnnnnnnnnnnnnnnnnnnnnnaagggcnnnnnnnnntttttttccaggggccaaacccccctttaaaattgggggaccgggaaaaacccgggaaaattttttccaccgggattccaaaaaaa

SEQ ID NO: 17694 - DNA, 264 bp, Homo Sapiens
gcacgagggtgagacaggccacaggtgcagcagaggcatgaacttgcccggggccgacctcttgtctatgatcatggagtgaatgaggggtcagcggactggtattgacaactgatttgtttttctttattttgattctttttcagacaaataccattgtgtggtcatcttgctttagtataatgccaaatcactgtaccccacaaccctggaacctctacactggatggtaatttcttgttcctaatgtgtcttgttggactg

SEQ ID NO: 17695 - DNA, 852 bp, Homo Sapiens
gcacgaggttttagttcattggaaaaggattttatttcaccataaaaatgcaaactggaataaacaccatctttcctaacgcgaacgttacagctatttttaggtatttctgagcttcacttggagaagcaaacgattataaaacaagtttgcagcctgaaatctgtttgaaacattccaagtaaaaataatttagcaaaacagcttcttaaaaaaaccacacacactaacctttactagaaaccaaagcttttaaccaatcttttttatgcttaattccttgacgttgtaaaaagtgaatgtttttgaaggagcatcagaccattttgtaccactccccacataccgacaccttagaaagaacggcccgtttgagttttgatcttaaaggacttgtaccttcctcatccgtgactcaatgtcagcacgacgattcggcatcccacccaaactgcacttcctgatcagttaacattacaaacgggggggaaagaatcaccagggcaacgctttcttttcagtgccagtgtgactatggtggcccgtgcacctcctaggccgtgcacgcagggaggtcgccaagcagacacagaaatccccgtgtgggggaatgcagcagctctgccatcctcacgactgtcggtctgtgcaattttcctgactgagagaggaccggccgcattaaagctatcggatcaagttttaaaggactacgtgtttgaaactgaagtgccaagtacgctgcggtgagtggagaaagatggatctctaaagcatggtgtctttctttcctgccggcgggctccgtggacattcgtggctgcagaaggttcttggctttgcaggggtgga

SEQ ID NO: 17696 - DNA, 797 bp, Homo Sapiens
  misc_feature (327)..(364): n is a, c, g, or t
gcacgaggggtgcgcgctgtgggctgcctccccgtgctgtgtagcgggacggcaggtcatttattggggagggagtggtccctaaacaccttaccagcagcttccattttggcatggaagagtgttctcggcaatggccatttgtcatcactgggaaccagagacacccatccctacgccagcttgagccgtgcactgcagacacaatgctgtatttcttctcccagtcacctgatgagccagcagtatagaccatatagtttcttcactaaattgactgcagatgagctgtggaaaggcgctttagcagagactggtggtggagcnnnnnnnnnnnnnnnnnnnnnnnnnnnnnnnnnnnnnngaaaggatctgaacaggggtcagattattggtgaagggcgttatggttttctatggcccggactgaatgtccctcttatgaaaaatggagcagtgcagaccattgcccaaagaagcaaggaagagcaggagaaggtggaggcagacatgatccagcagagagaagagtgggaccgaaagaagaagatgaagaaacatatgaggattttgataccaggatacttgagggaagcaaagaacagagcagttcaccatgtgcattatatagaacgatatgaagaccatacaatattccatgatatttcattaagatttaaaaggacgcatatcaggatgaagaaccacccaaaggttacggcctccgctgcacagggccatcatcaccatctggcggctcattggcatcaaagacatgtatggcaaggtctctgggt

SEQ ID NO: 17697 - DNA, 809 bp, Homo Sapiens
ggctgcaggaattcggcacgaggggccccgctctttcctccttccagctgctcctgtgctggggcctcccatctcttgctttttctctttggcgttaactgttactcagccctgcaccccaacaaagaaatgcaccctgaaagcctgtggcactaagagcagctcagaacacttatcacacctttctccttgaccctcacctctctggaagattagaagcagaagatttattggatcaacttctcagctgtggaatctgagcaaacagaagggaagtggctgaggagtggactctcctcagccaggggactgccagcaggcaaccaggccagggaagagttcctaatcaaacccatctgggttcagtgtgtggccttggagaattcacttgacctctcgcgtctctgctccctcctgtggggccatgcccacctcatggtcttgggacaattaaaagagatgatgcctgcaagaacttggcccaggccccccatagggtgtgctggacatctacgggaactattacttcactgggaggcctcagaccagctgtatccctggaccagaggtcacagcgctggctaaggaaaccttccatgcaggagtgctgtgagctgagcagtgcataagaaaagagtggttgtgggaatcagcattttaccacctggcagacctgcctgggctgtagcagagcctcccccactcagtggaccatggacaggagggatcaaaggttgaggaaagatattatttcaatcagataatgattctacttcttgaacggaaatgagattttttttcattgcctc

SEQ ID NO: 17698 - DNA, 844 bp, Homo Sapiens
gccgctacggccctggaacggggccatggagaagctgcggcgagtcctgagcggccaggacgacgaggagcagggcctgactgcgcaggtcctggatgcctcatcccttagtttcaacaccagattgaaatggtttgccatctgcttcgtatgtggcgttttcttttctattcttggaactggattgctgtggcttccgggcggcataaagctttttgcagtgttttataccctcggcaatcttgctgcgttagccagtacatgctttttaatgggacctgtgaagcaactgaagaaaatgtttgaagcaacaagattgcttgcaacaattgttatgcttttgtgtttcatatttaccctgtgtgctgctctttggtggcataagaagggactggctgtgttattctgcatattgcagttcttgtcaatgacctggtatagcctgtcatacatcccatatgcaagggatgcagttattaaatgctgttcttctctcctaagttgaaaatcagaaacttgtggaaaagagcacttgaatgttggtactctatgtttggtgaagtttgcttttccccataaaacactccaggaacaactgacgtgacagttgaagaccgttttgtactaagtctcattttgtatactggtaaaaactacatgcttgattaaaccattaaatgcttgtaactttaaattcattatgtgtcattaatatacttttccaaagataagatttttaatcactgccagttgtaaattatttttagccaatttttaaatcttttcaaagcagctttgaaatgtgaatatttaaagggtagacctgtgctgcaagataattaaa

SEQ ID NO: 17699 - DNA, 926 bp, Homo Sapiens
gcacgaggaagtgacgatgccgaagccagcatgatctccaagttaaagcaagcttgcgggttcgagtacacctctaaacttcagcgcatgtttcaagacattggcgtgagcaaagatctgaacgagcaattcaaaaagcacttgacaaactcagaacccctagacttggatttcagcattcaagtgctgagctccgggtcctggcccttccagcagtcttgtacatttgccttgccgtcagagttggaacgtagttatcagcgattcacagctttctacgccagccgccacagtggccgaaaattgacgtggttatatcagttgtctaaaggagaattggtaactaactgcttcaaaaacagatatactttgcaggcgtcgacattccagatggctatcctgcttcagtacaacacggaagatgcctacactgtgcagcagctgaccgacagcactcaaattaaaatggacattttggcgcaagttttacagattttattaaagtcgaagctattggtcttggaagatgaaaatgcaaatgttgatgaggtggaattgaagccagataccttaataaaattatatcttggttataaaaataagaaattaagggttaacatcaatgtgccaatgaaaaccgaacagaagcaggaacaagaaaccacacacaaaaacatcgaggtcctcactcagctgtcctccaggttcaaacctcgagtccctgtgatcaagaaatgcattgacattctaattgagaaagatatttggagcgagtggatggtgaaaaggacacctacagttacttggcttaacccttctggaagggtctgactgtgtgacccgcagcaatagttcatgttggaaagaatgaaaacaactcaagttcatagcagccagcctgccgccattggacctcccttttaaaa

SEQ ID NO: 17700 - DNA, 851 bp, Homo Sapiens
gcacgagggagaagccctaccaatgcaaggggtgtgagaagaaattcagcgacagctcaacactcatcaaacatcagagaacccacacaggggagagaccctatgagtgcccagagtgtggaaagacttttgggcggaagccacacctcataatggaccaaagaacccacacaggcgagaagccctacgcgtgcctggaatgtcacaaaagcttcagtcgaagctcaaatttcatcactcaccagaggacccacacaggggtgaagccttacaggtgtaatgactgtggggagagttttagccagagctcggatttgattaagcaccaacgaacccacacgggagaacggcccttcaaatgcccggagtgcgggaagggcttcagagatagttctcattttgtagctcacatgagcactcattcaggagagaggcctttcagttgtcctgactgccacaaaagcttcagtcagagctcacatttggtcacgcaccaaagaacacacacaggtgagagaccttttaagtgcgaaaactgtgggaaaggattcgccgacagctccgccctcattaagcaccaacgaatccacactggagaaagactctacaaatgtggagagtgtgggaagagcttcaatcagagctcccactttattacccatcagcggatccacttaggagacaggccctatcgatgtcctgagtgtggcaagaccttccatcagcgttcccattttctcacacaccagagaacgcatacagggagaaaaacctttccactgtagtaaatgtaacaagagctttcgtcagaaagcgcatcttttatgtcatcaaacacccatttgatttag

SEQ ID NO: 17701 - DNA, 683 bp, Homo Sapiens
gcacgaggaattgttggaaccactggaaaactgtttgctattgtatccattaaaggttggataggagaagcaaaagcaatgtgggagaaaccaagtaaaattctacaagaaggtagcaagttagaggtctgagaaaaatctctaaccaggttccaccaaggtggtggataagtcagtggaaagctggatctctgcctaaagtcacggtaggatgagaagtagaaacgagcaaaaacaggctagagtgcacatctatctgacctcatcccacactgacaggtgctttgcagaagaaactgctggtacacttttccagagagttgcacacattcctggcctggaagttggaagagcagaggcaggagcgtgggctggtcactgtctcacttaacccaacaagttggcagattcacagcaacctgagaaagccaagggcacgggccccatgttagcctgtttagcataatgactgttactaaacttctaccttctaaatcctgtgtagatttgtctgtgatcaagccattacccagaaccaggtcagacagagaacctgggaaatagttttagcttagctgcattgacacaggatgagaccaccatagttcaccccattgtgatcttgacatctatacatggctctttaaatcatatgtaacttccaataaagaccctaggagatt

SEQ ID NO: 17702 - DNA, 840 bp, Homo Sapiens
  misc_feature (575)..(584): n is a, c, g, or t
gcacgaggtgaggactcaagtgtagcatctcttcctcatcaacaggtggcactgttggccacagccaacggaacgcacattgcagtgcaggtgagtagagatctgggaggaaaggggatcccacggccagagaagtcaacaaggaataaaggggaattagatgaggatcttgaagagaagggcatctgactcaaaaagagcccatttcagaggacagatccctttcctcctgcatccatgcatctgtctcaggctcgctcttggctgaggcagaatgttgaagcctcttctggccttcaggataactccgatggcagtccacctgtggtccaagcccttcatcattttgtgtctctgtttcttcatctggaaatgaaggaggctgacgtagatgatcaccacggttctcttcagccagtccttcctccgtgagcaagtgggtctctctgaccctggctattccagggccccctggccatgcctagcctaataggactcttcatccgtgaacttcatgtttattggagccctactaagtgctcagcgtgtggcactgggtagatgggggagagtcnnnnnnnnnngtaggccacatattactaacactggaatctagcagggagggtctcactgtctccttccttctgcacccccttccccacagctggaggaacagcagaccttagaggaggctatcaatgtggcccactgcggccatgcagcaaggggctgtgaccctggagacaacagtgtcggagagtggctgctgagtccaagaggggctggggtcccacaccatgctgggaggaagtgccatctgcatgggccactcttgccccc

SEQ ID NO: 17703 - DNA, 322 bp, Homo Sapiens
  misc_feature (89)..(129): n is a, c, g, or t
  misc_feature (239)..(254): n is a, c, g, or t
ccttttcagggtcatgtttggggctctttaagaaggttttccggggcctgggaaaaaaacctcaggaggcttttttggagggaaagaannnnnnnnnnnnnnnnnnnnnnnnnnnnnnnnnnnnnnnnnggccctctctccaccttcccccttcctgaaggggccactttttaccgggggggagggcaaaccttttaaaaaaacatttctcccccccttggaaaatctttaatacttgnnnnnnnnnnnnnnnnccaaattaccggggaaaacaggggacaggaagggataacggggtcctccaaaaaaccccctttttccc

SEQ ID NO: 17704 - DNA, 664 bp, Homo Sapiens
  misc_feature (289)..(317): n is a, c, g, or t
gcacgagggccttatcttgaaaagaatctagataggtgcttttaactggggtattaacttttttagaatgacacagctgaacagtgttaataatagtgtgtcaagattgcaaagtcgacatactcatttggtttaagcaggaatcctagaagcaaatggatggggataagaataggtcattttctattcaccatcctttactattaagggaaaggaaaagaacactagctaaggaagggaaagggaagtgatatcataaaagtagcaaccttcattttacattctgtcnnnnnnnnnnnnnnnnnnnnnnnnnnnnngtgctaatttgggaattgtgtactccgaaacaagtagaaaagtgctgtttgagggattttattaaatctttttttaatggaatgtggtacaaattgttcatgttaccaaagcaatatttccctggaatttaattcaaagtttgtggcatacaacctgagccttttcttatataagacaagaatatgttcacatcttggtatgtggccatatttatagaatgctgaactcaatgtgcaagttgtactgtatgcagttttgtaaataagtgaaaataatttgttgtactttttattcaattctgtatagattataaaattatttttattaaataaatattttacagtat

SEQ ID NO: 17705 - DNA, 959 bp, Homo Sapiens
gcacgaggatttattataaatgcgggttccaggattccagaaggtctgattcagggagctcaggtagcaagcagccaggtggagagaatgtagattgtccacagacctcattttataaaaccctggatcaaggaatcaacggagagtgctcaggcaagtgcaggtgagatggggcagtgagtgagggaacggcaggtaggtcatgagtgcagaggcccagatgcaatgtgggcatatggtaaatggccagtacggaggcagatagataagagagaacagatggaactagacttactcaaggtgggaggctatggtgcaaacagccaggaaacagggtagtgcaaggggcaaatcttgggagctgagattaggaatatcaggggatcctgatcttccctgaggaggaggaggcaagcctagctgatgcaagaaaaagctgagaacttgaggagagcagaggcgataaacaggaagtcgcaggaaactcggtgcttgtaagcagctatggaaaacttgactaaaagcggccccataaacttgattttgtattcggccagaagagggtactacggtagcacatatgctgatgtctgggctcggccgcccaaaccgagtaatgccagctcctgtccaatagggttattaacccgacccacagcgcgatattttgggcgattcatttattacttttatagccgtgaatctttttagaaggaactttaaggtttctatttattaaggaatctggggttattttgttttgaactgtgaattcctgtagtcaaaaagaaattaattccacggagtttaagggaattattacccatttattggccatcacttgagggcatggagaggagattaggacagagaggagaaaagacctagagacagaaaagtgcatttgaggcatgacttctgggagtgaattgctgagcccaaaaggttggaaatctatg

SEQ ID NO: 17706 - DNA, 492 bp, Homo Sapiens
gcacgaggggactgcggaattacgagggctggctgttttacaccggtcacattttctattggcagtgactgattcatgggaaagggctttgaaggaactacttcagtgcacacacaaggtacgaacctctcaggcctttcgaagaactttcataattcatgaaagcccagttctgaagattcacgtatccatctggagacctacaggaagaaagtgattgggttcctctggttcttgcctgcttcactgtggatgggaagaggtgacaacctcagtctccctttgggacctgtccaagggtaggcaaccaccttcaccttcacacagattgaggagacactggactttttacccattttctttaatcttcaatattaatattgtgtttacattgatgagaacaagagttaatgccctaccctctgctgggctgtttgtattgagttgcaatgtgaccagcgaaagctgcatttaataaatgaaagtacagac

SEQ ID NO: 17707 - DNA, 915 bp, Homo Sapiens
gcacgaggatcttaatcttcaagttaccatattttccaaatattacatggtacctgagttctgcttccttggatgtcattgcttaaatatagtcttgaagggcttgttttgaaatattgtatatattttttcaaatgtatacattgttaataaattaagaaatgagaaacattcttatttatgtacatgttatgagagttctggaggaagtaatatgttgaaatagtaaaacattttagtttttgagtttaaaatgttattttttcctcttatatcttcatatcaggacagcagtaacctgaatttagattgtcacagtttacaagtttttgtttgttccttctttcctctctcttctcccactcacttttgtgtgttgtttgtttttgcctaatttacatgtttaaagttctacttaaaatttttcttcaagttttacatgtgatggctcattcttctgcagttcaagaattgcttatatttttagaagatactcattttctcttacaaataattaattttttgtaaactacagttaatagttcttctagcttgtaagtgtgtaaagtagaatatgaaaatgtggctatttagataactggccaaaaggtcatatgaccaccagttttagtattgagcataagatatttttacatattcatgtaagacaatgtaaattgtctttctgcaataaattttttggatgcaaatttagatttcaaaagctttttgatgttataaaggagttgaggaacaaaaagctctttgaaatagctcacctagacctgttaatgtaatatattctttctgaataagcaaatttttttgtcttttaagactagaactaatccctcctagcttttttactggaactttggggaaaagaacaaatacaatatacaaatgatatgaaca

SEQ ID NO: 17708 - DNA, 733 bp, Homo Sapiens
acctcctttccctcccatcttctttcattaacccctcctaaggcatgttatttgaaagcaattgagacgcaaccgaactttgcagtagcttggagtaatcttggctgtgttttcaatgcacaaggggaaatttggcttgcaattcatcactttgaaaaggctgtcacccttgacccaaactttctggatgcttatatcaatttaggaaatgtcttgaaagaggcacgcatttttgacagagctgtggcagcttatcttcgtgccctaagtttgagtccaaatcacgcagtggtgcacggcaacctggcttgtgtatactatgagcaaggcctgatagatctggcaatagacacctacaggcgggctatcgaactacaaccacatttccctgatgcttactgcaacctagccaatgctctcaaagagaagggcagtgttgctgaagcagaagattgttataatacagctctccgtctgtgtcccacccatgcagactctctgaataacctagccaatatcaaacgagaacagggaaacattgaagaggcagttcgcttgtatcgtaaagcattagaagtcttcccagagtttgctgctgcccattcaaatttagcaagtgtactgcagcagcagggaaaactgcaggaagctctgatgcattataaggaggctattcgaatcagttctacctttgctgatgcttactctaatatgggaaacactctaaaggaga

SEQ ID NO: 17709 - DNA, 831 bp, Homo Sapiens
gcacgagggttgaagtcccctgcaaagggattccccctgtaaatgtccatattgcatattgctgtgaatatgactggaggttgtaacttacctgaatgtttccctttcctgattacatgccaggtaatactgaaagggaaatgtccagaaaggttgtattggatgctttcagaagaatcgaaccttttcatgaataaacctcctttatttatgaatggacattgtgcggtctgtgacaatgtttataagtgctgtaatctgctaaaatcagtatctgattacaaataaatgaccaaagtatttgtctacaagggaaactccaggacattatgtactttctaaggatcctgtttcagtttccaggggaagattttgaactatttggcatgtaacagttatttttctcctctaacatcttttttccccagtctcataaggaagagagaaaagtcagaaaataatatttaaattgtgtaactagcttattattttcatactaaaaagtaatcactgatagtttttctataggtatgagatcaagggaatcgtttttagaaatcattttcattgtaaaaagcatattaaatgtcttttgccaaattttatctaattagtaattatagacagtatcagtcttattatcctattgtttatgaacaatataaagacctcttaatagtgatctaaaagttttctattgtcactgggttaccttcgaatttctaggcctgttagattatttttgtcgttagcatttaaagttttgctctgtattataaaatagaaaacttacaaaaacaggaggggcacttcatcccttccccactttta

SEQ ID NO: 17710 - DNA, 780 bp, Homo Sapiens
  misc_feature (320)..(337): n is a, c, g, or t
ggctgcaggaattcggcacgaggctaatgcctgattgaagaacagatttagctgaaaacactgcaaaaggagtatgaatactccttctacagcctacaccatccctagctagtctctgctcctctcccaaggagaggaaaaagtttgcatcctaccacctaattcttcctgtttataatcagtataaaattcttagactccttcatgtgggtacccttaggagtgcctaggtctgctctgcttggaaaatgtgctttcctcccatattcattcttctggcctaatgattccagtctcctgagccatcatcgtccttatcnnnnnnnnnnnnnnnnnnctgtagttctgttttccagtcctttaatctttctttttgtttttctaaattagggatcagaaactcaaattcttacagataatgtaaacaaggtgataaggattgtaatgagctggagagtgcccagctaaaggggacaactatttcttagttctggtgaattgttgccgggggggcatatagatcacttgttgccagatcttgagatatatttcaagagaagctaggaatctgagaaattagtgtacagtttctcaatgtttacatgttagtatttaattctgatttttaaaacatagctaggagttgctactgggccataacttggcaacctctaccctatatcttacgtaagtttgaagctgaaaatccagcccgtattaagtatttgacaagggccatatcttctttgtatcctgtcagttacgctccatttctttctc

SEQ ID NO: 17711 - DNA, 263 bp, Homo Sapiens
gcacgaggcaacctccccttttatgcgtaaagggacggctggtgactggaagaattacttcaccgtggcccaaaatgagaaatttgatgctatttatgagacagaaatgtccaaaactgcacttcaattccgcacagagatttaaagtgtctaaatcacacatctgaagaaataagagattgtctgtagttgattgaaacgagggcagttatgaattgatttgggcaatcaaatgaatttataaaggagaataatatgctttt

SEQ ID NO: 17712 - DNA, 587 bp, Homo Sapiens
gcacgaggctcgggtctccagcccggccgggaggagggaccgggtctgcggagcggggactcggggcctcggcggggcgcgcacacgcaggcggggcggcccggggtgcggggcctctgcgcggctgaccaggctcccagagcgtcagcgccgcccatggccgagccgctccagccagaccccggggcggccgaggacgcggcggcccaagctgtggagacgccgggctggaaggccccggaggacgccggcccccagcccggaagttatgagatccgacactatggaccagccaagtgggtcagcacgtccgtggagtctatggactgggattcagccatccagacgggctttacgaaactgaacagctatattcaaggcaaaaacgagaaagagatgaaaataaagatgacagctccagtgacaagctacgtggagcctggttcaggtccttttagtgagtctaccattaccatttccctgtatattccctctgaacagcaatttgatccacccaggcctttagagtcagatgtcttcattgaagatagagccgaaatgactgttgtttgtacggtctttcgatg

SEQ ID NO: 17713 - DNA, 327 bp, Homo Sapiens
agtgtgggccaccgcggccagcctatgatccattttgaatgaattttttatatggtgcaaggtgtcaatccaccttcactttttcttgggaatatagatatccagctgtttcactaccattttttgaaaggactgccctttgctctatcacctttgcatttttgttaaaaagtagttgtcaatgtatatgtgggtttatttcaggactctgttttgttccattgacctgtttttctctcctgaatgccaataccatatttgtatgtagtgtatgtaattttctaataattcttgaaacagatagtattagaaaattacatacactac

SEQ ID NO: 17714 - DNA, 871 bp, Homo Sapiens
gcacgaggctggtccgtgctatttccctgctcccttctcctcacttggacgaagtggggatatcccgaattgaagccgttttaccacagtgtgacctaaataacctgagtagttttgccacatctgttttaagatggattcagcatgatcacatgtatttggataatatgactgcgaaacaactgaaactacttcaaaaattagatcactatggtcgtcagagactacaacacagcaacagtttggatctgttacggaaggaacttaaatctctcaaaggaaacacgtttcctgagtcacttcttgaagaaatgattgctactttacagcatttcatggatgatattaattacataaatgttggggagattgcatcttttatttctagtactgattacctcagtactttgctactagataggatagcctcggtggctgttcagcagattgaaaagatccatccttttacaatccctgctattattcgtccattcagcgtattgaactatgatccacctcaaagggatgaatttttgggaacttgcgtgcaacatcttaattcttacttaggtatattggatccttttatattagtgtttcttggtttctctttggccacacttgaatattttccagaagatctgctaaaggcaatttttaacatcaaattcttagctagattggattctcaacttgaaattttatcttcatctcgaagtgcaagagtccagtttcatcttatggagttaaatagatcagtctgcttggaatgccctgagtttcagatttccatgggtttcatgaccgcttcttgtcacaatatattaagggtattggtggcatggatgggaacacaacagcagatttttta

SEQ ID NO: 17715 - DNA, 855 bp, Homo Sapiens
  misc_feature (259)..(272): n is a, c, g, or t
gcacgaggagattagggaatatcaaaaacgttatggtacgtactctgaagtttatagtatgattacttgtcatcagaaggttttacctctgctcccctttaggtatccattactctctgtgtctcaccatcactttgtgtgcttcacttccgtaatcattaatttcagatacacctctcggtgagggtgaggagagattagattgagcaaagtttagggcttcagatatggtattagcgggtattagaaaatatttgannnnnnnnnnnnnnaaggagggcaggcttgaaatttttgtccagggctggtcttgtgccctaagaaaggggcaaatgacatattcttcctcttgtctatttgtaataaatttggtgactgtattttatttaccagagatctggatatgtgttctaaaaagacataggtttttaaatttgtggttttgggtttgttcattcagcaatatgaggctatcatggaataagtttagatgccaaatattatcagaatgccttagggaaataatagatttcccaagatacttctgatttcaaatattccaacttggaatgtgtgactatcagaaccccagttttctgaactcagttgactctagctacatttgggattagaaaagcttctttgatatagcttagatactttgaattgtgtgacacaaataggtatggtaaacatttaaagatgaacagatattaatgaggaatggtttaattagaggcgcctttccttaaagacacagaatttgagttagaagaagggatggagaagaacaaggagtagagtctttaaaagcaaagaagaatgaatgagcagggtatttgggaagaattgaaa

SEQ ID NO: 17716 - DNA, 609 bp, Homo Sapiens
gcacgaggggttctccaaaaatgagcaaaatataattaaaatgtgtttaggaaaatataattaaaatgtgtttaggttgtgcataaaaagccatccctttctatttccttataactcattaggattagccattgagtattattttaaggtcaacccagtttgtgtcatgtacatgccacaaagcctaagaagaaggttggaaagaggacgtttctcaccatcaaagtgcccacagtttcctcttaagtcaggcactatgcctgactaaacaagatggctggcaaacccactatgataaagatacagtattattggcatttaaggttcagctgaaaggtgtcagcatttttctggtagtggtactttgccttccaaactgtaacaactggatattgatcacaataagtattttacagctaattgaaagccagatgtgatacccatagtttattatctaaaaattacttgcactcctaaattcagtaaattaatcagaatgggaatattctgagctaaatgttaccatcaccctgaatctgagcaacaatattgtatgtcttattgtatgtcttataaggtagaaaaataaaaatctcaatacctactgtt

SEQ ID NO: 17717 - DNA, 869 bp, Homo Sapiens
cctttaaaaaatcccccgggctgcaggaattcggcacgaggcaccgtttaaggtctagatagggtttgctatagggtttgctctgacaatttttaaagcttttggattgttctaacatagcttaagctattggttcctaaaaatcccaaatcaagatctatgtagaatataaaggaagcctgaaccaatccttccacatactgttaagatgtagacttggaacaaagctgttgggacccagagcaatgaatttttgaactgaagctactggtactccccagcaccacctcatactaagaattcctcactctgacatgacagtattttttctgaccaggagctgaaagaccctgacattcatgatccaaagatataagaaattttgatatgtctgcatgcagcacagaactttgaacctaggaggcagtcaataaatacatgagaaattcagctgtcattcagttactcttaattctttataaaactttaaatgataccacatatttgtttgtttaaaatggctttcccaaaatcaaagtagactaaagcagccatctttaaaatccaggatcatcaatgctattaacagtatcaggtaaaaagtacactttaaaatattttaatcaggcagagttttatggatagagaatagaagagaaaggtagtaaatattgaacatattccaatataggaacctatctctgttttagtacaaaatatttctgacatctgaactagaggtcaagagaataaattcatttgtatacatctgagcaacctgtctttcagatgataaagtatctagccttttctgacacatattagttcattttatagggaatagccattaatgtatataaattgctttc

SEQ ID NO: 17718 - DNA, 898 bp, Homo Sapiens
acagttaaaaaccccgggctgcaggaattcggcacgagggtggagacgtggtactcagcaagctcgagttaaagttggatgtgctggaacaggaactgaaattaccattcacttttttaagtggacatattcatgaattgaggattcatgtaccatggacaaaactgggttcagaaccagtggtaattaccatcaatactatggaatgcattttgaaacttaaggatgggatacaggatgaccatgaaagctgtggttctaattctaccaaccgtagtactgctgagagcacaaaatcatcaatcaaaccgcggagaatgcagcaggctgctcctacagatcctgacttaccaccaggttatgtgcagagtctgattagacgagttgtaaataatgtaaacattgtgataaataatctcatactaaaatatgttgaagatgatatcgtcctttccgtcaatatcacttctgcagaatgttatacagtaggtgaattatgggatcgtgcattcatggatatttctgcaactgatttggtgctgagaaaggttatcaatttttctgactgtacagtttgtcttgataaacggaatgccagtggtaaaatagaattttaccaggatcctttattatacaaatgttccttcagaactcgtcttcattttacatatgaaaacctaaattccaagatgccatctgttattaaaattcatactttagtggaaagtttgaaacttttctatcacagatcaacaactgcctatgtttattcgtataatgcaactttggatttgctctttactatggagaaataggcaatttaaagaagggcgaaatagacgaccttatttgtcattactgggcttttccctttcttgaaataatggtcttatcttaa

SEQ ID NO: 17719 - DNA, 902 bp, Homo Sapiens
gcacgaggattacaggcttgaggcactgcacctggccctgaccattttttaaaaaggttaggcttagtgcaaagtttaaaattatatgattcttaaaatactgaattagtttctaaactaaactagaggtataggtggacctgcttgaggtatctttgtttttatggaacatttttattacatgcctttataatttttcattgttcacaccctgtactgaaacctttttctcaaataccaactcttggctatgttaaatttgtagactttaaaagatgttatctaaattaatggtttaaatatacaaattgaaaatattttctttttagtggcaattttaaaagcaggccttaatatgggacctgcttttaaagtaaaatatgtggtactatgaattactaaattgctatataccatgtaatagtgagtatagctaatatttagtatgccttttaaaaattttggactgcttttcggttttaacaaattctccacatgtgaactactcaagaaattttccctttttaattgcctctatagcactcataagagctagggcattaggataaactagaatattttatgtttatgaatacttgtataaacttaaaagtgttttgatttcccacaatttcccaaaggaatgtttatttattaagagttgtgttgataatttaactgttacaatttcagcagttgaattcagtgaacactggttgaggagtgcctatttctaagcactgggtgtaagaagaaaagacacttgcaaaggaagagctaagattaacataatttctttggtttttctattgcttgttattattatgtaaaaactgggtggcagttcacaaggaagattgttgtaacagaagagtgacaaccaatagttttttgatcattaa

SEQ ID NO: 17720 - DNA, 255 bp, Homo Sapiens
gcacgaggctcttttagaaaatcactcaggctcattagcagcgggtagttgatgggaaaatatgtattgccaaggatgagcatgttgctgcaatattactattatatattgttaacgtcatcctctttagagggtaacttgcagaatataaggtagatgttggttacagacagtaattggtattggtaaattggttggttttttttctgtcagggttcccaaggctgtacataatttgtacagtattttataaag

SEQ ID NO: 17721 - DNA, 578 bp, Homo Sapiens
gcacgaggctacatcagaaattctttatgctaactctaacacacattttggggtattgctaatttaatctttgaatactgtttttgctgtttcatgattatatgttatgtcctaccagctagattgccaactcttgactactgactggaagtttattgtttattcagcaaataatgaattaagtcagtgaagtgagagatttcgtgtgtaaggattgttaacttgaacatttcaccagttacacacagttcagccctacttaaattttaaaaatcattgttggcacttgacattgttatgaggatttttgtattttcaacttgtattttgagagtgtcctcatgtgactgaagtatgtgctactcttcttaattgaataaccccagaatctccagaattgataattggaggaaattctactgttggaaagaatggatggattatacagccctgttttttgaccgttcattttgtccttggagtcactaccacttggcctcaaagtgtgaacatgtaaccctttccttaatactttgctacacagctgagcagaaactgtaaatttgggatcctttgtc

SEQ ID NO: 17722 - DNA, 221 bp, Homo Sapiens
  misc_feature (44)..(52): n is a, c, g, or t
aacatttcccccaaagggggtttgtggaaaaacattcaaaaagnnnnnnnnnaatttccataaactttacccgggggttaacgagattttttatacccgttgggaattttcccccccgcaggggttttttttctaggaaagtttaaaaattctccttctggttgaattttccttttaatttccgttccaaaaaatatatggggcttcccattcccccccct

SEQ ID NO: 17723 - DNA, 266 bp, Homo Sapiens
gcacgagggctcagaaaacgtgactctgtgcagatacagggactaccgcaatccccccgattacaacttctccgagcagttctggttcctcctggccatccgcctggccttcgtcatcctctttgagcacgtggccttgtgcatcaagctcatcgccgcctggttcgtgcccgacatccctcagtcggtgaagaacaaggttctggaggtgaagtaccagaggctgcgtgagaagatgtggcatggaaggcagaggctgggtgggg

SEQ ID NO: 17724 - DNA, 223 bp, Homo Sapiens
ccccctttagaatcccccgggctgcaggaattcggcacgaggaaaggtggtaattatttatctggctaagcaatcttgttgattgaatatagctaaatgtttggtggcatttaggctagagaaatactgtattgatatgtgaataaattaaatgtaaatatgagttttaccaccttagctgaaactacatattaatttttgagtttaatccgtaattagtgag

SEQ ID NO: 17725 - DNA, 928 bp, Homo Sapiens
gcacgaggacacgataatgccatatggctggaagttaagggaatttcctaaccacaaggtccaagagtttggattaataatgggcaggaaaagcttcattaacaagagaacagagaacaaaaagcgcacaaggaagtaaaacaaacagatagttctatatagcaaacactccatgtctgccccatctactgtaactcaagttgatgacaggggctgacatgaccgaagaacttacaatcactgaaatgtccaaaagacaagagcaagaggcagaaaaaagaagcaaggggcattaatagttcttacactataaaatcagcccctacattgtcagaattgtcctgtattttcatgtcatccttgtcacaacccactgtgttttctttatacaggtagctttgctcactttagcacaaatattaaagtcaagtacaagcatatactcatttgcatagcaaattttaaagggtgcattgaaatagtaaccaattgataaaggtgtaagtcatttttataattagaatgacattcaaattgaccaaataaaacgttttctatttgaaaacagttacctataaaagtttttgggatatgaacaacacatgacttagcaaaacattaaaaccattacagatgtagttctccgtaggcagcaggtcatgtagcagtcattcttttacaacttctaggactttgtaaacactgttctggaatacagtggtgaagtgaggtttggaattcttcactaagaggttacataagggagttttcccagcattggcaggatcttctacatctcaaatttcagcatactgcaaccaggcttggatcttcttacacaccatgactcttctagaatgtaatagttcacttttaactttatcagttctcgcttcacttcttcggctgctttccgactatacattga

SEQ ID NO: 17726 - DNA, 847 bp, Homo Sapiens
  misc_feature (264)..(294): n is a, c, g, or t
  misc_feature (353)..(368): n is a, c, g, or t
  misc_feature (701)..(729): n is a, c, g, or t
gcacgaggcccctttgtgtgtgtggttcaagtgtgcactgggaggaggctgaggcctgtgaagccaaacaatatgctcctgccttgcacctccaataggttttattattttttttaaattaatgaacatatgtaatattaatagttattatttactggtgcagatggttgacatttttccctattttcctcactttatggaagagttaaaacatttctaaaccagaggacaaaaggggttaatgttactttaaaattacattcnnnnnnnnnnnnnnnnnnnnnnnnnnnnnnntaaaataccagttttttttctctgggtgcaaagatgttcattcttttaaaaaatgtttnnnnnnnnnnnnnnnnctgcctttcttcccctcaagtcaacttttgtgctccagaaaattttctattctgtaagtctgagcgtaaaacttcaagtattaaaataatttgtacatgtagagagaaaaatgactttttcaaaaatatacaggggcagctgccaaattgatgtattatatattgtggtttctgtttcttgaaagaatttttttcgttatttttacatctaacaaagtaaaaaaattaaaaagagggtaagaaacgattccggtgggatgattttaacatgcaaaatgtccctgggggtttcttctttgcttgctttcttcctccttaccctaccccccactnnnnnnnnnnnnnnnnnnnnnnnnnnnnntttctataaaacttgaaaatagcaaaaaccctcaactgttgtaatcatgcaattaaagttgattacttataaatatgaactttggatcactgtatagactgttaaatttgatttctta

SEQ ID NO: 17727 - DNA, 827 bp, Homo Sapiens
gcacgaggcctgtttccttcccccaaatccaccattgtgaagttgccaaccccctgccgccttcccctgccaagtacatgttgtcagagtcagccctataatgttcatttcccctcttgtttgtgggattatggatctctgcagaaatctgcatgccaattaacccatttctaaagcagaatccattttgcatgtcacaatcaagatgtacttggcaatctaagacacactgggagactgtaagaggaattaatatagaaaagctcttaattataataacatttggaagaaatttttcctttgttttgtaaagtggctaaggttgtaggagtgtgtggtatttattaccttttaaatgaactgtaaatttgccttagaaatttgtttaaaaggctagcaagtgagacccttgaggatgatcatatactaataaagattaccaaaagaaacttcttgtcctgttaggtcagtgttatgatttaatggttttaattacttaaccaattttaagaattgacaatttttaaaaatatttttttctaccattctaaagtaatgtcttttgttgtgggtttatgtgtaactacaggattttggaacataaacattttgaaggatagtcaatggtatttagtcttggatataaaaatagagaaaatttatagctttatgttattaaaataatttatcacacagagtgatttgaggttttcgcagagtagatttgtttgactcatggtttattagtctggattacttaagaacaatatgttgattttaatgtaattcccactaaatatataatattgataaatacatgtgaattt

SEQ ID NO: 17728 - DNA, 944 bp, Homo Sapiens
gcacgaggtgaagatgacaaccaggcacaggaaatcattaagaagctggagaagagtataaagtttcttagccagtgtgcagcacgagtggccagtagggctgagatgttgggagccatcaatcaggaaagccgggttagtaaagcagttgaagtgatgattcagcacgtagaaaacttgaagaggatgtatgccaaagagcacgctgaattagaagaactgaaacaggttcttctgcagaatgaaaggtctttcaatcctcttgaagatgatgatgactgccaaattaaaaaacgttcagcttctctaaactccaagccatcttctctacgaagagtgactattgcctctttacccagaaatattggaaatgcaggaatggtggctgggatggaaaataatgatcgattcagtagaaggtcaagcagttggcgtattttggggtcaaagcagagtgaacaccgtccctcattacctcgatttattagcacctattcctgggcagatgctgaagaagaaaaatgtgaactaaaaactaaagatgactcagagctatctggagaagaaacagtagaaaggacaaggaagccaagtctttctgaaaagaaaaataatccatcaaagtgggatgtctcttcagtttatgacacaatagcttcctgggcaacaaatctcaagtcctccatcagaaaggctaataaggctctctggctctctattgcattcattgtactgtttgcagctttgatgagcttcctcacaggccaattattccagaagtctgtggatgccgctcccacacagcaagaggactcatggacgtctctagaacatatcttgtgtcatttaccagactcgacacaatgggccaccaccagtgtgacagcagacatcctaatatatggatcttgattttaggtttcagtatctgaacttcgtaaatt

SEQ ID NO: 17729 - DNA, 686 bp, Homo Sapiens
gcacgaggtttcttcccatcctttgctcctaggattttacatgttgcctgcaaagggagtcaaacttagggggcaggcaaacaaacgagttctttccagcctctgtaaccggatcgctagagcgaaataaactcgcacaagtgtccagagatcgtagccagacagccagcctgcgcttgaagcaacttttaagtgaggctgcaagagccgccgggatgtagattttagttcgtggccaagcacaactacgacaccctgtccctgcccccaccccatccccaagaatgcatggaggaaggagagaggacgaggtgagggccgcctgcatttctgcacgtcggcgccggttagaaaccctgcagttttgagagagaagaagaggagatggaggggccaggagccacgactcccgggagagcgcagggaggggcgtgggtgccccttcgcccacctccgcccccgtcacctcgacagctgtcccgctcttggaattcattggcttcctctacccggcctcccaaacaccaccccaatctagtttagccccccgccccactctcgctgacctaataaggccatgcagtgtgcgggggagctacataaaagcgccgggctcgcggcgactctgcccacggaggggaagagaaagcaggagccgtccagctcggaggaaggcgaccatggcc

SEQ ID NO: 17730 - DNA, 640 bp, Homo Sapiens
gcacgaggcttttgtgtcaatcatattgtatttttgtctaaaaaaggaaaactatcagatttatgtgaaatgtaacgtaatttacatttgatttactgttagtaatgtctctttaatcatgctatgctagggaagtacattatggtctctccctctaagaatatgaagaggaaattttaccttcaacaaacaagcaaacttagttatatttttgtgattttatgctgttttcatattctattttgagatctatttgtcttagcttggaggtggttttgttaaatgtccacgatttagagacggcataatgaaaaaatgaccaagaatttggttgggaatgggaggagcttagaagaacaagaaattggctttgattttatagtgtatggtgctctgttggtagctggacatcatcacaggctttggattgagaagacctgttctggagttctagttctgctactgcctagcgttgtgatcttgatgaagatactcttccttcctgggcttcagtttttgatctataaattgctagtgatggggctggactatttttaagtttgttctaactttagcagtcttaagaattaaggttgcatgccagaaaatagggttaaatatttgtttctgatctggttac

SEQ ID NO: 17731 - DNA, 682 bp, Homo Sapiens
  misc_feature (208)..(216): n is a, c, g, or t
gcacgaggatttaaaaaccctgtccacctgtcaccagcacaagagaattagagcttcagtgagaatttagaaaaattatactaaagtgagatgcattttttctcattttcagcaagactcctctaagcatttactcatttactgtattcctgctctgaagatgtggatacagaattagtcactcttgtcactttatttatttattggnnnnnnnnnaaccatctgtgtacattcctttcatagggtagagttctagttctagaagttcttattttgtttttgttgtaatgtttgaatactatttaatatccggttttaatattgctggatttgctacctttggttacttgtgcagtgttaaaagtaatccactttcttgtttaatataccagatacatagcaaaagcagcttggaataattatagctgtttatttggctgtgctcagttactatattaagatcttgtactgtgtaacagtaactcttttttgcttttcagtaatttaatatgttcacttaacaaaatacgaactttgagatgcactaaagttttgtttcagcagtggctcaaaaaatttcagaaattacttttgtaattatttgcaattaattgttcttttatcttacaattgtttaagcctgtgatctttcttctcccagctaagagttcttcaataaatt

SEQ ID NO: 17732 - DNA, 850 bp, Homo Sapiens
gcacgaggggacctttttgacatcatgtcgggccagacagatgtggatcacccactctgtgaggaatgcacagatactcttttagaccagctggacactcagctcaacgtcactgaaaatgagtgtcagaactacaaacgctgtttggagatcttagagcaaatgaatgaggatgacagtgaacagttacagatggagctaaaggagctggcactagaggaggagaggctgatccaggagctggaagacgtggaaaagaaccgcaagatagtggcagaaaatctcgagaaggtccaggctgaggctgagagactggatcaggaggaagctcagtatcagagagaatacagtgaatttaaacgacagcagctggagctggatgatgagctgaagagtgttgaaaaccagatgcgttatgcccagacgcagctggataagctgaagaaaaccaacgtctttaatgcaaccttccacatctggcacagtggacagtttggcacaatcaataacttcaggctgggtcgcctgcccagtgttcccgtggaatggaatgagattaatgctgcttggggccagactgtgttgctgctccatgctctggccaataagatgggtctgaaatttcagagataccgacttgttccttacggaaaccattcatatctggagtctctgacagacaaatctaaggagctgccgttatactgttctggggggttgcggtttttctgggacaacaagtttgaccatgcaatggtggctttcctggactgtgtgcagcagttcaaagaagagttgagaaaggcgagacacgtttttgtcttccctacaggatggatgtggagaaagg

SEQ ID NO: 17733 - DNA, 856 bp, Homo Sapiens
  misc_feature (174)..(278): n is a, c, g, or t
gcacgaggctttagagtttctcaagttcttttaggggatatttaagcaaaagaaataggagaggctatttgcatctggattttctggagagactcgttgacatctgggcagcatggtggaaaagggtgtcagcattggcattttagtagaaagaggactgggttggggctgacnnnnnnnnnnnnnnnnnnnnnnnnnnnnnnnnnnnnnnnnnnnnnnnnnnnnnnnnnnnnnnnnnnnnnnnnnnnnnnnnnnnnnnnnnnnnnnnnnnnnnnnnngggagtatttttactggccaggaacttcaggcttatgcattggtaaacagaattaggattcaccctgttttcagtaaaatccctttaaatttgaggcctgggtggaactgacaggtggagtttgaaggcacatctgctagctcacataggaaacagaatctcccagggaaaagacataggacctctgactctaactgaggttctggattattatgagagattttcaaaaatggtctaatggtgttggcttgctccataccatagattttaagagacagtagagcttctgcgatgagattcccccataaaataattatggatctgcactggcaagctggtcttggctccaaagaccaagagttggtttgtggtgctgattctgaacccttgcgatgcaactgtctggtagtaaaatggcttttgtatggtaagaaagctttaatcctcgaggcctagacacttttactgcagggcattctctacaggatgacttttagtgggaggtgatgttttctttgttgaaagataattttccaaaaaggataaaatcattaagtgttatataaaatgaacacgtg

SEQ ID NO: 17734 - DNA, 859 bp, Homo Sapiens
ccccatttaaaaatcccccgggctgcaggaattcggcacgaggcggaatgagtcagggtggagaatgagtcagggtggagcaggtaatgggaataagtcagggtggagaaggtaattgaaaaaggttgctttacgaggaagttaagtttaaaagtagaaggcaaagaattgaacatactcacatattgattctttgaagagaaatttagaactcatatctaacaatccctcctcttgcatttccttacagctctttctcttcaaacttctttaacatgtcttggcttagttgttctgcttgatttcccaaaagaagaagcttcactggataaagtggaggatagttaagggaggttttagtaagtgccgtttttatgagcctctgcagcaacccacacgtgcatggtgtggcacagcacctgacaagaataagtacacctattacggctgtgagggaagtaagaattgaggctgttattcttttccatttactgaaccacttttctagccatcctgtaaaggggtcatttacccctgagttgttggctaactcattggacagagagcagtcagaccttgaaatgcctttgttatacttccatcaggggcagtgttgtttgggatgaaggtacaacattgagttttaattatgacacaaactccttctttttctgctaatatcgtgtctaaggctatcctatttttcccaagccatctggctagtggcccctaattgctcagctattcctttaatagcatctctagtgtagttaatagatcgcttttgggtgtaatagatgtattttatccaatttacattttattaattgtcacccaccaaatattgactcaaatcctt

SEQ ID NO: 17735 - DNA, 763 bp, Homo Sapiens
gaattcggcacgaggaaccctcatagcctctgctttactggttgacatgttcttaaagagatgtaacagctctgatttctgttactaaatcacattttcgtcacttatgaaacacaagtttaaaattccttttgaaggtcaaatgagaatatttgctgttactggatgaactgtcaagtgctacccaaatattattttctcacagggattgatatcatgtgtatgtcatatggtcaatgtagcattctcataaaggaaaccttgaaatgtgtctgctgctcatttttgatttttcagctgtttcggtcattgttatttatcatatgcttcctaggggtttttgaattttaatcagaatatgtaaaaaccgaaaagagaaggacaatgaaattgcaagactacagtcataataatttcattgattaattcaattgtttatagagcaagattacattatatttctcccaaaagattcttggagaaattctaagatgatgcacccagtgtttgaaatggctgtaaagttgttgcttaagttagagctaactctttttagagcatgaagatacattaatagtttcatgtattaaaacagagaaataggatttttagtgctagttgctctcaccagaaataatcatagcttttaaactgttctttatgtcaaaataaacttttcattttcctacctcatgttttggatgtggcatgtatttttaaatgcatttttcacccttatgtgcttctgtgagaaactgtggat

SEQ ID NO: 17736 - DNA, 561 bp, Homo Sapiens
gcacgaggcccccttcttcccgtgtcccttgttctccctctctccgggttagagataggtgggtggctttgagtgggcggaggacttcagggttttaggggctcccccattctaggtcatgcctcttgctctcttccttggcctgtgttgagtaaggtgtgttcctgtggtggacgaaagtctgtacgatggttggtggcattggtccttaatcctttgggtctgttttaaggtaaagtgctgagagtttgggaagcaaaaatttctatttattggatttcttttggcttttctctcaagaaggaagtggatttaagagtcttttctttttccctcttcctccatttgcattctttgtgaggtttgtctgccttgtgctttttgtcccggattagtcttgttgaaggatggagattcccaggcgtggagtctatagcttttggcttccattaagtaaaatcgctaacctttttttaagagaaagttaatttttgcctgcagtcattccagaaaaatagtgtacacggactagctgaattaatccacttaaattgtaactta

SEQ ID NO: 17737 - DNA, 911 bp, Homo Sapiens
gcacgaggcagatgacttgtctgcaaagctgtgggatgtgagcacagggcagtgcgtttatggcatccagacccacacttgtgcagcggtgaagtttgatgaacagaagcttgtgacaggctcctttgacaacactgtggcttgctgggaatggagttccggagccaggacccagcactttcgggggcacacgggggcggtatttagcgtggactacaatgatgaactggatatcttggtgagcggctctgcagacttcactgtgaaagtatgggctttatctgctgggacatgcctgaacacactcaccgggcacacggaatgggtcaccaaggtagttttgcagaagtgcaaagtcaagtctctcttgcacagtcctggagactacatcctcttaagtgcagacaaatatgagattaagatttggccaattgggagagaaatcaactgtaagtgcttaaagacattgtctgtctctgaggatagaagtatctgcctgcagccaagacttcattttgatggcaaatacattgtctgtagttcagcacttggtctctaccagtgggactttgccagttatgatattctcagggtcatcaagactcctgagatagcaaacttggccttgcttggctttggagatatctttgccctgctgtttgacaaccgctacctgtacatcatggacttgcggacagagagcctgattagtcgctggcctctgccagagtacaggaaatcaaagagaggctcaagcttcctggcaggcgaagcatcctggctgaatggactggatgggcacaatgacacgggcttggtctttgccaccagcatgcctgacacagtattcacctggtgttgtggaaggagcacgggctgacaccatgagccacaccgctgactgactttgg

SEQ ID NO: 17738 - DNA, 777 bp, Homo Sapiens
gcacgaggctaagatgtattttgaaccagccgaggatgatggcttcaacatgtctccagttgttttgccactccagggcctgactcaaaccaaaataagacttgctgttaccctgagacaagccaactgtcattgctttagcaaccactacggctaccggttgttgcatcatgccaagctctgtgttctttctaactagtagaatggagtgggatggtatcgtgatggtgaacccaaaacaatggtactaggaaggaggttggccaaattcagagtggaggctgaccctgtatctggttgtagcagattcggtcctaggggaacaggctcagcagcagcaaggatgcaaggaccagaaggcagcaggggaaggaaaaggagcaggggataggggaactttaggagcagagtaatgttgataactggcatctggaacctacagtttccagttcagagcagtacaccatactcagtgtatacttacactccaagacatttcctgggcagtgatctagaaatgatatttttaaaaggagctgtgtttcattgttagactgtacttatccaagcagtatcagatagtgtgcagtttttgtagtaaaaggtaaaaatctgaataataaagtttattaataacagtcttagttaatacttgactgacttgacacgcttgatgcaataaggtaaatagaagagaaggctgtaaacacaagaccatcataccctgtgtggaatttacatctaaaatataccaaacatatagagtgagataggaga

SEQ ID NO: 17739 - DNA, 873 bp, Homo Sapiens
gcacgagggaacaaggggccattatcgctctggaggtacttagggagtcaaaagagaggaagtatcatattaattagtacttttatcacatcaaagcctttctctgtctgacatgcaaatgcttctatccagttagtgaaggtatctatccatacttggaggtacaggatgccctttgcctttggcatctgggtgaaatccatttaccagcctttctgcaggtagcatcctattgtttgggtcctgagggaaagaagccatcaattgaggggattagttttaagacaagtcttgcaagcattaatgacctgtttaaccatttgtatcaggtttttacctgagaatgacctctggctaattgataggttttatccttacccaggtggaaggtctagtgaaggctttttaaaagctttccattgattggcagctggtagatgaagcttgtcatcctccaattgtagccatgctgaggactgagagatgtatcccccaagaggtggcccattctatttccgcaggagaatattgaggttttatttctcttatggagccctcccaaatcataaagtcttcaagtggaaccaaaatctggggccctctttctccttatttagctgcttggtctgccaacctgtttccctcagctatttcatccatcctttttttggtggcctttacaatgtattactgccacttcccataggaggaaaactgaggataatagtctactaatttctttgatggtatttaatggggagacctgttagctatgaagagtcctgtctttccagatagggacatgcatatgaaaaactaggaaaatgtacttagaaatctttataatgttaactgcttccttttgctaaactc

SEQ ID NO: 17740 - DNA, 364 bp, Homo Sapiens
  misc_feature (221)..(322): n is a, c, g, or t
gcacgaggctcagttgtgggaatgatgggacccctcaaaatccaagttctagaaattagtcaagggtcaaccttgtaagtagacttttgaaaggatagcagtcatttctgcataatgaaacactgtatcttatatattaagaaagatattaataaaactaatgctactgtagtatttatatgttgtatttatgagtaatattttcataataaaattattgnnnnnnnnnnnnnnnnnnnnnnnnnnnnnnnnnnnnnnnnnnnnnnnnnnnnnnnnnnnnnnnnnnnnnnnnnnnnnnnnnnnnnnnnnnnnnnnnnnnnnnggggggcccggtacccatttccccctatagggagtcgaatta

SEQ ID NO: 17741 - DNA, 718 bp, Homo Sapiens
gtaggacagtaaaagacttagaagctgacttgccttagaattaaagttaaccagcagattttgtgtattcattcaataatcaagtctagttaaattgtttgaagccattttaatgtttaaaaaaatactaaaagaggccattgaatagtcatggaaaaagaaagcaaattattgtttttctttaagtatcagttcatctgatagatgtgggttaccacaaagcattggtggctcaccaaaaattgcctgttggtagcctgtgtttgcaaactgatacctctctatttcatggagtgatatcaattaggttatacttaaatacttcaaatgcttttggttgtctattggtttgggttttaaattagtacacgttaattgttgaattgggtagccacattttgtttgttttatgtatatttaaacaatgtgaccaaaaatactttttccatttgcggcagcaatgtgaataatggaacattgtgaccttctagattctgttagtattacagaataatgtaattaggcgctatgtggaacttgaaaacatacttaatttttgttctggctgtggttttatgctttccaaaatgtggcctgtaacagtttattagtaaatatgctgaattgctttctttggcagtgcatttcagtatggattccaagtaaaacacaatatttacttataaaagtcattggtgtagtaatatttttactatgg

SEQ ID NO: 17742 - DNA, 714 bp, Homo Sapiens
gcacgaggagcagcttggtggattaaatgcccatttacattgttattgacatataaattatctgtgccaaggagacagtgaaggaaagggtttctggggcagtaatgtggtatgtgcctcaggatatggacttgtctttgcccagatttgtcctctgggctctcatgaagcgagtctcagacctaaagtaaaaccccaagacttagctctcatgatgccggcagcagtcaccctcattgcaaaggcagtggtgccgagtgaggttcccgagtggattttaagaagacaggaagacctttgaagaggtggtgctgatttccttggctggcgggaactctgtctggctgttgcatgcatcacttttgtgtgggttattttgttcctctgtggatttggaagcatcgctgaaggagagagaggattttatttctgggaaatggaatcggtttctgagtccagccaacagcagaagagaaagccagttatccacggactggaagatcaaaagagggtaagtggcagaactttgttggttgattggattatggtgctggaattgctaagtgtgattcagagagcataggtggtcatcatcgagcatgcttgtctgtctttctctccggaaggaggtagcatggtggcttgagatttgctatgtctcgatgctgggtgtcttgacttactggtaggcaagaagaaagataaagaaaaggg

SEQ ID NO: 17743 - DNA, 605 bp, Homo Sapiens
gcacgaggccgcaccagctggagcccttggctgatggacaggtgtcccagaccgacgaggaagatatggggatgacatatgcggagctctcggtctatgggaaactcaggaaggtggccaagatggggccctacagcatgttctgcaaactcctcggcatgtggagacacatctgcaccccgagacaggtcgctgacaaagtgaagcggtttttctccaagtactccatgaacagacacaagatgaccacgctcacacccgcgtaccacgccgagaactacagccctgaggacaacaggtttgatctgcgaccatttctgtacaacacaagctggccttggcagtttcggtgcatagaaaatcaggtgctacagctcgagagggcagagccacagtccctggacggcgtggactgaggccggttccttcctggaggcctcctgtcctcggggaccccagcacctcatcatcagcattgctggagccaagggtaggagccctacactaggagcccaggatgggacggcgcatcagccgagagggagggaacttttcagtctaattcctcaaaaagaggctggaataaagcctgggcttaataagag

SEQ ID NO: 17744 - DNA, 242 bp, Homo Sapiens
gcacgaggccaggacaagttagagcactgtttagctcctttgtctgtgtgatagacctaagaactgtattagtgttgtaccagcctattaacctcttgtctgtgcacagcttcaaatgttaccgtctagttagatttttatttaaaatatgaaaaactgcttttcccaagatgttttttaaaaacaaagctacaattttaatatttaacatatttaaagtttcaaagcacacctgtttggct

SEQ ID NO: 17745 - DNA, 817 bp, Homo Sapiens
tccattgaaaaaccccgggctgcaggaattcggcacgaggtttacatgtgggtttctatagttttaattttttcagcttttaagatacgagttttgtgtaatttggtatttttaatcatttatgttattttaaaagctcagaatatcacattgaaattactataaatacatttaaaattatctattttagatctaaggaaatactacagagatattttcatgggttcagtaacttttcattttataacattgggcacggtacagagtgattgtcacataaggtacttgaagatttattagtttaattctatttttacagtaaccttgaattcttctgagttttgcatgtattaaattcaattaatgctgaacatgaagagtaaagtatttatctgaaagaagtttctgggttaggagaagtaatgaatgtatccatttgtacatggtttacatgttgtggatgctttgtaaacattttcctgtatgtttaaattgtgtttcatcaggatgtaattgcccttgtgtgtagttaaaatgagtcatcatctggtcctttgtgaaatggaattcatggtattttctgtaacgttttcctgaagctgtttctggagagccacacatttaaatacagacagctttcctgatcatttgatttattgtgcacctgatttttggtctaaaaggaattattgccacaatatattttatttattctttagattttagccttgtaagtaaaagtggctttacatgatgatgtgaaaagctgtttgtcccttactggggtttgggggggttgttaaagatagggaatgaa

SEQ ID NO: 17746 - DNA, 481 bp, Homo Sapiens
gcacgaggataaaatatagcaaagacaagatgtggtatttggcaaaattgatacgaggaatgtctattgaccaggctttggctcagttggaattcaatgacaaaaaaggggccaaaataattaaagaggttctcttagaagcacaagatatggcagtgagagaccataacgtggaattcaggtccaatttatatatagctgagtccacctcaggacgaggccagtgcctgaaacgcatccgctaccatggcagaggtcgctttgggatcatggagaaggtttattgccattattttgtgaagttggtggaagggcccccacctccacctgagccaccaaagacggcagttgcccatgccaaagagtatattcagcagcttcgcagccggaccatcgttcacactctatgatgaggagattcagactccacagtgtatatattttgccatttattttctaaaaataaacaaaaattgaaggc

SEQ ID NO: 17747 - DNA, 788 bp, Homo Sapiens
  misc_feature (637)..(667): n is a, c, g, or t
tatcagaatatttgaaatttagactgtctcaaaatgtccaaatcaaaactgtatactcttggcttcaatatgactgcctgtggcacgaacccactggcttagaggagcttgattgaggatgattggcagtaagattccacactgaaggcagttgcccctgacaggtaagtggggcagctgcaagcaggataggtggagaaatggtagtttcacacagtgaagtctaaaaatgcctcaaaatattgattttagagagaaacaggaagagggacacatatctagccaactgttcctgaaaaataaaaactgaggctttgactcattggtaggggagaggtagcaccacatttctccaatattttctgtttttttgaaatacttttatacacattctgtcatttgatctctacaataactgtgtagactaggtaattcagttcaataacatttgagcattttctaggtcctagttactgtccttagtactatgggacatgaatatgaatgtcattgttcttttgctacaataataattaccatgtattgggctctaactgcttgccaggcactatagtaagtttcattatttacttttaaaatatatcatcacatttattcctcaaataatgtatgatannnnnnnnnnnnnnnnnnnnnnnnnnnnnnnagacataaagaaactcatgcttagagatattaataacttgccaggtcacatagttaagaagtcatattaacacacaataaaaagtaagacgtgggaactctaacctgggttctgtgacttc

SEQ ID NO: 17748 - DNA, 855 bp, Homo Sapiens
gcacgaggcaccatttgggattatatccacaaaaccacctcaattggaatttatggacccaaatatatccatcccagttttactgttgttttaacagtttgtggacacaattatatgccaggacagcttacaatttctgatattaagaagggtggaaaaaacatatctccagttgtgtttcagctctgggggaagcagtcatttttacttgacaagccacaagatttaagtatttctattttttcctgtgatcctgattttgaagtaaagacagaaggagaaaggaaagaaattaaacaaaagcagttggaagcaggtgaagtagttcatcaacaatttttattttctttagttgagcacagagagatgcacttgtttgatttttgtgttcaagtggagcctcccaatggtgaaccagttgcacagttctctatcactactcctgatccaaccccaaacctaaaaagactctcgaatctgccaggctatttgcagaagaaggaggaaatcaagtctgctcctttatcaccaaaaattcttgttaaatatcctacatttcaagataaaacattgaactttagcaactatggggtaaccctgaaggcagtgctaagacaaagcaagattgataacttccttgaatatttcaaagggggacacaatagctctcctcggggaaaggtaaggtaaaaagctattggtcagtcaaagtgaaagaatggtatgtaggagtctcagagggaagatttggacttgtactctgcaaaaatgtcaaggtgatttcaaggagcagtaatgtttatgtcagatagtgtctttacaaccagaaatcttcttgaacgattgtcctgcctt

SEQ ID NO: 17749 - DNA, 541 bp, Homo Sapiens
  misc_feature (451)..(459): n is a, c, g, or t
acattaaaatcccccgggctgcaggactcggggtattcttttcccatgtgggagaatgatatttctcatccagaactttcccctctggtgatgttggagtactggagtctacaacctggaggtgaatgaatctcctgccttctggggaccctctgtggctcccattcctccgtactgcaagcagccatccggaagcaggtgctcttcacctccgagctcgtcctggtgttcgtgtccggctaggtcttgcctatctgagatgggtgggctggatgggtattatttaaatgcttacctgtctatcctcgaaaggggcggtggggggatcctgtgcagcccctcttcttccagtgtgccctgtgtgctgcccctagatacagcatgttgttgtccttgttaatgttggtgccaatcccttgaaaatgattcagctttgaatagatattgtggnnnnnnnnnataagatatacctgtttttcatcgcttccattgtagaatgccttcatcaagaattaatggtttaaatgggccttttatcatc

SEQ ID NO: 17750 - DNA, 548 bp, Homo Sapiens
  misc_feature (54)..(128): n is a, c, g, or t
  misc_feature (131)..(142): n is a, c, g, or t
  misc_feature (172)..(185): n is a, c, g, or t
  misc_feature (262)..(272): n is a, c, g, or t
  misc_feature (332)..(346): n is a, c, g, or t
gcagttaaaagcccccgggctgcaggaattcggcacgaggttttccttttaaannnnnnnnnnnnnnnnnnnnnnnnnnnnnnnnnnnnnnnnnnnnnnnnnnnnnnnnnnnnnnnnnnnnnnnnnnnggnnnnnnnnnnnnttgggccttccaataattaaaatcttttgnnnnnnnnnnnnnngggccctctgattaaactggattaccccccgggggacccctggggccagcttggttttaccctaaatttccctgtgnnnnnnnnnnnttttttccacccccttttttccttcaccaaaatgcaagttttttccttccccgccccccnnnnnnnnnnnnnnntgggaaagggaggggcggccttctttggcagaaattttttgaagggaaaggggcacggggggggcccggaacccaattcccccaaaagggagccgaattaccgccccccacgggccgtctttttaaaacgtccggaggggaaaaaccccggggttacccaatttaatccccttggaacaaatccccctttccccaggggggg

SEQ ID NO: 17751 - DNA, 339 bp, Homo Sapiens
tccgttaaagaaccccgggctgcaggaattcggcacgaggctgattactactactgactaattgtaaactccaaaaaatgaagaaaaaagaaatatgctagctgaatttggaaggaaataatcatttctgtttagctctgttttagggaagtactgtcgactcaacttcaagcatttgtgtcacttgaggtggttgctttttatggtccagatttatatttccctcactagagtactggacccttttgtcagacggtaaacatggtgtttttgaagccttcatttaaattggaaataggagcatggaggaatattggggcgttttgaaataaacgtgga

SEQ ID NO: 17752 - DNA, 776 bp, Homo Sapiens
caatatgcttatgttttatttatgtaggtggcatttaaaatacatgatgtgtttagggttacattgtccacagaaagcatcaaataccactcctctccccgccaaaaccaaataaacaaagccaactctttggcaacagttgtgtaaaataaaatcccaggtcacacttgtttctggctcccaggcctgggtcactgctacatggattgcgccaaaaaattcccagcttcaacactgctaaattaaaattgctggcatttttaaatcacagcaaagcttttcactttgccctcaagtccaagaggacaaaggaaaaagcaacatgaacggcaaatcttcatgtgaaagggaaggaaagtcactgggagggagcatgcagggaaaaagtcaaggcagccctggaattctactccgtgctcaataaaaacaaaacgtgaagaagcaatacatcatgcaaacgaaataatgaccggaagtgggcgcatctagttagaatgaagtgactttcgtaaggagtcaatgttcgcgaactgaaacatgagttcaacctccttgtgccggcctctggggtgttttgcgcgtgtgtaaataccggcccgtttttctccagcatggcccctaatccatgggacactagggaggggtgccctgagcaaaaattttttggctaaaataattagctaaatcccatgtaaaaattatggaatctagcaaaacctacaccatattttaagttgattttgcactacctgcaaaggatgaaaataaaaaagtaa

SEQ ID NO: 17753 - DNA, 885 bp, Homo Sapiens
  misc_feature (251)..(288): n is a, c, g, or t
acttactaactaaccaaattaactaaccaaaaaagtttccttttggaccattatggacatttaatatgatttctgctttcctggaaatatcaaacattaatcagatccccaaaactaaagtggcattaagcaatgagagtcatttggacaatactaatggtatccagtctactcattattatttaagtcatgtcaattttgagctacattgtcctaaaagttaatatgtaggcatatattacttatatgtnnnnnnnnnnnnnnnnnnnnnnnnnnnnnnnnnnnnnngtgctatgaaagcatatgccagaattaaactgccacattttcttaagttgttctcattgttgatttaattttacatatggttcgaaacagccttttaacaagagaatcaattctaaagcagaagtgtgatgattacttctcctgggctaggttttattaatattataccaattctgccccgacagggagaggaagagggctgaagatgacagaggttaaacagcagagttcaaggaaataaacttattgcaggtggctttaatcaaacttaagaggactggaactgaaggtcattctcctcctctgcacttcaagaggaaatactgcttgaaataaggctcaggctgttgacatgaacatacttagaaaataatattgtatgggaatccaggcatagaaacaaagtgctgtgtcccatttgctatatagcttaagggaaaggctgtgccacattacgtgtctcattgcccataaaaggtagtattactctgctcacaacctattgttcgaatatgcattgtgcctgatgtaaaccatttccctatcaggctgtaaaaagaaatagtacagagatgacaaagaattgtatcatgagaa

SEQ ID NO: 17754 - DNA, 600 bp, Homo Sapiens
gcacgaggcccaccccagcccccgcctgcattattttggaacgagactggtgtgcaggacgccaattctccggaaagcttttaaaatttacctaacactgaaaattagtagttaacgcttggtgattgcttagcactatttgcttaaactttgtaagaggttttcacagatgttatttcatttgatcctcataagaacgaactcattgaaattatcattcaatggtagttgacaaatgcaaaaacctgaatcagaggtattaagctattaaccgaaagttaagttggtaagagccaagtctagaatccgaaacagtaaatttcatcaaaggagactacgttgagaagatgtttggaaagaatttagattggtttcgagttagtggaaagaaaagatgataaattcttggtgagctattaatctgcgaaaactaagcgcggagccttcaggatggaagttcactctgcccttagacgtgtatgatggagggaagatgatgaatcaatcaacagaacttggaaatgtcacaatcaccaaattttactgtcattaaagagaatctctaatcctgtttcactgggagaaaggacaactggcaga

SEQ ID NO: 17755 - DNA, 913 bp, Homo Sapiens
  misc_feature (402)..(410): n is a, c, g, or t
cctataaaaacccccgggctgcaggaattcggcacgaggcttggcttgtactaattgaatggaagtggttaatttgttcagagtttattgccgtttgatgccaccccagtctatagttctgtgtgactttccatattgaaagagtagggttagtagccaggttgtcagtcttttacaaatgtctacataaatgtctacataaatctgaaagtggtttatattcaaggttagtttttcagtagcgtctcctccttattcattcacttttactgtgaagactgaaatccaaaagccaggttccccaaaaaagtatttttaaaaaattttaggggaccaaaataaatagaggaagaccaatataaaaaaatatgttcaactattccattttaaatttaaagcagnnnnnnnnnttgtgcccctcagacctaaaggcagctttaaatgtatatagtttggtgaaacatttgggaaatattaatttggaggtttagaagtatacgaaaaacaaattcaaagcacttgaaagtaaagacaatatcatgaggtcgaaaaaacttcaaaaggatattaggtaagagaaaatgtgaatgaaagcagtgaatttctgcctctcctcgtatttagggtacttaaaattactaaaaaatactgtctttttaccatacagctagatggcctgtattattcttaatgtggccaaaggagtgaagactgattatggttttagaatttggaactgtagtcacataaaggcatcttttgcattttcttaaaccagtaatctacattttctcttggaaatggagaaatatgaaatgcgctgtgcatagcttttggaatagaaaaccaagtttaaaaaaatggatatgttttctggacaacctgtaaatttaattaaaaattaacctcattt

SEQ ID NO: 17756 - DNA, 823 bp, Homo Sapiens
  misc_feature (203)..(233): n is a, c, g, or t
gcacgagggttgcaaataaaaagtaaatacattatttaaaattcatgtctactagctgttttcctgagacacattctgtccattttcaaatgagcaaggcactttgcagcttgccaccaacctggaggtaacttcatagccttttaagcaatatttgtctcttcaatatcttcattgataggagttatatctttacccagagnnnnnnnnnnnnnnnnnnnnnnnnnnnnnnnacgacgtttccgaagagggacacaggagggcgtctgctcggccaccacgaagcggcatctccctttgatgcagtaatgcttgtattgcttggggcacctagagaagtggcctttccgctttgattgtgtggtggtagctgcacagttttcctcagggtctccacagaggaggccattagtttcaggacttctggtggaattcccatctgccaccacacagtgaaggatcactagacccagggcaagggccaggagcagtggcagggagctggcgccgctgcaccgggcggcccggtccatcaaccccgctctgccgggccgggcagcccctagacaagtctccctccttcttcgcccccttcccgggcctcgggcgcctgagagggtgcctggaaactaatcccggaggcagaaggaaacgaaactacttcccaggctggcaccctggctacaaggcagggaaacacccagggcgggaggccggccggctccgtgaatgtcgccgggaggagggagcctcctatttatcccccctcctcctgcacacaccccgccaaagaggcgcggacttggtctggggagcctccacg

SEQ ID NO: 17757 - DNA, 710 bp, Homo Sapiens
  misc_feature (79)..(159): n is a, c, g, or t
tatatatatattatccagccccaaatgtttatggggttgttattgataaaccctgcattaaacaatcccacagtcggtnnnnnnnnnnnnnnnnnnnnnnnnnnnnnnnnnnnnnnnnnnnnnnnnnnnnnnnnnnnnnnnnnnnnnnnnnnnnnnnnnttatttacccaatatttggcgaatcagtgagtgacagcagttgtagtgctagtgggttaaatcaaggaataactgttgggaagtgaaaattttaaggagcacctcctaccaccatgcagttcaaaaacaaaaaataagaaataaagtgggcttgctgagtgctttcatactgcatcatttattgtgcatttgtatgattattatatactttacaaattttcgttttacagtaatttgtattcattcgtttttcaacctgcttatttcagttcagtgtcttgggtagctggagcctatcccagcagctcagggagcaaagtgggagccaaccctggacaggatgccttttcatcacagggcgcactcacacagcacacacacgcatactgggaccatttagctgtaccaattcacctaacgtgcatctttgggaattgagaagaaaccagagtacccagagaaaactcatgcagatatgtggaggacatgcaaaattcacacagacagtgggccctggttgtaaataattgtttttcatcaatgttataatg

SEQ ID NO: 17758 - DNA, 540 bp, Homo Sapiens
gcacgaggcagcagatgaggcacaactaccgcttattagccagtactgtgtctgcagaaatggccaggaacaggcagctaatttgggaactggccagacaatcagaagcacacctggacaggccagttgtccttggggaacaggccagtgcccagcgtgaggttgccagtattctttgtagaaaatcagtgcttgcaataaaccaactggctgcaactgtagaagggacaattagtgtcctacagcaatttaatgaactattagaccatcctctggatcccgggaggtcttgatcacagctggtagaggtggccactcactgttctatgtcttttaggttaacagttctttacataacagtgaagagtcctggtgcctcaggaaaagcaagatcaacctaccaaggaagagttgatggagtcataattttcctacttaacacccactgcaaatttaaatatgtgttctagggctgtttgttaattctattatggtctttactaattgtgattcccagttctgggtgaataaaaagttttt

SEQ ID NO: 17759 - DNA, 740 bp, Homo Sapiens
gcacgagggcccctcgtttaatgagaaaagcgaacactgcggtccttgccaaagtaaaatgaagctgccccaggacaaggggttaccatgagctccctggagtccgacgcgggttttctctctgggggacctgggtggtccccgctgtggtcagtgacctgcacggtgattctcccacctccaaaaggtaggggtgggactggaggcgtccctaggtcaggccgttgagttcgagctccgatgggccaccttgaatccaggactgaccgcccgtgtgtgcacagtttgttcttggacgaggactcgtgaggatcgagggctggggaccccggtgtgagcaggatggggccctgccctcccgtgggagttgtggactcgagcccaggggctgcccgtcacagcggtgtcccaggtccctgccatccgattttacctgggatgtcttctctggagtttggaattgcttgaggaaccctgcgtgtgcttggagaggccagagggcttgctgagaaccccatggacagtggagagcgggattcgaaccaagggctggactcccacacctctggcctgcgtcgcccagttctttgtggctctgaagaattggccgctgtggaaaagagcaaatgtccgagacccccaacaggaagagtctaaaaatccagtttgcaaccacttctgacctacaaaaaaatggaaatttagtgtttttcagcctaagacattaaatttcatatcag

SEQ ID NO: 17760 - DNA, 746 bp, Homo Sapiens
  misc_feature (46)..(54): n is a, c, g, or t
gcacgaggcacctttcgtcctcctgccgagagggcaggcctcgggnnnnnnnnnagagtgtgcacagagaaatgtcttggtcagtgaggagggcagaactgctaaggagggaagcagagtgaggaggccaggtggcttgggaggagagggtacctgagcacaggtagggcctttacctttaacacagagggacgtagagcggggggaactctgagcagggagggtccatgagcctcctcccttcccctttgctccaggcatctgtagtgggagagaggtcagggctgcggtcattctcgagtgcccctgtgaggccgggtggggtgtgcatggcggtcgcgtcacacacaggcgctgcggggcaggcggggatgtggggtgtccacaggtaggcctgctcctccactgcacacagacacccccttctgtgttctgggctccccttcaccgcccttcttccctggggccatgctccccacagctcagcagcccctcagcgtggctgcctggtcctgcacccccgccaccctgtgctccctgctccccagcaggcaggcccatccaatgcatgtttatgggggcaccgctgcccctggaggtgccaggaacctggatccctggatggatagagactgcacgaggcctgtctggcttaatgactggatctaggacagctgatgggccccaatgctgcctctcccataacaagtggacagggtgcctcctgaggggcagccctgggctga

SEQ ID NO: 17761 - DNA, 664 bp, Homo Sapiens
  misc_feature (101)..(115): n is a, c, g, or t
gaaatttaaaatttttattctacatgattttctagtgttgggaatttttgacagtgagcatacatgcccttattacttgcataattctgaaaactattttnnnnnnnnnnnnnnntatatgaaagtctattggtgtttacagcattaatagtagtgaaagtttaacaaaaaaaatctgaaaatctcccaaagttatataaaaacagatctagctgacacactgtgtacctaaaaatgattttggatttcttcacaaaaacctttgggtttttccaaacagcagggttggggggaaaacccccaatactaaaaaacacggggatccctgcagggaatgtgcatccatctgggaaggtaagtggcttgctgaaatctctggaaatggacgggactgcaggaatcaatcggcacgtctccttgatgcacattggggtgtacgacatctcacccacctggtcccaagtgataaaagacccatcccccaagatgcccctgacctccttccggcatctctcttgatgctcagggttcagaacccggcagtaaaggatccaggagatgcttgctgcccaggtgtcatgtcctgcccacaggaatgtgctcacttcagagtgtacatcaatatctgagaagctgctaccactttcatctctggcagaaagga

SEQ ID NO: 17762 - DNA, 936 bp, Homo Sapiens
gcacgaggattaaatttacttttgtacctacctctaagattaatactgttattttctggcatatagggtgtatttatgtacatttctaatagacatgaatttggaaggctattatccactgctaattacaatacttcccattataacaatgacctctggcagatttttgaaaatcctgtggactggaaggaaaagtatataaaccgtgattattcaaagattttcactgaaaatatagttgaacagccctgtccagatgtcttttggttccccatattttctgaaaaagcctgtgatgaattggtagaagaaatggaacattacggcaaatggtctgggggaaaacatcatgatagccgtatatctggtggttatgaaaatgtcccaactgatgatatccacatgaagcaagttgatctggagaatgtatggcttcattttatccgggagttcattgcaccagttacactgaaggtctttgcaggctattatacgaagggatttgcactactgaattttgtagtaaaatactcccctgaacgacagcgttctcttcgtcctcatcatgatgcttctacatttaccataaacattgcacttaataacgtgggagaagactttcagggaggtggttgcaaatttctaaggtacaattgctctattgagtcaccacgaaaaggctggagcttcatgcatcctgggagactcacacatttgcatgaaggacttcctgttaaaaatggaacaagatacattgcagtgtcatttatagatccctaagttatttacttttcattgaattgaaatttattttggatgaatgactggcatgaacacgtctttgaagttgtggctgagaagatgagaggatatttaaataacatcaacagaacaccttcactttgggccaaacatttgaaaaacttttaataaaaa

SEQ ID NO: 17763 - DNA, 427 bp, Homo Sapiens
  misc_feature (193)..(384): n is a, c, g, or t
gcacgagggtatcctacaagtactttaaatttaatgtgttaattaaaaatttctggcaatctttttggtttttgttaaaattatctttatattgtttgtgtaatatattatcattttacaaatgggggacaaaagagatataaagtgacaagtaaatctgtctcctcagcttcacttcttcattctctagttnnnnnnnnnnnnnnnnnnnnnnnnnnnnnnnnnnnnnnnnnnnnnnnnnnnnnnnnnnnnnnnnnnnnnnnnnnnnnnnnnnnnnnnnnnnnnnnnnnnnnnnnnnnnnnnnnnnnnnnnnnnnnnnnnnnnnnnnnnnnnnnnnnnnnnnnnnnnnnnnnnnnnnnnnnnnnnnnnnnnnnnnnnnnnnnnattgctctagttctaatccatagaaataaaattgtttctatag

SEQ ID NO: 17764 - DNA, 769 bp, Homo Sapiens
  misc_feature (234)..(294): n is a, c, g, or t
  misc_feature (348)..(391): n is a, c, g, or t
  misc_feature (574)..(604): n is a, c, g, or t
ccagtttaaaaaaagggcacatttattgctacaaaacgggcatgtacatgacttccccaaataactacaaaggggaaacaggtaagggccttgaccaacctgggtttgtttttgctttgaaggaactccagcacccacccgtgtgggaaccttctccaaatcaaaaataccccaaaaacttgaaaaattcggggccctcccccccacatggaaaacagggggtaactgttaatnnnnnnnnnnnnnnnnnnnnnnnnnnnnnnnnnnnnnnnnnnnnnnnnnnnnnnnnnnnnnaagcgcgcagctagtggtacagccccaaaaattcccccgctgcgacctaccccnnnnnnnnnnnnnnnnnnnnnnnnnnnnnnnnnnnnnnnnnnnnggctacccatacggtttcatctgtgtaaccgatggaaaaataacatctttaaaatagaaaaataaagtaacaaactttcactcatatatgtatccaaaaatctacaaagaaagaaattctcgacatctgacaatctgggaaaacccgagggtaaaagagagtgcttctgcgaaaaatacgccnnnnnnnnnnnnnnnnnnnnnnnnnnnnnnnccccaacagggttgacaacgtctatttatagaaagagagcacaaacaaacaaccttatgaacaagagcccggaccgggaacggggaaaccgcgcgataatatcccccaccgccctaagtgcccacagaaacaggatgagagacgccccacctcaataatttcccc

SEQ ID NO: 17765 - DNA, 983 bp, Homo Sapiens
  misc_feature (132)..(144): n is a, c, g, or t
  misc_feature (573)..(630): n is a, c, g, or t
taagaatttaacttaaaaagcctcgaacattctggtgctattcctgctgtcttctctacattaccatagccagttgctttcattttgaaccagaagcactagcatattattgacttgtagcttcataaattnnnnnnnnnnnnnctagattttgtcttttagaacataggccattttccaggaaagcagctaggttttaatccattaatcttgtatactgtctccaccaccacaattcacataatcctgtagacagtcctgcttcaccctggtcaactgcatgatccttattgtaatagtgaatcagtataacactttagacatgcatacagataacacgctgttgcaagagttcatgatatgtctgctgtccaactagttttatttgcctgatcctactggtttaggcactgcctatagtctcgagttcacagaaatgttgggttttttccctccccaaagtcctcattttttataaactgtagaaaggcaaaatgacaagggaaaaggaattctaagagtgaagggatgattgttatattggggcaagaaccacagagtggctcaggcttnnnnnnnnnnnnnnnnnnnnnnnnnnnnnnnnnnnnnnnnnnnnnnnnnnnnnnnnnnctaccagttttgaacaacaaaaacaaagggagagtttatcctttataattttaatatgtaagaaaaaattacataaacttttcccagaggaatattttataaatgtgcattgagtatttttcgtactgtggtataggagtatattttgtactgttgatgtctgctactgacttagaacaaattgattattgggttactatggagaaaggtggtcttaagaacagcaagggctgagcagcagtaggttggggcagagtgtacagtagaaattacttagtgtggggcctttgtcatttaatatctagctgagtacttaagactctctcaaggtcttgcctatagaaagttgaaac

SEQ ID NO: 17766 - DNA, 795 bp, Homo Sapiens
  misc_feature (461)..(519): n is a, c, g, or t
gcacgagggtaacttcattttattacaacatcaaggaaaatagttgcaggaggaatgaaaatggagagaaacatagagattaagctactcacaattccattgtctataccttcctacaagggtataaatatcacaggtttctgtacatgcattggaggtttgctatgcgtgtgtggattgtgtgtggatgacttctctctagggtgttgttcttttaatttcttgacagatgatggttgaatttggtgttttcaggtggactaggagggggttctcccactaggactgagacccagccttcttcttctggaattttctgaactgagactgaatggccaccgctgcacgttctgtctctggtgcatccatgtcaatgtcaaattcttcttgaactttcctgtaacttctagaaaagtcatccagccagatttaggctcaagcttctttacaaagccattttnnnnnnnnnnnnnnnnnnnnnnnnnnnnnnnnnnnnnnnnnnnnnnnnnnnnnnnnnnncctggtccgcgttcacgttagagttaacgtcctccatcccggccccgctgcctccgccgcccgcggccctctcgctctcgcagcaacaagggaagagccggaggaaagaggcgtccacgccgctcactccagccgaggcccccgcatatagcagggccaggccccgtcgccagggttcccccagcgcgggtcccgaagcaccgctggccacagatgaaccgcctcctcagcgcaggtccgggattcggggaggcagcgccatatccggtctctgca

SEQ ID NO: 17767 - DNA, 399 bp, Homo Sapiens
  misc_feature (77)..(213): n is a, c, g, or t
  misc_feature (307)..(315): n is a, c, g, or t
aacggggcaaaaaaaacctttattattttttaagattgccccttatgctttcttgccaaaagcctttggaacagggnnnnnnnnnnnnnnnnnnnnnnnnnnnnnnnnnnnnnnnnnnnnnnnnnnnnnnnnnnnnnnnnnnnnnnnnnnnnnnnnnnnnnnnnnnnnnnnnnnnnnnnnnnnnnnnnnnnnnnnnnnnnnnnnnnnnnnnnnaacagcaccagcaacagcctctttagcaccagcaacagcaccaaaattccccttaaaaccagggggttttttgggaaaaactttcaggaaagcnnnnnnnnncccgggacccaattccccctatagggagtcgtattacccgcccccccgggccgtctttttaaaacctcgggaggggaaaaaccc

SEQ ID NO: 17768 - DNA, 221 bp, Homo Sapiens
ccattaaaagatcccccgggctgcaggaattcggcacgaggagagaaccctgtccttcaggaatatctggttcaaccagactgacctagggacggatctccttcacttactttgacctgttactgactatttgatacatgcaagaattactcagcctccaacaatttctctcctgtgaaatccatgtaaatgcagatttgcttggtgtcctctaagtggaa

SEQ ID NO: 17769 - DNA, 277 bp, Homo Sapiens
gcacgaggtttccatatatatctcaatgaatgtactgtattactgttttaaaaatttgatgaaataataatgaattggtctccttttgttatctggtccttgtttaatttgtttaagggtttttgtatacaaaagtttacatttttatgtatatttttcttgtgtaaaaactgatgtaatatgtgtatgaaacactgtatgtattatctgtatatagtgtgacaaaatcatttttctttctttcttttggatgtattaataaatcttgctgtgaagt

SEQ ID NO: 17770 - DNA, 338 bp, Homo Sapiens
gcacgaggccatgctgtgtgagaccaggggaccagagggatgggagagtcaagggaaggacaatcccaggaagtcctaagaagtggggcagatggcagggctgaggatgggctctgcatcccccaaagccatcccttccctacttccccaaatgaagggacggctgtgggaccaggtctgtggaaagtggtgcatggtcagaatgggtgcagtttgaggggcctgtgtggaggcctcagggagatgttggactgtgcctggatccttactcctgcattgttctttgccagagacctatttaaaaattttaaaattctcattaaagtcagcttgggttt

SEQ ID NO: 17771 - DNA, 968 bp, Homo Sapiens
ggcactttttatattctcttacctgagttagttttgaattcctagaacatgtccattttaacagtggttgtgatattatttagttaatactactgtctggattattttaaaatcttggtacaatttgtataaaacaacataacacttgttaacttgccagtcctctaggaacttgtttcctttccttactctgaatagactagtggtagctgtccattatcttttaccttaattacgattgtttgaaccacatttaaattccaaaatctatattattggtttaaaagcttcaacttgacaagatattattaacagtctacatgaaatcctcaaattatatatgaattttcaaacattgatatcagctccttgatttactttttaatatatatttttacgtaaaatactaattaaaatgttgttttatcatttattatttggaaaagagcttgaatttaagaattcatataaccagcataattttgaagaccattaagcctttatgaagtcaattcagttaaagttttcgtatatcatcgagcctcaacttaacggtatgaatggaataggaaatttacttgagatgattttcatgataacatttgtggtgattccattctcttggctaagattctagttagaataataattctggaaaggttcttgctggtcatctgctccgtatggcttatctggtatagccttagaggaactatgatggggtagccaaaggggaactcaaggtcttccacccctgtatcaacgaaagtactctaatgtctgttttacatactgggattatttgtaagatttcatttgaaagggagggttctttagaccaagaaagaaaaggaaaaaggttgaaaccaatgacctgctcctatctcttagaaactgaatctcagagagttaacttcaaggtaaagcatttgttagtgctagaggtagatgaaattcaggttttttat

SEQ ID NO: 17772 - DNA, 723 bp, Homo Sapiens
gcacgagggattcttggcttagtattactaataggcaggattgtacaatgagcaactatcagattattcctttcagtggttcttatggcatctaaattactgaataaattattaatccattaatcagtgaatcaaattatgattacaattatcaaatgaatgctcagcattaattgaaaactgttttgtgaaacatgtctacccagaaaagtagcattctataaatactattaaacaacttagctatattatttttaagtattaaattatatgtcaagcagttaaagtgaatttcagagtaaaagtaaggcatgtttctgagcaacattgataatttcttaatttgcaaatttcttcttattttggtacttggaatatagtgtgagattttttatttctaaattttgttgtatcttctattacataaatgcattgacaattataaaatgcaagtgttttttgaatgattttaagaatttggcttaaaaattgattgatacaacgtattatttgtactaagaagtaacttgacccaaaacaccttttatgtttgcttagggtatattttttcagtgtctgaaagtcaaaggtattcctgtcacaactgtaaacaaacttatcctaaatgtgttaaaacatattcttgggtactctatttatgtatctttcatgccttgaaaatctgaaggttaatccaaactcacatgttttagcatatttgag

SEQ ID NO: 17773 - DNA, 519 bp, Homo Sapiens
gcacgaggttcctttttggggtcttggcggccgaccgagaactaatgatcctcaacttctgcctggtgtcgaaggtggtgggctgatgccgggcctccatgcctatgtggtggtactttgtctttgacggatcctgccagctgtttgagtatggtggcagagacgaaaacacatttaattccctgatctaagaggagtgcctcaagaaatgtgcctttgtgtcagataatgcgttcggtgaactgtcctcccccaggaatgccccggattcttctgtcccaagtgttcccaaatttcttgattctgaagattttgtagcgatatttcaactttgaagaatactgcaccgccaaatcattttttgggccttggctggcaaccttcccgaactggtactttgaggtggagaggaactcctgcaatgattcatctatggaggctgccggggcaataacaacaactacttttctgacgaggcctgcatgctcccctgcttccgccaactcgagaatcctcccc

SEQ ID NO: 17774 - DNA, 985 bp, Homo Sapiens
gcacgaggctgttttgtgtatgcttgactgcaagataaatgacaaactagctaatatccgagatttatttacaaatggccagggaccccatcaggtgaaacacatagcccattgtcttagagcttctccatcggtcctgtacaggaggattggtgacctactaacagtgaccctgtggctctgtggaattttgaagtgccttttgtgaatcatgaatgaaacatttaacttgagaccctttaaaaaattcatccagaatctgttaccccttgggtagtttgatggaactgagttaagcagaagaccccagctgttttctgggtaagccaggctttgctgtatctggcagtcaggagagaggtcagcccatggtggaggtcttcagtgccgagggctcggatgagaacgtgtagttctttgacttggacctgggcagcgtcttctatggatgcctgccttgtgagcacccacaccttccctccccactgtcgggttgagtagccccagcgtggctgtgttaggagtcctttgcccaacattgtgctgcactggagcctggccctggcactgtcctcaggaccctgcccaagggcccaccgcagagcacacctatgctatggggagccctgctggcagccccgagagccatgccatggcctgcaggagccaggctcctgtgtggatgaagtccctcttcctctgtgccttgatcccttgggggtgcctttggtcatctcttctgtcctttcctgtctctgaaatagtcatcactccccttgactctctctgttcacgtcttctcagtctgcagagttaacttctgtaggagtttaatctggggttccaagaaacaagttccttgttaacatagcactgactttgcaacaatagaaactaacaaatgagcaacatataaagagtagaggtagttctcattgggtgtaacttcaacccattctgcttgtggttagaattataattttgc

SEQ ID NO: 17775 - DNA, 790 bp, Homo Sapiens
  misc_feature (507)..(515): n is a, c, g, or t
gcacgaggaaggtaagattgatatagtccctgcccttatggagcttatagtctcatgtggtcttagtgaaacaaagtctcaatttgcttttatactagaaataataaagaaagctgccttgctgtattcgatcagttaaaatcagcaactttgtgcttttgtatcagtaaaacatttagttctcaccttttgaaaatgcaaaccactgaagtgatttacagtctcctccatttttggctggagaggtgttctgtttctgtgagacatttttctaatttttgtggaacttcactttcctccttctttgcttatacgtgtttgttagattatattgcaaagaagtcaagttactgatatccagtattttacagaggaagatgactttcaaaactagtcatatttctgtagaggaggaagatttttaaaacctttatcattcagcatttgtattttatggatccccaggagaactaaaaaggagatgactctctaccatagtctggtttnnnnnnnnnttactctgtcagttatttatttattatttaatactaaactccaaactgaagtggctctgaggtaaatcagatatgattttaatttaagtttctttattagcagatctatatggaaggtgaccaatgtcactgcttctaaaatactgtcctaaacaacccagaagattttatttcagctcatgaatagctgttctaaatctgttgtatgttagacatactatgaactacctcttcacttattatggggaagtttccttaataaaagtgtgacgatt

SEQ ID NO: 17776 - DNA, 947 bp, Homo Sapiens
gcacgaggcagataaaataagtatgcttggagttttagaaataaacatttcattggaaaatctttaatgacttagtgtaggaaaacatctcaaaaaaaataagcataatcatttcaaaatttgatattaaaacattcatcaggctctttcatgttccgacgtcgcaggcttataatgtgagtatagagacacagtatcttgggaaaatagaccaaggaaaacattgtgaggctgacactgttgatataagtgtgtttcatgagttgaataattgaatttccaaatttatgaggattaaaaaatgagctatagtgataatacttgtctatattaagtgtgtaatactttaaatatgatgttttggcttttaatgcaattgtgtatggcattcatagccatagtaactttgcagctgatgttcacttaatatattaaatgtcagctatggtttggatatagagttcttcaaagaacacaggatgaagtggaattagggtcactttcataatagcatttttgtctgtagggggatatgttcaaatctttaaaacaatggtttataaaacacatctaacattgtacctgactttctgtgattgaagattcatttacatgaatgtgttaatttaatttttaccttttattataggatggagggtgataaggctcagctaggttgactcttctgtggaaacaacgtggaggatggcctgtgtctggaagtctcagctcaagatgatggtgagtgaagtacactcttctccattcctcctctactaatccaggggaggcattcctgtgaggttgactttacaaagacagaaataccgtgaaatatgttttttaggattcatagcatggaaagtgatacttcttattttgggaggaaaaatcccagcactctgtcttatatttgtcccatctgtacgtatgctcctattcttttt

SEQ ID NO: 17777 - DNA, 337 bp, Homo Sapiens
gcacgaggcccagccccacctgggcgctcgcccacggagccttacagcggggatctgggacctcctgctccagcgacctgggtgcgtacagagccactggggttcggaatccccaaacggattatgcgtagcgtgcttcactctatagtcacaccgggttgactgcagagacgtggggtgtaaaaagaagtttgaagacattcaagtatcaaaaatgatttcccacctcagttgtccttcccggaaaagagaccaagggagttgaagtacatggtctggggctttggatagaagcaacaatagaaatagagaataaaactgaaggcaactaagaaag

SEQ ID NO: 17778 - DNA, 781 bp, Homo Sapiens
  misc_feature (237)..(247): n is a, c, g, or t
  misc_feature (335)..(350): n is a, c, g, or t
gcacgagggttgggtataattctttcttttgcttctctataggtaatgtgtttttttccctctggtttctttcaggatttttctttatgaattcttatagtttgaaaatgatgatgcctaggtggaatgtttatcctgcttagtgttctctgagcttcctggatctgtatttggtgtcttataataattttggggaaattcttagttgttactgtttctgatatttcttcggttccnnnnnnnnnnncttctactgattttcccattttgcatatgctaccccctttgtagatgtcttgcagttcctggatattctgttctggagtttgcagccnnnnnnnnnnnnnnnnctctctctgtttccttttcagtttggaggtttctgttgagatatcctcaagctcaaaaattcctagctttattcagtctgctaatgagcccatcaaagcattcttcatttctcctgcagtgtttttgatctctagcctttctttttggtactttttaaaatttccatctctctgcttacattgcccacttgtgtttgcatccatctagtttattcattaaagcctttagtatattaatcatagctgttttaaattcctggtctgatcatgtcaacatccttgctatatctgtcttgttctgatgcttgctctatctctcaaatgaccttttttgcctttcagtatgcctggtgatttttctttaacagctgggcacgttcctgagtaagaggaaaggctgtaaataggcccttagtaatgtggatttcttt

SEQ ID NO: 17779 - DNA, 930 bp, Homo Sapiens
  misc_feature (155)..(204): n is a, c, g, or t
  misc_feature (265)..(396): n is a, c, g, or t
gcacgaggaattgattggtctatattcaagacattgaataaatattcagcctgtcatttggaaaactctgaaaaagattttgtttttaatgtcactttctagcattattttttgtttgattgtttgtttcttaagtcaggctctcactctgtcannnnnnnnnnnnnnnnnnnnnnnnnnnnnnnnnnnnnnnnnnnnnnnnnnttggggctcaggtgaccctccccacctcagcctcctgagtagccgagactacaggcatatnnnnnnnnnnnnnnnnnnnnnnnnnnnnnnnnnnnnnnnnnnnnnnnnnnnnnnnnnnnnnnnnnnnnnnnnnnnnnnnnnnnnnnnnnnnnnnnnnnnnnnnnnnnnnnnnnnnnnnnnnnnnnnnnnnnnatgagccactatgcctggcctagtactatttattataaactgaatttggctatcagaaattctatacttacatgcctagaaagacttctagaaaattgacttgttaagttttaacagaaaggaagcaaagatattattaatgatgcttctttatgtctaggaaacatgagcacctaggacaaaatctatataaattgacattagtgagatgctaaaatttaaaaaatttaaaccttctgcgttttcagggaaaggatagtagaaagtgcactggggaagggggattggaaggtctggtgctagtgttatctttattgttactctctgtatgaccttggggcaagccacttcatctcagtgtcaaatgaggcaaatgaggggtgggaacagatgaactgtaagcactaaaatcctatgatttttttctcactagatactgcctactctgtgaaggtaacaagtgcctttagaggatttttatctcatttctaataatttggattaatgttgacattgatcttgaagcaatgattt

SEQ ID NO: 17780 - DNA, 929 bp, Homo Sapiens
gcacgagggttcgatacagcgtatttattgcttgtcatgtaaattaaaaaccttgtatttaactcttttcaatccttttagataaaattgttctttgcaagaatgattggtgcttattttttcaaaaatttgctgtgaacaacgtgatgacaacaagcaacatttatctaatgaactacagctatcttaatttggttcttcaagttttctgttgcacttgtaaaatgctacaaggaatattaaaaaaatctattcactttaacttataatagtttatgaaataaaaacatgagtcacagcttttgttctgtggtaacctataaaaaaagtttgtctttgagattcaatgtaaagaactgaaaacaatgtatatgttgtaaatatttgtgtgttgtgagaaatttttgtcataagaaattaaaagaacttaccaggaaggtttttaagtttagaaatattcatgccaataaaataggaaattataaatatatagttttaagcactgcatcagtgggagttcttggcttatgttagtttatgttagtttattatgaaaacatcaaagatttttttgactatattatcagttaaacaaaaaggagtcagatttaatttgttttttgaagcactttgagaaattaattttaattaacttaatgagcaaatttttattactactttatgttcaataccaggttcttttcatttctctggattattttgcaaatcattggacagagaatttgggaatataaatctgtaacaggtgtttgacaccagtaagtctctttatttctgggaaatgtgtacctgtactttctgatatacagtgttcctaagtaaaaatcaattcacgggatttgtatagtgtctataggaaagtagcccatgtcttgaatatgaaaaggaatctgaaggtcatgaaaagt

SEQ ID NO: 17781 - DNA, 827 bp, Homo Sapiens
gcacgaggaaatagaagattatagtaataatatttaggtattcctcaaaaggtgatggggtaaccctgagcaaggttactttcgtatttagtttcctcttttgtaaactagagggaatgatactgtgtgacttctgccctacaaggtgattccaagggtcaaataagatttattatagggtggagtgccttgtgtagagtgtaacagtatatgaaaattgtctctattccgccctctctgttctctcccaacccaattcctcttttccttccctgttgaactccctaccctccctgggttaaaattatgcctccttcaaccattgtaacctccatatacctcagtgtatttagaaccctgagagcgagaccagttgggtccttggtggctgcctggctctttgtctctttgggcaaaaaaggctacaccccaaatgaaaagctttagtcacttgtcaccaaagtctctttgtatctctaacatggtgcggattcacttagaatagtttcactccatatcctgatgatttggtgggaaaagtgaaaacctgctaatacctgcaaatttctgtcaatgcggacaagtcacactattttaagaaatgatggtagggctttagaaatttctaagggtagcagcagaacaccgatgctaacataatcatctcccccattttgaaataaagatattgtcaggggaaggacactggaagaatgttgttaaaatccttggtcctcatctgttttgacccattttatgttttattatcatgggaagactctttgcttctcaaagtatgggccaaatgtgaccgtgctttcatttaa

SEQ ID NO: 17782 - DNA, 502 bp, Homo Sapiens
  misc_feature (381)..(401): n is a, c, g, or t
gcacgaggcagcatggggcctagcactggaagatgcctcaggtgtgtttggagtgggggaaacggaagtagggcacgctctcagagaccaggatagagagtcagggaacctgggaaagagtagtgccagttccgggtaggctgctgcaccaggccctaccagctcaggctataaacagtctgctttgccccaagtcttttccgtccacccccaacagccttgtcatcacttagctactgatcacgcccatggcttgacattggagggttacattagtggagtccgccacagcttcgaaccctctccccagatgccctttgcctctgctgtggccctggggttttatcaactgtccccttcctatcctcctctccaccctgnnnnnnnnnnnnnnnnnnnnnaaataatattttgctatgggggaggggaatatcaaatggacaagatcacttttaaatggtagtttttataagatgttataaacttgtatctttttaccatt

SEQ ID NO: 17783 - DNA, 556 bp, Homo Sapiens
ggtaaaaaatacctttttgagagagaaccactcccaattgcctgtacccttacatacaccccttacttggacattcccactccattggggacataaattacaaaagagagaggagctttttaaacccccttttatttttaaaacccaatctgttgcgacattacaagaatgaccccttcctgcacagaaaaatttcgcatcctacccctatggaagagagaaaaaagtagtttttatgttctctccaaatattggccaaatttaaaggaacttttaatctctgtggctctctgaagcccagggaaaacccgttttggtccttttataatttccagaagacaggggggatctgtggaaaatgaatataaaagaactgaaaggatttaggggcctctttaactgggagtactttaaaatatgcgttaaccacatatatccaacatgcgcagttactaagcccactgtgcgccctaaggaaagcctcggagaattctccgaaaaatcgctggccataccgagaaaagttccctattttcgttttcccgccaaaaaaggt

SEQ ID NO: 17784 - DNA, 562 bp, Homo Sapiens
atgagccaccattctcggcccataccatcttgaggttacaaaatgaatggggactcagagcatggccaaaaacagattatagtggtaagcaggttttagtggcaagacaccttatgggagggggaaaagatgaggcctggctagcataagtggtcttgttaggtagatgaaatctcacaggtagcagccctcagaaagaattgatggtaaatacttcttttcgacctttaaaggtgtcagagcctcagttaattgttcctaaatctaaagagaagccccacataagtgaagattttatccactgatgcaaatctctcccaccaaagacagctttgcagggctacttctgtttgcaaggccctttgaacagctgtctcaaaatatgtcaaagaaggatattttaaggtgaaatatttttatttctttcactaacgtgtataaatacttcattccttttttattgccaaataatatgcacggacataggacattttatttataaagtcatcggtgctgggtaaggtgtcagagccccgcgtcgaatagtggttgactcgccgct

SEQ ID NO: 17785 - DNA, 860 bp, Homo Sapiens
gcacgaggcttctctctgccatggcccttctttattccagggacttagaaacttgcctgagatggtggacgcagtaatgagggcaccgcgcagctcagttagagacggagaaagggaagaggctgggatggtctctgctgctcttgcctctagttcatggagatgtgtctctgttcaggccaagatacagccagccaggcctgtcgtctgggacccaggaggcctctgatgaccaagggctttcacatcctaagtcatttggaaggaggccttgagaacaaagtcacctttgtcactcccagtgaactgaatgaggaacatgctgtctcctgtcttggcctcccctttcatgagatactggggagaagagaacattcctcctggcttagttgtagcagacccagacctgtgcccagctttggtcccccttcccaacttctgaagcacgtgctgcagagccaccttggtctgagcacctgaggaccagcccctcctccctcagtgcgggtcatctcttgggggattttcttaaagtgaagaaagggggtggggaaccatattgcccctccctcccccatcaaacttccttcatttaacttgctataaaatgagtcatataaagaaactctatatgggtgaggtatatcctacttctgtgaaaacattacaaatcaaaccgcttctctcagtttatttaagatgcttttgttgcgagcggagctctagagtgaagcctcctgtgtgtgtgtgagataataacaccttgtaactcattacagctgggcactatttacataaaccagagctgagccaggcaggaatttgctgattaatttatttttaatggagtgaagtatacc

SEQ ID NO: 17786 - DNA, 647 bp, Homo Sapiens
gcacgaggtggagaatgggtcagaagccccaaacggcacacactttccaaattaaagtgggcaggggctgcttttagcagctgctgacctgcagatttgtcaaagccagtgactagagaaggaagggagaaaggctggctgttggcttgctctgagctgcaaggatggtctctaactgattaactgtgagcaggtgggcctgtgtcttcaggtgctttgccaaactcttaaaagaaagtgtccagtgaacttggaagtgggcccctgagctgagcacagggccaaagcagccatggcagacacctgacggagggcacggggctggctgacactaagtttggtgggacagtgaggggtgggaggggggtttccagggcctggtgttggagagtgcagagaaatatctacctccctggaggtgtgaagactaggtttttcttcttccttccaattagattttccttaattatagtgatgtcttccttattcatttttctctccctgcctctcactgccataagaatatcatcctgggggcagtccagacgcagccctttgtcatcctttctgttttgcctagtctcagcagactgtgatcacaaggcattgtctgtgggatttttcctttccctttcttgatctctctt

SEQ ID NO: 17787 - DNA, 574 bp, Homo Sapiens
gcacgaggctaatttctaagcaaggccagtgtcttccaatgagctcagggtgggaaaccccacgggggttgggctgtgaactgtaccaggtggcccaagctgggggtccaaaaagacagatccacatctcaaatccactgaactctgggaatccctgtgatgacctgagacctgcatcatcactgcccccaataatgttgtaaacatgtaaagaaactgaatccccaaaaagcacactttcaaaagcactacacaaagcagtctgaacctttcttctgaagaaggctgctacatctggcatcgtcttacaagtaaatccaacccgaaatgaagttctttggagaattcagaaactcagcccttttgaacccctgccttgcgttgaatttcaagccaagtttacaaccaaattctgaagtatataaaggacttttaaagacccaattggtatttttacaattgaaaacctgcataaattgatcatgaacccaaagaatgaataaaccccaattactttcatcactctaaaccctgcccgaagctgaaaataaaaatccagttctccacaaaaaaa

SEQ ID NO: 17788 - DNA, 840 bp, Homo Sapiens
  misc_feature (641)..(724): n is a, c, g, or t
gcacgaggcctgagttccccaagccactacagcaaattagtggaacccaaggagggtgtcgtgggaaccccaatttataaacagttcatcagaagcataggtaaaatgacccggggcttgtgattggcatcagaagtagtggggggcaattttgtgggactgaacccttaactgtgggatctgacaccatctccaggtaaatagtgtcagaattcacttggaggatacccagctggtatccactgcagaattgattgcttgcttgttgctggggagaaatccttgcacatttggtcactgaagtcttctgtgttgattgttgaataagagaatagaaaaaacacttagtgtttttctgttcacagcctccctcccctcccaagtctgtcacaaacccagaaagttgttaatgatcctcttagccccaaagtgctcacaatgaattctcacttatttttttgttctatgcagttagcattcatcctgtattttgtctttgttattcattatctttgcgtttatcattcccataaccatagtgtacatttcttggtgactggcctaggttatttaagtcttctagagatcatgcaaaatatcttaaatattgtacatattccattgctataatttttaagagnnnnnnnnnnnnnnnnnnnnnnnnnnnnnnnnnnnnnnnnnnnnnnnnnnnnnnnnnnnnnnnnnnnnnnnnnnnnnnnnnnnntcatggcaccttggtagagccaagcaagtaattgtggaaggaatggatgatttattcttctaagataacttgattaacataatgcctagtggttttatgggctctagtagaatttt

SEQ ID NO: 17789 - DNA, 809 bp, Homo Sapiens
  misc_feature (281)..(325): n is a, c, g, or t
gcacgaggcatgttttttaaaagaaataaggagcaagcgactgccctgctagaaatcacaaaccgatttttgtagaatattttgtgccccaggcattaatttcactgactccagaacctgcagttcagagaatgatttcttatgatgataaaaatcgaatgggatcagacgatgtttgcatttttttaatacttgaataggacacctcaagtttgagatttcattttcttttagaacacagtcacaagattaatctggtgaatccttttgtcacagttctnnnnnnnnnnnnnnnnnnnnnnnnnnnnnnnnnnnnnnnnnnnnnaaaactgaatggtcacatttaattgctttttggaccattgaatagttgggaagtaagaattttttaattggcatgagacggttcctcaactgttaaattaaccaactttgacctgtctttagaaaaaggcttatttgtatgattttgggctaactccccggggaccatattatatgacaaaaatgctcctttgggtgacacaccctacaaagtatttgctgttacgaacataaacgcccacattcttaatatctaatatttttgaccagtgatgttttatgctgtcatctgaaccctagagaagcagtgtcagaggaaaccttggtgtcacatgtgtcttagcaaaagggttaccatgatcgagggtcatgtgaccaaaagatgctccagagaagcttgagaatttgtttcagttgggaggagggttggagatacaaaaatcactctgctctacaggactcttcagctgtctatgcaagaaatt

SEQ ID NO: 17790 - DNA, 933 bp, Homo Sapiens
gcacgaggtatggatgagactgtggcctgtatcagtaggatgagaacgtggcctgtatcagtaaatactttatgttcacttaagattaatgcatatccttctgttgtttaatggagtattctgtaattgtcaggtggataaagttaattgatattactgtccaggtcaactatattcttactgattttctgcctgcttgatctatcaaccactgaagaagtgttttaaagtctgattttaatcatggatttgtctatttctaatatcagctctatcggttactgtctcatgtatttttatacttattttgttaggtaaatatattgtatgggttattatatctacttggaaaactgacccttttatcattatgtaatgcctatctttattcctggtgatcttcatttttctgaattttggctttgtctaaaattactactactatttcagcttgcttttggttagtgtgttagcttgatgtttttctctttatcccgtttactgttaatgtaactaggtatttccatttaaagtgggattctgattcttataaaatacatggttgagtcttgtttttttcccccactctgacaatcactgttttttaattgacttgaagtgattattgaaattgttctatgtttgtaactgttttctatttattacatttattacgtgttcttcccccacccatcatttttatgcctcctcttaagtaaaaacttactatttcaattttatctcttctctaagcatatcagttgtacttcttttaagattttttagtagtttccctgaagtttacaatatacattcttaactaatttcggcccatttaaaatactctaccatttcagtacagcacaattacttgataatagcatattttcaatttcttcctcccatctattatggcattactatcattcattt

SEQ ID NO: 17791 - DNA, 617 bp, Homo Sapiens
ccccgggctgcaggaattcggcacgaggctaccatcttcattactcatcatactattaagtttaatttttaagccttatatattaaattaatttcttaattttataaaacaatgcatagcttctgtcaaacttatgtatcttaagactcaatataacccccttgttataactaaggaatcaacgtttttattccccaaaaacacaagtgaggaatgtaatgcccaacctggtttttactaactctgtttttagactctcccttttcctttaatcacctagccttgtctccacctgaattgactctcccttagctaaaagagccagacagactccatcttggctctttcactggcagccccttcctcaaggacttaacttgtgcaagctgactcccagcacatccaagaatgcaattaactgataagatactgtggcaagctatatccacagttcccaagaattcgtctgattgataacgcccaaagccccaggtctatcaccttgtaatagtcttaaagcccctgcacctggaactgtttactttcctgtaaccatttatccttttaactttttgactactttacttctgtaaaattgttttaactagatccacccc

SEQ ID NO: 17792 - DNA, 1110 bp, Homo Sapiens
aagaacccccaaaatttccttaaaaaaaattccaggccccaagggtttccgggtaagcccatttggaccccaattttattcacgaaaagggcaacattttcaaagtggggggaaaactttcttttcaaattttatagggggggccctttttttaaaatgaccaacttagaaaagaaaaccgagggcacaaaaaaattcctgctttccccacccagaagaataacgccactcttgaaaaaatttaacaaaaaggggtggttaagaaatggtcgcaaatctccgtcccctccgccagagatgggccctttcccattccaaaataatcttttttggtggggctttccccccacccccggggagatggtaattccggggtttaaccaacaggggaggttcatcaccccggcctttggaagaggaagcattaaaaagaccaagccaattcccttgcggtgagttccctcactttcactaggggtgatgaccctgagaatgggccgtttatggcaaaaaaccccagggacaaccgccaaaggtccgcggcggggggcattggagagaaattgaaaattaccagtgggattacttcgcacttgatcgaacctaattctcaccttctaagctacacgatctgcctttattagaaacaaaataaccccagaaccgttggtgaacactccccccggtaaaaattgatgagctcgttcactctataacatgaataggtgctgcgaccacaatttgcgagggcagaggaggtgtgaacccgtaatcactctctggtcctattcccaagtgcggagcgagttctcaccgctcggatggcctctccgaaaaattcttcttttttgtgggcaaggagttgctggatgattcactcctgtatgcgcaggtacacaaacacacggatttgaaaagaggttttggtgaaacgggacctgtgttggtttccctgcaccgaattatgtcaatttccggcccccggaccctgtgtaaacaaggcccctttttttcaaacccccaaattaattcccttaaaatcgacaaatgtaaccgttggcttttaaaaattggggttgtcctacaagagaagaaaacacaacttttttg

SEQ ID NO: 17793 - DNA, 770 bp, Homo Sapiens
  misc_feature (98)..(147): n is a, c, g, or t
gcacgagggaaccatgctctctagtggatgatgccccattcacacggcaagtagagactcaagtttagtgaactacagatgtcccattcaattaacannnnnnnnnnnnnnnnnnnnnnnnnnnnnnnnnnnnnnnnnnnnnnnnnnaaattgattttacagttttgtcagcattcaaacacagttaaatttttggttataaaataatttaagaaaacagatactttctagtccctaaggatgcatataaatccttggccttcagctctctctcctgtcatgaaggcagagaggtagaagtggccctctctaccccagcacacgtttccagtgatcttttaaaacttattttccatttcaaggtgaacatggtgttaattttaaactgatttgatatgagtgtattttcagtagagaaattggcccagtatgtaatttttgtggagttcaacacaactcagataaggcaatataaattcatgtagcaaaagtaatgaatggacaaccaaaaccaagcatcacacaaaataagtcaggtagtaagtattaagaaactgtagaaattttaacctgtataatggatattattttgtttctgcaaataataattatcatttattgagcatttattgtcacgcaaatgcctgtgttatctttctgaagtataggtattatctcactttacagagaaagaaactgaagttctcaggtctctgttaattttttgctcagagtaacatagagttcaaataatgtttctggggattatc

SEQ ID NO: 17794 - DNA, 365 bp, Homo Sapiens
gcacgaggggccaggccgccctctaagccagcagggagctgggagtccctgtaaacgacgcctcaaaagctattgcgccagagagggccacgggggctccggaagccagactcggcttttgccccctcctggcggctggttgcgaccccccggcgccagcccccgactccctgggagacgtcttcatggaggtcaccggaacgaagagctccccgctccctgccaccaggcccggagcggccccgcagggaccctccccagacggcctggaccgccaggatgtgcactaatatgtctcagcccttctacctgcaccagcttcccacagctaccggatagccacggccccctggcggcctctctct

SEQ ID NO: 17795 - DNA, 655 bp, Homo Sapiens
gcacgaggccaaacattactgagaagtgaccataggtatttggcatgagtaaatgtagttccttttgccaaaaaaactctcaaaagttacaactggagttcttcgcgataaaaggttggggaaatcagccatggctttagccttgttcccaagtacacatcttcttatccacaaggatgaaactctgtagggctcaccctgagggctcatgtgtggcattgagagggtagcagtgaccagaacaccacaaggcccacaagatgttttgaatgagggaacatttaatgtcatttgttaggagatagaaaccaaataataaaggacaaggaccacgctcattccgtggagaagaggtgaactccctctgctgactatttggaatggactgaatgaggaggtctctccagccagaaggagtattgaggtcatcaggcctcagaaaacaatgtacacataatctcgggctgtgaacaagagaaaggagggggggaaacatgaaagtcaatcttaacaatttttgcaatacctcttatttgcagaccattggatttatgttattgcactctcggtgtgatttatcgtatgtatctgataggttttatgaattgttttgagttgtaaactcctataccctttattaaaatggacctaatta

SEQ ID NO: 17796 - DNA, 745 bp, Homo Sapiens
  misc_feature (408)..(419): n is a, c, g, or t
gcacgagggagattatgatcagagtaaaaggtaattacacattttatttccagaaagtcaggggtctataaattgacagtgattagagtaatactttttcacatttccaaagtttgcatgttaactttaaatgcttacaatcttagagtggtaggcaatgttttacactattgaccttatatagggaagggagggggtgcctgtggggttttaaagaattttcctttgcagaggcatttcatccttcatgaagccattcaggattttgaattgcatatgagtgcttggctcttccttctgttctagtgagtgtatgagaccttgcagtgagtttatcagcatactcaaaatttttttcctggaatttggagggatgggaggagggggtggggcttacttgttgtagcnnnnnnnnnnnnacagacttcacagagaatgcagttgtcttgacttcaggtctgtctgttctgttggcaagtaaatgcagtactgttctgatcccgctgctattagaatgcattgtgaaacgactggagtatgattaaaagttgtgttccccaatgcttggagtagtgattgttgaaggaaaaaatccagctgagtgataaaggctgagtgttgaggaatttctgcagttttaatcagtcgtatttgtgattgaagctgagtacattttgctggtgtatttttaggtaaaatgcttttttgttttgtttatcatttacctgaaatgctatgctgttga

SEQ ID NO: 17797 - DNA, 755 bp, Homo Sapiens
gcacgaggtgctaaacagtgttacagtcgccaagagcccataaagggagccctcctggaagtggatgaggccttgggtctcggctcttcattgcttcctgagctgcagcagatgcctttacaaccaagctcaccgaggacgtctgtctcccatattaccctggcagagggccaggcctgttctacacggccggggtttcaacaaggtactgatgtcttctgcccttgcctcttcgacaggcaagtaataagacttaagtgaagagaattctttaggcacacaaattcacatttgatgtaatctcattatacttcctgatctgtgattgaaaactttcatttcgtaactagtatgtctgtcccacctttaaaaagtttttcattatgaaagtaagtatttgttagaattaagtctatttaaatgaaaaaaacttagatatgagtctgcatggcctcaggaaaatgatgttttaaaatagagattttaggttgtctgcactctagcttttttgtcgttttcttaaggctttttaaactgcatcaaaaattcagatacgaaacatacactaaaaaataatacatcatatcttaatttccactgaacttgatttaaattcagagttacacagtatgaatatcacaatcagatatgttcaaaaaggtctgaacaattgattttctgaaaccatgaaggactacaaatgcttctaataaatcaatgtaattaaaatgtcttttagaaataaacttatttgg

SEQ ID NO: 17798 - DNA, 690 bp, Homo Sapiens
  misc_feature (113)..(124): n is a, c, g, or t
  misc_feature (510)..(536): n is a, c, g, or t
gcacgaggataaaacagtgacaggtataggcattctatgatatctggacttttatatgtagcaaccctataaatcaagaaatatttcatttgtagaaagagttctgctacctnnnnnnnnnnnngagtttgaaaactattgccttaaatcttggacctgacagtattgaattatttttagtttgtgggcaggataaggaaaagtaaaccaatgtttaaatatttgaacttgttagaaatgaacaaaaagaatccatggtagttaatttttcttttttaccctaaacttttaaaaatactgcatttcctcccttcttcagattatccagataggacttaggttatttttatctcagacccaagggagaatgacctggataaagtactcctggacatctcccagtgattgaagttacatacatatatataggacatctgctcatagcccagcatgtaagattttggtattgaactttccagtctaagaatatccttcagatgagaacatgtnnnnnnnnnnnnnnnnnnnnnnnnnnntatcttaagggcaggtagcagtgagatgcacagtaatgagtcagtatgtggtatcagaatttatctctattatcagggttattaacagtgcatcagcattgtacattgctcaatttttgtttgctttcatgtaataaaagaaattattgattct

SEQ ID NO: 17799 - DNA, 782 bp, Homo Sapiens
attaaaatggccccgggctgcaggaattcggcacgaggagacactttatttgggtgaagtttaaggattataacctgggagcaaagactgaagttgcctagaatctacactttcattaacagcagttgcaagaggagttgtgaagacaaaaacaaagggacagagagtgggctgatagagttgtcagaaatttttatttaaagaagtaacattggttatcgattggacatatatcattatggtttagggtatgagatacagtgtccaatgtggtattatcagtttaatatacatctacttgtggcaatagtgaacagtttcaagagatgaatacatatttcaaaggaggagaaaggcgtaactgcactttcatttcaatgtctgagtttgataaccaaaaggacttgcatttttagataaaaattttctatttcccaaatctcaagacctagatacaaaatgtagagctgcagatttagggcccgaatggctggagtagcagcaggtgttacctgcacatttgtgaacattttaccaagagaaaaaaggggaaagtgaagattctcatgtctgaatgtgtactcaatgaaaacgttactctgattaggtttgtgggccccatggtctctgaatcagtttaaggtctgaagatacaagagtcattgatataaaactattggattgttgccctgtgaaattggtagaaatttggttttagtctcttctagaagtgactgtagataccaaaatatgcagtaacaccgttcttgcttgcatattta

SEQ ID NO: 17800 - DNA, 683 bp, Homo Sapiens
  misc_feature (554)..(641): n is a, c, g, or t
gcacgaggatttacttaaggaattggctcatgcaattatggaggctataaagccctgtgatctggctgcaagctggagacccaggaaagctggtggtgtaattcagaagcgtgagaggtagaaagctgcctccattcagagtgtaagacctgagaagcaagggtagatcaacgttcagctcaagcagtcaggcagagaatgtaaccttccttcacctttttgttctgttcaggccctcagtagatcagatgatacacacattggtcagggccatctgctttactcagtttactgatttcaaatgccagactcttttaggaagccctcacagacgtgcccagaaataatgtttagccagatatctgggccattccatgacccagttaacccagttatgtcagaagttgcaaatttttttgtgaaaaatcagaccttggccatgagaccttgagcagtaggatataaataactcccacaagtttagtattccaataatggaacactaggcataaatggattaagttgacacataaaattaaccatgacattcaatnnnnnnnnnnnnnnnnnnnnnnnnnnnnnnnnnnnnnnnnnnnnnnnnnnnnnnnnnnnnnnnnnnnnnnnnnnnnnnnnnnnnnnnnacttgctattattaatgtcattactattattatgttagtggt

SEQ ID NO: 17801 - DNA, 578 bp, Homo Sapiens
  misc_feature (302)..(479): n is a, c, g, or t
gcacgaggacttactttatgttgcaatgctgtgtgcaatgctgtgtttttttactcactatctctgagcaaaacattatttattcttggtaattgtaacacttggtagtgaagacatattttttgccatataatggattatactttgtatttgaatccatgtgaatcagtagcatattggtcttcattgtttttcctccttctccgacgtttttttgagacagggtctcactctgttgcccaggctggagtgcagggcacaattacagctccctgcagccttgatttctcaggctcaagccnnnnnnnnnnnnnnnnnnnnnnnnnnnnnnnnnnnnnnnnnnnnnnnnnnnnnnnnnnnnnnnnnnnnnnnnnnnnnnnnnnnnnnnnnnnnnnnnnnnnnnnnnnnnnnnnnnnnnnnnnnnnnnnnnnnnnnnnnnnnnnnnnnnnnnnnnnnnnnnnnnnnnnnnnnnnnnnnnnatgagccactatgcctaaccatattttttccaatattaaaaaatctttttttccccctaaggaatgtgttatataaggtcaacatgttttttagtgctt

SEQ ID NO: 17802 - DNA, 958 bp, Homo Sapiens
gcacgagggtctctgggctggggatatcctggcatgggtgacttttcctaccagaatggggatgtggagaaggaggccgatgtccctaggctggttgcctctttttgtccttctcatcctcccaccaaggatatgaggctactgcctagcaacctgcttggggcaagtccagatagaactccctctgggatcctcagtccccaactccctaacatagattgctatggtgacactatgattgacaacagaggggtcccaagcatctgatccccgctgttagagtgtggcttcctctgcttagtctcatctccacagaccaaggtgctggagagggatccagtgggctgagccaggcttctctcagtcccctttgtatactgggctgtctgtccttctcctttagagatcattgtgtttcagggctgtgatctggaccctcttatttttttctcattcaacactttctccttgggcaattctcatctattcccataacttcaattaccagctgttagctgatgactctcaaatctatggcttttgctctaacctctatgctgggcttcaggcttttatatccaactctttctagatgcttctgcctgcataacctatcaggtgtctctgaatcaacttgtctaagactgagcttatcaccttccacctcccattaaaggtgttactgttccccgctactcaccccacaggtctcagtaaatagctccaccgtctacttagttgtttagccagtgacctgagaggtgtctttattcttctccttcctcatatccagtcagtcatcaagtcctgtctgttttgcctcttagctctctctgagttcattgtctacttctcttcctccctgctgccaccacactcctcagagttgggatttggtggtagagggtggagcggatggcaggattgatgctctcatgagctgttgctgcttcaagtc

SEQ ID NO: 17803 - DNA, 607 bp, Homo Sapiens
  misc_feature (165)..(181): n is a, c, g, or t
  misc_feature (197)..(259): n is a, c, g, or t
  misc_feature (272)..(448): n is a, c, g, or t
aggcttcctaacagtgtgagaatggactaatacaatggtcttaatcaatttgaaggtatgacactctttgctttggaaatcatgtagacattttaagtcattcctatttttaatgtagacaaacgtccaggtagcaattttggggataataaatgagttcacccnnnnnnnnnnnnnnnnnccctgagacagagttnnnnnnnnnnnnnnnnnnnnnnnnnnnnnnnnnnnnnnnnnnnnnnnnnnnnnnnnnnnnnnntgggttcaagctnnnnnnnnnnnnnnnnnnnnnnnnnnnnnnnnnnnnnnnnnnnnnnnnnnnnnnnnnnnnnnnnnnnnnnnnnnnnnnnnnnnnnnnnnnnnnnnnnnnnnnnnnnnnnnnnnnnnnnnnnnnnnnnnnnnnnnnnnnnnnnnnnnnnnnnnnnnnnnnnnnnnnnnnnnnnnnnnntgagccgtcatgcctggccgagttcagcttttattcacattttttccccgaagtgatttattcttcaaattatacagttatgttctatatagtgttttgttttttctttaagaaaataatttacctaaccatagattatggtaaacattataaatctta

SEQ ID NO: 17804 - DNA, 670 bp, Homo Sapiens
  misc_feature (299)..(308): n is a, c, g, or t
  misc_feature (332)..(351): n is a, c, g, or t
  misc_feature (355)..(570): n is a, c, g, or t
gcacgaggagactttgcaactcaagcgtgtctgcaattgtttcctgtctttacactcccccagagctcaagtgatatgtttagccatgagaattcagtccattctaactcccacattttcctgtattgtagagtagtaacattgaggcttaatattctaccccttggatcacatgctttgaaatacataaaaatgtaagggagtaagttgaaaaaaccagtaactttttctattgtttcttgagagtatagcatatatatgtcacctgaaggaaacttgatcagcttatcatctgtccnnnnnnnnnnattatggtgtcacctgtcttctcnnnnnnnnnnnnnnnnnnnngagnnnnnnnnnnnnnnnnnnnnnnnnnnnnnnnnnnnnnnnnnnnnnnnnnnnnnnnnnnnnnnnnnnnnnnnnnnnnnnnnnnnnnnnnnnnnnnnnnnnnnnnnnnnnnnnnnnnnnnnnnnnnnnnnnnnnnnnnnnnnnnnnnnnnnnnnnnnnnnnnnnnnnnnnnnnnnnnnnnnnnnnnnnnnnnnnnnnnnnnnnnnnnnnnnnnnnnnntctcaaacaccagagtgagactctctctaaaaatggaaaataaattttaaaatgttataattaaagatactcattttaattgaataaatttagctttatg

SEQ ID NO: 17805 - DNA, 960 bp, Homo Sapiens
gcacgaggctttattctactgtaacactaaaacttatctttgagtttagtattaccaagtgcatcgaattacagattaaccgattgaccagctgctatttagtaaggtctcaactcccttaagagtaacccaatccacaaacttgactatgactaagcacttatcttgagttatttgaaagaaatatgaaacggtcgtcttgcttttagagtaattttaatcaactgcattgttagatttgtgattctgcactgttcatttcagtactatctaatataaaaattacatgtttaaatgttttataattaaaaattgggctcaggttaaaatattttcttttggagataccttttgttgtggtcttgtcacaggaagggtcctctactctgcatccttctccattaagcagggacaactgcattattggcaagcgctaagcaacatggagaagcagacatgtttgtgaatcgcaaagtgaaatctgattctctccaactatggatgagtgagagtaggatatttcagtggctggttttaaaacatgctttacttttttgcttcctttgcctaacaacctgtttgctttggggttggcgacaattgtctcagagaagctgaatgaatattttaaccgatgtaatgggtcataagtctttgaacataaaatgggtgtgatgcatgttttaaatgccaaatgatacacttttgggaaaatatatgcgatttgtaatacaacacacctagaaaacttcagaggtgccataagttaatagtgacatcaccggattatgaatacttgagaagcatgggccttttaaagttgtatgtgagttttaagaggccttgaattaatctgtacaaggtattgctattctttttgttgttgtgtttccttgtttgtatgtttctttttaaaaaagatttgagatggtagaaatggtggactttaatttaaatgcc

SEQ ID NO: 17806 - DNA, 365 bp, Homo Sapiens
gcacgaggaggacatgatcttagtacacattaaacagttaccttgcctgatgtgaatatgaattgactctggcccttctgcccggtgccactaaaaactgtttgcttttctcgcaactagcgagacgggaggattttaatcaagttatggtaactctctttcagaaaggatataaattttgtaaaataagggtacgctctgttatgattccacgtattggacttcttttgcttcttttttggtcaaacttttacttgtggtattcagtatatacaccatcatatgcctttcacctgtgaatgcaccacccctgatatcttcatctttccccatgccatcccctctcgaatgactattggtcactt

SEQ ID NO: 17807 - DNA, 349 bp, Homo Sapiens
  misc_feature (194)..(203): n is a, c, g, or t
cggcactagggtcctttgacaccttaggctcttcagaaacaatggttttgttgaggatggggaacagggaatgccgattttatatacatggtacacagagaggggtgtcacttcacaaaatcttccagcatgttcttcagaatattaatttatatgcgaggtgaggttgggaatgaaaagaacaggtcagcacnnnnnnnnnncctataacatacaaaagaacatggtggactttcagggagtgcaatggaaggtgaatatttccttaagggtccccgagaaatgggagtgaggggaggggacacaatggctttttgatcttacttttaccttctgatactagtcaagg

SEQ ID NO: 17808 - DNA, 293 bp, Homo Sapiens
gcacgaggccataatctattctagcttctttgcaggcacactcctcacagcgctaacttcgcactgattttttacctgagtaggcctagaaataaacatgctctcttttattcaagttctaaccaaaaaaataaaccctcgttccacagaagctgccctcaagtatttcctcacgcaagcgaccgcatcgctaagccttctaagagctatcctcttcgtcaatataatctccagacaatgaaccatatcccctactaccaatcggaagtcagcatcaataatcataatggcta

SEQ ID NO: 17809 - DNA, 670 bp, Homo Sapiens
tctggaagcaggtctgttttggtcaccaacaaccaccaccaaattgatctgagcatcctgggacatcccggtaattctgtggaggtttcaggtactggtattctcggttggaacccaggtaccgctaatgcattcagaagtaacaggtgctctgaaagagtcctgggattcagttatgtaggctgcaccatgttggtgggatgaatcagaacttttacgtattattttatgttgagcctactggacactgctactataccaggaagaaaaagcaaagggcaaactatgtgtttttaaactgttgcagattcctctctgctagatgctctaatttacttatgatggctaaaacaaaggcaatcattggtatagacagttactgaaattgatgaaacagtattatcaggaaaaccatgtgaaaacccaaggactcacctctggcatgcttggaagcaataactaaggtggttttctggagcagtgcaccctaggtatcgtaggagggtgctttctaactgtatgattgtgttttaaaggaaatccagaattggttttattcctatatctctacctttttatttttatgcagaatctttattgaactctactttgaagtttctaagtttctatgaacttctcagatacctatatattatacttaccttaggtg

SEQ ID NO: 17810 - DNA, 782 bp, Homo Sapiens
gcacgaggaagtaatccacctggcctgctcttttcatgtcttaacatggcatgtcttttagtttcattattttcctactccttgtatgtcaagaaattacattttgcatgtcttatggagatgctgttaattgcttcagtgagtgcttttctaatctgcagaccatttacatttcctgtttgcagcatgctgtgtgcaaacactcagtaatttggagtattcaattatttgttagggctcttcctatttccaaatgtgctgaattgtctattgatgggattttcagatcttttcatgagaactggaaatgtagctgggtggcacctacctaggttgctacgtagtgagtagactttctcttgggtatagtaagcctcagacagctttcacttttatctactttacttgtggaaataaaacagtcattttgttctgaaagaataagatagctttctgtagagaaggaattcctacctctaaaagctgccttgagaactcagaactggcagttttctgaggtgatttttaaatttcagtattagggagagtccagcatttgctgacacagattctacataactaatgtatgatagcaaatgcaaaactattataatgtggtgtatcttgcgcatacacaggttagaacaagtagactctggcagcagatctccagagactcaagtttaggttctcatagtgtatttgaagtagttatactcctggcttaagtagtttagtgcctgggagaatccattactgaaaagcatttaacttaaaaaaaa

SEQ ID NO: 17811 - DNA, 377 bp, Homo Sapiens
tcccccgggctgcaggaattcggcactaggtactaaaacatgtgtgtttaatattgattctactgtacaataataatgttacaaatagattctgctaacacattgcttcaggctactgggattcacttactgaacacagtctaacaaagcattcagtgttcaaatctctccctctggccaggacttattgagaatgaaatgttctctaatatggcatttccaccttctgtgtattttgctgtgagatctttgacagtcatttggccccctgagggccagatgtcatctttcttcacgtgtgaattctcaatattcataacttttgagagttgttctttcttgtatggtttggttgacttggtaggtttaccttctgt

SEQ ID NO: 17812 - DNA, 536 bp, Homo Sapiens
  misc_feature (41)..(137): n is a, c, g, or t
  misc_feature (145)..(156): n is a, c, g, or t
  misc_feature (163)..(253): n is a, c, g, or t
  misc_feature (368)..(378): n is a, c, g, or t
  misc_feature (457)..(466): n is a, c, g, or t
gtgccaaaaccccccctttttctttttattcttagggaaannnnnnnnnnnnnnnnnnnnnnnnnnnnnnnnnnnnnnnnnnnnnnnnnnnnnnnnnnnnnnnnnnnnnnnnnnnnnnnnnnnnnnnnnnnnnnnnnggggaaannnnnnnnnnnnaaccgannnnnnnnnnnnnnnnnnnnnnnnnnnnnnnnnnnnnnnnnnnnnnnnnnnnnnnnnnnnnnnnnnnnnnnnnnnnnnnnnnnnnnnnnnngcccttttccccctatatgggtttttttcggctcaacctgagaccccctacaaaattaggtaaaaaggaatagtgcccgagggaagaggaaaacacccacacctccggggagctnnnnnnnnnnntttttcggagaaaggcccaaaccccctctggggaaaacctgggggggcccaggggtttttgctccgcccactccacacnnnnnnnnnnagaaaacataaaaaatctccgaccacgcccccgccaaagccccaaaaaatcctctgaaacggttaaattt

SEQ ID NO: 17813 - DNA, 319 bp, Homo Sapiens
  misc_feature (41)..(83): n is a, c, g, or t
cattttcattatgtagtttttattttaaacgaacattattnnnnnnnnnnnnnnnnnnnnnnnnnnnnnnnnnnnnnnnnnnncatagcatcagtatcagtacacagttaatgaattggcttaaacaagattaaccacatgacaggtccacttatctgcaggagcttttcacattaagccattggagcaaaaataaaatatgtttaaacatgtacagtaggatagttatatggaaaaactagagagtttccattaggggcatgattttcatcaaacagtttatggtattttgcatgaaaggaactgcagtgtcagctgc

SEQ ID NO: 17814 - DNA, 714 bp, Homo Sapiens
gcacgaggctgacagccacacaccgaatcttgatgaaaaaagagaagagcatttgccttgttacatagtctgttacaagccagatatgttgctagctctcaagagttgtaatatattaagaactacaacttatttgattaaaactcagctgtatagatccttttataaagcaccttttgttaaacatcagcctttcattggtattttaaaagcaaggcagatagatatgaagtcagccaactctgacatgcgtcctttcttatctcccttacctgacactaggggctctagagaggcagagagagcactcacaaatcacactaaaactgccagcggcctgactcttactcagtttagcaaaaattcttgcctaaaaagtgataagtaaaaatctgtttatggtatacagttatgtctcgaatctttgaatcaaatccatgttcttattttagaaaggtaagagttcttcaaattcagctacataccaccggctctcccaacctcagacggtgggcatttctggatggatggctgcggttatggataaaggctgtaactgttaacacagaaaaacatgaaaagctcaggcccaagaaaggccttggagccagccaaacagaatttgttctaatggacatggatgatgttgaacagaaaaaagtttacaagtgctttgtggttgcactaatgtatactcactgccattttaagagg

SEQ ID NO: 17815 - DNA, 898 bp, Homo Sapiens
gcacgagggttttctttttttaaattccttcctttttctgactaaaaaaattatttaggctttgtgattcatgggtctgcaagagagtcctgcacacagcaccatcctgagctaacatagtttcaagtcagacacacgtgaacctaattacccgatattaccaagagagattacccagttttaaactttattaataatttcaaaggtacaggcaatcaggggactcagaagaagtagggatcaacctggcacatagagcaaggcttcttactgtgtgaattgataacccatccaccccatttgaagaccttttctactctgggccagagattgtgtagcttatgtagggaaggaaggaccgaagcagctgcttttaatatcccaaatctcttagtctggacttcctgattccctgtattttaaaaattatttgtaaagcttgacactgggtaagatctctggttcatgtgagttagatttgacactctgatcttatgtattctttcacccacatatgtccattcacttctctcatttcttcctttttcccagaccatctaggaccagttttcttcttcttgaactaattttttaatatttccttcattgtacatttatgtcagtagccaaagagattgttgttagttggtctgaaatgtattttgcctataattctgggagatatttttctctacatatagaattctacattggcagtaatattgttgtacaggagttggtaaacctcagtccatgggccagctacctgtttttgtaagtaaagctggaacacggctgggcctttttgtttacatattgtctattgcctctttcacacagaaatagcagttgaatagttgcaacagagatcatatgtcctgcaagtctaaaatatttt

SEQ ID NO: 17816 - DNA, 555 bp, Homo Sapiens
gcacgagggcccatgtataacctctaatccagtgtaaaagtaccaaaaagattacaatggtgaatgctcataagattgtccccatttgtgtgacattctcagaaaataagatattctacttaattgacttttttagaaaactgaagcttatttctttcaaaagaacatactggcctttttaatcatgtttacagaattctttctaaatagaagattacaaataatcttctatagaaactgatagattttgttttacttttatgtgattgtttgaaattggcattataaacatctgatctgataccatactctaatacagtagtgccttggtgtcttgtttcttagcattttaaatagcttctatgtattgggtgcttacgttgtgcttggcactgtgtgtaatgatctcatctattatcacactggtttctcatgagacatgtcctattgaggcatgccgagcttttgcccttttactaaatagcttcatttatgctgcttcttaaattcttatggctgcattttgtgattttttctgtctcccttcttattgtc

SEQ ID NO: 17817 - DNA, 210 bp, Homo Sapiens
gggaaaaacccgcttttaacttttttcaaaaaaacaaatgggttgccccaagattccggtgcccaccctgaggccaaacacgggtggagaaccacgaactggcctggcgttgccctgaactgcaacctccgcccccagatctcggtcacagtcaccgcaagtgcaaggaggaagcaaccctgggggaatggacgccgctattgattcttt

SEQ ID NO: 17818 - DNA, 258 bp, Homo Sapiens
aggggtattgagttgtgggagccattggccgagactggagagaggagacaaggagacggattccctttgtgtgttcccagcaccaaccaacataaagactgaaagctgttggactcatgctcaaaagaatcataggcaagttgtgtttgtcccattaagctaacatttaaaaatcagaagattttatccaaaagatggatttccaacttcttttgaatgatctggtaacatgggactgtagtctcagaatggaaaaac

SEQ ID NO: 17819 - DNA, 982 bp, Homo Sapiens
  misc_feature (443)..(468): n is a, c, g, or t
  misc_feature (670)..(679): n is a, c, g, or t
ccccgggctgcaggaattcggcacgagggtttggtagatctgttgggtagaattattttccccctgttgacctcagctgcgaggtttggaccttgaggcttggatgagggaatttttccctttctttggagaaggcttatcattcttactggtaagcatgtattttattttctgtcctgtcttgtatttatttggcctttgtgtattcagtgcttgcatttacttggcttttgcatagttgacattaaatcagagcacccacgaaatgagctctcaaagttcaaaggcatgccagaatattttctggaactccagctagtaacatattcaaacattacagggatcatttagtctgtttttcttaaaactgaactaaaagatggaggctataaaatcatacactccaaataagatatgcatatttcattgatatcttgaggctnnnnnnnnnnnnnnnnnnnnnnnnnncacattcaggatacaaatattgccttgttaaaaaatactgtctcaaaggtggctgaaactttcttttctagacctttcccctccccttcttacagtatcccctctttatccttctctaaacagctattctaacatactacttaaataaaaacacttgaaaaccagcagatataaaacaaagtcattttgaccttcctactgnnnnnnnnnnaaagcaaagattaaattcccatgtaaaaccttcctccctatacaaaaaagaatagcagcatttttatcttcaatgacaaagaattgagtccaaggaaatactgtataaaccttgttaaaaatcactcttgtcttttggtcctactcacataattcagcacactttcacagttaactattttttgttcaatttagtgcactggtgagtgactcaaactgctttatcccaaattgatttacagcctttataggattgcctattaaaaaagcttaaagcttatccttagcccattttgtcagaaaa

SEQ ID NO: 17820 - DNA, 318 bp, Homo Sapiens
  misc_feature (78)..(187): n is a, c, g, or t
ggggggaaatggtatgaaagacatttattagatcaactgacaaaattagaatatggacagatgactagataaaagtannnnnnnnnnnnnnnnnnnnnnnnnnnnnnnnnnnnnnnnnnnnnnnnnnnnnnnnnnnnnnnnnnnnnnnnnnnnnnnnnnnnnnnnnnnnnnnnnnnnnnnnnnnnnngtgtgttcatgtgtgcatgcatatgtatatgcatacacttatacatacatacatgcatgtatagatataacatgtatatgctacagagagagatggagccaaatgacaaattaaagggggtaattgttaaa

SEQ ID NO: 17821 - DNA, 360 bp, Homo Sapiens
cttcggcccgaggcgcccttctacggtccacagcctcaacgctcactgcacccacagcctgtccgtcttccctgggaggacctggcgttactgacggaattgacttgcagcacatccccattctgtgcacatacagggactaccgcatccccccgattatcgctactccgagcagttctgggtcctccttggcgaccgcctggcgccctgtatcctctttgagcacgcggccttggtggtggtgatcatcgccgcctgcgctacacttgccatccctcagtcggtgctcctttcgctttcggacctgacttactcgacgcggccggcgaatatctccgtcgaactgtaaatgctgggcgg

SEQ ID NO: 17822 - DNA, 927 bp, Homo Sapiens
  misc_feature (101)..(138): n is a, c, g, or t
  misc_feature (145)..(406): n is a, c, g, or t
gcacgagggtttcactttgtttcactgaacaaagagaaacaaagagaaacgcagccagagagggcagatgtttgtgttcagtgaaacaacaaacaacctcnnnnnnnnnnnnnnnnnnnnnnnnnnnnnnnnnnnnnngagacannnnnnnnnnnnnnnnnnnnnnnnnnnnnnnnnnnnnnnnnnnnnnnnnnnnnnnnnnnnnnnnnnnnnnnnnnnnnnnnnnnnnnnnnnnnnnnnnnnnnnnnnnnnnnnnnnnnnnnnnnnnnnnnnnnnnnnnnnnnnnnnnnnnnnnnnnnnnnnnnnnnnnnnnnnnnnnnnnnnnnnnnnnnnnnnnnnnnnnnnnnnnnnnnnnnnnnnnnnnnnnnnnnnnnnnnnnnnnnnnnnnnnnnnnnnnnnnnnnnnnatgcccagcccaacctctttttcatagtgaaaagcagccaacaacaacccttgagcaccacagccttttgtttccatggtttccaaagggaattactgtctgtctttcttgtttgtagtttgaaaattaacaggggaggattttgatggacgagcctgtgtcatggtgcccattcaaaccaatcacagccagagagggcagatgcacagaatctctaaatggaaccatgtgggctcaagtagcaaaacctaagaagggcattatctcccaataaagagagggtattgggagaaccaaaccataagcgattagcatgctatctttagatatcacaaaaatatgaaaagcagaattataaattttatgtgctaaatgttcaatttataatatgctgagggcttttattcattcaatggataaatgaatacatttagcctgacttcataggatttataagaatgtgctaaactaggaatctaaaatcctgaatcctcactacagtgtgctactaattaacattc

SEQ ID NO: 17823 - DNA, 207 bp, Homo Sapiens
tccataaaaatcccccgggctgcaggaattcggcacgaggggaacccttaagcctgttttattttttgaattccagtagtagtagctgtgtgaaacttcaggttgaaatggtggggttaactgcccgcttgaaagcctgggtttaacattgcctaagtgaataaggtaaaaccacaaaagatttaattatgactgttctggtgatga

SEQ ID NO: 17824 - DNA, 379 bp, Homo Sapiens
gcacgagggaaacactggttgtgttgtgaaaatcctcagaaatagggaggggagcctggagcacctaactgcccttcccactgccttctcagccccagagagtgtcccctctgtccttcatcagagcacgcgaggagctccattcctggtcgtcatctgaggatgacacaatgagtaggactaggactttaaaactagtgtgtggaggttatatcctccatgtactgcgtcttaagttgggccatgtgtgtattggtccccaaagcattttttcagctaaattgcataatgactgttattttaaaaactggaaaaggaaaatcttaatgttacattatacctgtggtattgtcttgaaataagtttcaccatttaaatc

SEQ ID NO: 17825 - DNA, 894 bp, Homo Sapiens
gcacgagggagagagtgtgtgtttctgggccaacagaggcaaggttagggggcagaggtaatataagtgagctggcccaagccatgcaacttagcctcatagattgaagtcatcacatgaattaaccccaaactggtacccagtgatgtcagagcatgagtccagatgtgctctgtgcgtgcatgggatggcttccaataaagtcaaatgacacagtcacgtgtcagtttaggtcctctaggaaacagacaccagagagaatgagaagtgcaagtgacatattgggggatgcctatgaaagacaaaggggagagggagcaggatgaggtgggaaggcttcagactgtgacacaggtgtgccacctgtgaaaagtgaaggggaaagaagcagcattctcagggagagcctcagaccacagtgccactctgagcaagtggccaggctgatggagcctgacactaaagattgcccattagagaagtctcggccctagtgtcccagccacatggagtgtcccagagagcgcagctttggtgtgagctctgagggagcaagtcctctttgaggttctctgaaagaagatctaagctgtgcacttcttgggctgccttaattatgcttcaagggtcagaagggtccaactcttgtttgaaccgagactcaatcccagcctgcaaatgactttccctgattgattacaacttgctttaaaagtccagagacttttatctcttaatgaaagatatttaaatgagggtgatttattactttgaggtcgcggtgatcacgaaagtatgactgagtatatgtgattgatatgggccataatgcttcattcattcacaattcagcagaccaaatttaaagagatgcgtgtgtaagtttcattcttg

SEQ ID NO: 17826 - DNA, 661 bp, Homo Sapiens
gcacgaggctaaaacaacctaagatgtattggttatggaatcatgtgttggataggttcttaagacctgtttcctcaaatcttgacacagttttcaagggtggcttattgacttgcacggttgggcagataatccagatttacctaagattgggtaaaaaagtcatctgtgactttgctggcagggcatttgctaagtggagtacaggatctaaaagggttttcttagaaagggcaatattgtccaatgaagtaagcagaaggactctgggttagaagcatctgcacaaaaactggtgagacctactctccactgctctgcagctggatggctgatggcaggctgagcagtggggaagcaggttttaacaacagggagtccttccaggtcactgtatattgagaagaaacataaaactattgtctgttacattccgaggtcagccttcttcttaacgttttataatatgcaaatgccagcttctggaaagcaagtatcatcatgtaccaaatgctttatacaccatcacattcatgaattttttagcatggtcagaacttgtgtaaatatgtctcttagatgattttggggagatgtgatttatttttcatattttcaaaatgcatttcatttcaaataaagttatctattgagacaaccg

SEQ ID NO: 17827 - DNA, 373 bp, Homo Sapiens
  misc_feature (104)..(130): n is a, c, g, or t
  misc_feature (156)..(218): n is a, c, g, or t
  misc_feature (227)..(242): n is a, c, g, or t
gcacgaggaaaaaggtattatatatagtatatggaaaagggattgatagttaaacgaggaatataacttcctttgggaaataaattctttgcaagatggcttcnnnnnnnnnnnnnnnnnnnnnnnnnnngagacagggtcttcccctgttgcccnnnnnnnnnnnnnnnnnnnnnnnnnnnnnnnnnnnnnnnnnnnnnnnnnnnnnnnnnnnnnnncatctgagnnnnnnnnnnnnnnnngaagatgtgcggagtagatgtacatatgtgcacccatatgatatctgtgattactgtgtgataaatcaatatttttaaagcatgatgatccttatgaaaatactttgtaaaatataaaatgatacataagt

SEQ ID NO: 17828 - DNA, 775 bp, Homo Sapiens
  misc_feature (160)..(486): n is a, c, g, or t
gcacgaggtatctcctgaaaaagtgtcacacagaaaatgaaataaaatctagggatccaatcagatgcagatgctgggaattcagaggaatgtcttcacttatacttggatttgctctcttcccatttctgattgttgtatagctttcgattttgcttannnnnnnnnnnnnnnnnnnnnnnnnnnnnnnnnnnnnnnnnnnnnnnnnnnnnnnnnnnnnnnnnnnnnnnnnnnnnnnnnnnnnnnnnnnnnnnnnnnnnnnnnnnnnnnnnnnnnnnnnnnnnnnnnnnnnnnnnnnnnnnnnnnnnnnnnnnnnnnnnnnnnnnnnnnnnnnnnnnnnnnnnnnnnnnnnnnnnnnnnnnnnnnnnnnnnnnnnnnnnnnnnnnnnnnnnnnnnnnnnnnnnnnnnnnnnnnnnnnnnnnnnnnnnnnnnnnnnnnnnnnnnnnnnnnnnnnnnnnnnnnnnnnnnnnnnnnnnnnnnnnnnnngtacttaggaatacaactatatacatatgattttatttttaagaccatattatatttgggtatctactaatattttgtataaagcaattttttgttccattacgtgactttttgttttattgtatatgtaatttaacacacaataaagggtaaagttgctttccccaaacccacacatttaatcaaaacctagaatcatctgcagtccttgttaaaaatgcaggtttctagaacctcttaattccgattaaataaatttattgcaaacacaaatatatataaaatataa

SEQ ID NO: 17829 - DNA, 272 bp, Homo Sapiens
  misc_feature (114)..(122): n is a, c, g, or t
  misc_feature (184)..(196): n is a, c, g, or t
  misc_feature (198)..(213): n is a, c, g, or t
ggggggttttcaaccccaaatccttttttcaaattttagggggggcccgggccccctttccccctaaagggaggcgtattaccccgccccctgggccggcgttttaaaaccgcnnnnnnnnnaaaacccgggggttccccaatttaatccccttggagcacacccccctttccccggtgggggnnnnnnnnnnnnngnnnnnnnnnnnnnnnnttcccaacatttgcccacccggaaggggaaaggggacccccccggaaggggcccattaa

SEQ ID NO: 17830 - DNA, 333 bp, Homo Sapiens
actgcgcccagccacatatgtgtctttatagtagaattatttatattcttgtgagtatatactcagaaatggtatcactgggtcaaatggtatttctgttcctagatccttgaggaatcaccacactgtcttccacaatggttgaactaatttacattcccaccaacagtgtaaaagcattcatatttctcctcagcctcaccagcatgtattgtttcttgaatttttgataattgccattctgactggcgatttatttaggtctggtgttatagatctaatgccgctttcttttctcgtggttggagaacaaattagagaatgttcctgtgt

SEQ ID NO: 17831 - DNA, 943 bp, Homo Sapiens
gcacgaggctaaaacccttctgaaagagaaggaagggaggcaccaattcctactaccaaatgttaaaattaggaaaccctgccacagtggattgtgatggtcttgaccaaggtgcatgagagaagaggacagtaaggtcccaaaggccaactcaccacaaggggaagtagagtctggcagtgatctgaactccacacaacagcattaactccaggttaaagagctcagtctggtgcactatgagtctgagtgcagaagatttacaggtaggagtcaggaaactatcaagtttacatgttgcaataaggaggttagacattccatgatgctttcagagccattgatgggttttaagcaaggcagtggcttggtttttgtatgagagagctcattttagtgaccaatatggaggatatttttaagagaaacaagaatagaggctgggaagctattgccatgatccacgaaagaggaaaagacagcttgaatgagtcagtggtgaaggaaaagattcaagaagtaggaggtaaagtgatcatagcttggtaattgattggctcagggggagcagtcattaatttgtttgctatttgtgctgtttattattattacaaatggcagggattagaataagtggccaattattctcttcctgtctacttgtttttagctgctggtctctaaaatgaaaattatgaagatggaactttgattagcttctcctactttcataatgactgtggttatcattcccagtttattgagtgaagtcattgtttaaatttgcataagtggcttttggatatgcaaaggtccaattacattaaaagctagatatcaattgatatagaagacaattatctagatatgtccatgacattaaaaagaacaaagactgactggagaatttgccaacatttccattgagttaattctggctgcc

SEQ ID NO: 17832 - DNA, 228 bp, Homo Sapiens
ctaggcccacagtgaagtaatgaatgctgtaaaagagggaatgaattaatatgaattggaaagcctattccagcactactgctaatcccggggcggcatgcgccacagctcctacacctgcatctgcggcagtggtgagaactcggaggtgctacactacggagcccccggacctcccgacgacatagatatccgtaatggggatctgtgcctgttccacatgggcgg

SEQ ID NO: 17833 - DNA, 383 bp, Homo Sapiens
gaagagggaaaccagaggctgccagcgcctgctgctgacttttacaggcaggtcatgtgccacgtctgcatgggcagctgggaagctggcatcttacataaagggacagagaagcctcctggggaacaggggcctagcggggacaggattgcagccacctgcagcggccaactggagatggcagcggtggcccaccgcagggggtgtaggtggtcaggggccactgaaccctcccctgtggagcatacccccgagggtgcccggcagctggggactgggctccacagggagttcagagtggctgctgactccacggagcactgttgttacttgggccccacacaaaacatctaccttgaaatccatcccttgggagaaactcc

SEQ ID NO: 17834 - DNA, 777 bp, Homo Sapiens
gcacgagggtttctttttctgtgattgggaaaatattatgactatctcatagtattggctcttaggattcaataagttaatccttttactgtattttggcataatatttggcacactcagtaaatgtttttcattatctttattttaattgaaagctttgttgtattgctagaactcataggtttaatgctggttgttagagttatttttattataactctggttgcctagtcccaagaattgtcttctacctaaaagggacagcataacagagcaatttaaaatgggatatgtgtggccatctattgtagatacctggattaatttgaaggaagttggacatctgtttcagatactcagtttaaagaaacttcacttatacatttcttgccctccttaactcctctgtctttcctcttgagatttcacctttgccagtcatgatagtcctgttaggaatgagaaactaagctgtatcctagagtctcattgaaacaatgggagcccctcttggaagtgtaagatctcttcagtcacataccctattttctcatttcctgaaaggtggttaaatttccctgatttcagtggattagagcctcaaatcgttacctgagggctcacaatggagaaggctaagatcaaggggcctagaatatccttggaaatttcttgtatatctatctgttcattgctctttagacttcacatatatctatttcgaagtgccagtatctaaatatcaaatcaaagcaggttgtttgttcttttcattct

SEQ ID NO: 17835 - DNA, 556 bp, Homo Sapiens
gcacgaggctggtcaagaatttagttttgtttgctagtggtgttcttggtatcttttcatatttgaggctttggtgctagtgctgaagtattacactcaccatccaaggttcacaggacttttgttttaatatggaacagatggaactgtttagttctgcatctttgcaggtatgcaaaatgtgcctaccaggactctgcttcatatccatggaaagcaagaagtaatacagtaaaactttgtctggctagaggctttgaaggaatggagtgttctggttgaattctattaacttggaagtatgaaggtgaaaaaaattcagaacttaaatttcctttgaatgcaatttgaaaatatagccaataattccacttttcttctctagtaagtttggacattctgatctacttggtgttttatgatagaacccctagtgtgcctgagacttactttgtgaagatacttttttaaaactttagctgtaagaggatgtaaatgactttgtatgagatcaagctggatgagaactaatacttgtaaatatactttttagact

SEQ ID NO: 17836 - DNA, 254 bp, Homo Sapiens
gcacgagggttcagatacctttttgaatttataatatctcttgtgttttaatttcagaaaacaattgtacattgttttttagaaatggaaatttttccccatttttcctgtagaactatggtgctttattagccaacaaaattattttctgcctttgttggtttactgttttttgaaaactggagttttattaatactatagtcctgacttaaagatattctatcttaagaaattccatatagaattagggtat

SEQ ID NO: 17837 - DNA, 230 bp, Homo Sapiens
gaccagatattttatccccaccaaatccttgcacaaactgtgtcttctgtttagagcacttccctgtctcccaaatggccaactcctactcagctttcagtacccagcctgtgtcgcctcttcaagaaagacttctctgacatttctgatgtagttctgagcacactgtgtggcccttgcctgggtccaggtctgtcttcccaacaaactagtgtctcctcaagagtagg

SEQ ID NO: 17838 - DNA, 908 bp, Homo Sapiens
gcacgaggggaagctgctcaatactttgttgctataacaaaatgcaatattttgttgtaaagcatcttaactacacatataagtttgctgaacttgaatacatcccggtaatggcaaacttcattttattcttggttttcattttattctggtctcagggccatacatttattttagtttaattaattattattttgacaacattacttgggtaatatctatataatggtagataaccaatcagttagcttaattaatctaagctatttgaattcagggaaatattagtcaaatctgctgtttgactaaatacaattcaaagcagtgtatttgtgacttggaatatagaacacaaacaaatgtgtaacccatctgcagtatgcattcttccattttaccaccactaaccattgaggctcatacaattttcaagcaacaagcattgcttcccaaaggtaaaataatcaggaatatttctatagtaaatggagtttttaattggcaatactgtttatttttttctagcaaagacaatttatctcagtaaccttaaataggaaaagtactcaaaaattaaagttgacttttggctttttgtagtctctctggaggacttccagaaaattaccactgttggattttaatctgctttccattaaccaatcttacagagatgataaatgaattaactaatattgaccaatataaaattgactgcaaataataagccgcataaaagttgaagtaggaaaactactccaagtttatatattaggcactttgggggaattctcttagtctttccagctaacagggattttcagcattaataagtagatttaatgatggcaaaaattccagatactttcttatacattttttgccaaagtgtaatcttctccttttgc

SEQ ID NO: 17839 - DNA, 939 bp, Homo Sapiens
gtttttgaaggttggaaacaataaatgagctgcccaaagtcacaaaacacatttgtggaaacaacaaggcagaaatcatggtttctagaccaggactcttcccagggtggggaccaggcttattcacttccatactttagtgttcagtgggtgcctggcacctaaatattgagtgactaaatctttcccctctgttagatagttactaagtcccctttggaaccaagtaagtcaatgattataattttaggtgaaggcctttattcaaagtgggtgaagcagaactttctcctctgctgtgggagttagagggttgaatgtgctctctatggctgtttgcccagctctgcctcccgtaaggtttttcttggagacaaaatgtcatggaaaaagaaatggtttcctcctcttcactgcccatatcagtgagcactggatttcagctggaagacagataaacctcctggttgaaaaaatatttatcttgcatagcaacaggcattctgtgatgttacttagggaacctgggggtctgggaggtcacgggattgggttcacgctgtgggcacagcacgctttctcctcacggtggcagtcccacctaccactcattccttgggaaactcagctaagcctggggtaagatacaaagatcctagcaagggcatcctcatgggttacacgtgtgtagagagtgagctctatgatggcaccacatggttgaatgctgaataatgataatctttgcaaggtagaagaaaccctgcaatactcagctttggttgtcaactctcatgcttcctctaccccacttgggacttaatcattggatgtcccttcttcaggggatcatggcgccacatatttatttttccaaatctccttggtattggcaaggaaagtgacgcataatttcagggctgtggacagcatatgttt

SEQ ID NO: 17840 - DNA, 946 bp, Homo Sapiens
gcacgaggccagcacataagcattcatctgtctgaatcccaggagaaagatatgggctatagatatatatttagcccttagcccttagcatctaagtgatgctaatagaagagatcactcaaggaaaatggatactatcagagggctgttgattgaccacagacaactaaacaagagttaaaaagccaactgagaatgagcagcaatcatgagaaagtaataataagaggaagtagcttgagggatacttcaagaacaataagcacgacaatatccctatgggttaagaaaacacaaagacaagcaaacagtcttgctcgttttccaacatcctccaggatctagccctaggcaataactctgaaagtctcaatcactgctcctcttcctatttgacttggttcagctcatttgaaacaatcctgtatatccatacatttttcatggtttcatttatttctcacattctcactggagtggaattttcttttattcttttcttctccatggttaattcttcttcagaattgtcttctaatgttcccgctgccttcttccttcctatgacatggtagtatcatcatccatcctaacttccaattagtattcagattgcaactttcttatgggatttaggcactttacaatttgcatcatagttggttatgcaccagattcttcccctttggcgaagaataccaaccttctgaagtctaagaacgcggtctcctaaattagcctccatagtgcacctctttgaaaacagcgggtacttataattagttgctcatggaccacaaacattacctacgctaaattagatagataacatctttgaatccttctgataagtctagggatctcagccaggccaaaccttgaaaatgcttatttatgagggttatatctggtagtttgaaatatctaggcgcgtttgggccaataa

SEQ ID NO: 17841 - DNA, 741 bp, Homo Sapiens
  misc_feature (44)..(108): n is a, c, g, or t
  misc_feature (174)..(455): n is a, c, g, or t
  misc_feature (457)..(488): n is a, c, g, or t
  misc_feature (561)..(569): n is a, c, g, or t
gcacgaggggtgtgcacaacaggatgtgtacagcagcactgttnnnnnnnnnnnnnnnnnnnnnnnnnnnnnnnnnnnnnnnnnnnnnnnnnnnnnnnnnnnnnnnnnctgtggtcatgcagtgatctctaagacatattaactagaaagcaaaaggtttaacaatgtatagcnnnnnnnnnnnnnnnnnnnnnnnnnnnnnnnnnnnnnnnnnnnnnnnnnnnnnnnnnnnnnnnnnnnnnnnnnnnnnnnnnnnnnnnnnnnnnnnnnnnnnnnnnnnnnnnnnnnnnnnnnnnnnnnnnnnnnnnnnnnnnnnnnnnnnnnnnnnnnnnnnnnnnnnnnnnnnnnnnnnnnnnnnnnnnnnnnnnnnnnnnnnnnnnnnnnnnnnnnnnnnnnnnnnnnnnnnnnnnnnnnnnnnnnnnnnnnnnnnnnnnnnnnnnnnnnnnnnnnnnnnntnnnnnnnnnnnnnnnnnnnnnnnnnnnnnnnntgcatagcaagctgtaatgctctttgtgttttagaatagtagaggtctggaaagttgtttgcttttccccagnnnnnnnnngctgtgttacctctgaagggaattgaggtagaggggagagttagaaggaatattcggcttttctattttatatcctcctaggtgaaatttttacaacaaacatgtactggtgtattttgaaatgtttttaaatttttgtatttcaaaataataaaatataaattcaaactgc

SEQ ID NO: 17842 - DNA, 907 bp, Homo Sapiens
  misc_feature (733)..(745): n is a, c, g, or t
gcacgaggtgctttcttttcccttcataagctgggtggtatggtatcaataaaaggccagaaaaaagtcagaacaatttacaccaatactagctagatgctttttggtttgttgtaagctactgagaccttatgatattttcagcagctatagatggtttgcacttaaggggagaatacaaaataaaaaacacaaagagactggtgagctgtaatatgattgttagtctaagcattaaacaatgacagtattgaggactagaagttagaaggtatatgatgtttagctttcatgtgacagtttggtgctagtatttttgtatgtaggttctgtttgtgatttacaatgattctgcatttgaaattcacctcaattttcctcttgctgtttgcattagaaagaattcattgcaaagaactctaaaaaagaactgacttaattttattttttgcactgtaaatccaaaactacactctgtaaatattcgaatagaatcatttcagagaacaaaaaaaattttttgacattatttttatctctcatttattaagattagatcatttatctctattaagtaaataggtttttggcactgggtagtatatagttgcctttttaaacatacattttatttttgtgacattataagacttgattaatactttaaaagaccccttggattgatttaccttcttcaaaaagatacccgttttcacagatgaatgtgtctttnnnnnnnnnnnnncagtcatggaaaagactgttattttacttgcctaccatccacttaaatttagaaaattctctggtcaaatacttgaaaagtgaatgtctgaccagtgcagtagttgattgttgttcaagttatccctgattataacttttctttcatcatttttctcagagg

SEQ ID NO: 17843 - DNA, 709 bp, Homo Sapiens
  misc_feature (430)..(532): n is a, c, g, or t
  misc_feature (559)..(580): n is a, c, g, or t
gcacgaggaattaatgagattttttgtgtgtgttagataatattgatttaagcctttttttaaaaagtactctcaaccaaatacaaaattgaaaatgtgaggtttaatagaaatgtgttggctatttgcaatggattttcttcttgcccaagtgtttggagttctactttatgctctgtatttaaaaattagtgacctcaaagcagagttgatgacacaggctttggggccctcatgttcttgtctttagaacatatcactactaagtatcagcttatcttcagaacattacaacattcaccgtgttcatatgctttctgagaagtcaccacttgtaatttcagatcacatacacctgaaggcattttatagttcctaaagttaacatgttagatcttttttttccaccccatgagggtctcactctcannnnnnnnnnnnnnnnnnnnnnnnnnnnnnnnnnnnnnnnnnnnnnnnnnnnnnnnnnnnnnnnnnnnnnnnnnnnnnnnnnnnnnnnnnnnnnnnnnnnnnntggtgcacaccaccacacctggctaannnnnnnnnnnnnnnnnnnnnnggaaatagggtatggctatgttgccttgggcccgtcatgaactcctagcctcaggtgaccctcccacctcaggcctcccaaagggttgggattacaggagtgagctactgcactgggccaacatgttaa

SEQ ID NO: 17844 - DNA, 254 bp, Homo Sapiens
gcacgagggacacttctgattacttcctttcgagtcatcctgttgggactgatgaacaacccttaccgttcggggttcctggaacttctactaatgccactctgacaggcctcacctcaggtgccgcccacctgatcctaatgtatgcactgaaaaaccaacctaggcataaagatcgggaagaagttgttaccgaggacaacactgtctagaaatgtttgaaattaccgacggatgactcttgctttgacccc

SEQ ID NO: 17845 - DNA, 727 bp, Homo Sapiens
gcacgagggtggtttttccccctctttggctggtggaggataaagttcctgctcttttacctccaagacgagggcctcattgattcacttccagaagtgctgcacttctgaagaacaaggatgcactaaagttagcaagtttataataaagttaaatataaattattttgttttaaaatgcctcaaatttttctttattctaagcagcaaacattaaaataagaatatttcctgctaaatgtaaccatacactttattccacaaaatgttatttaacaagactgagggttttttttaagaaaaaattatttccatccaatatttaaagacttgaattttatttaaacttgaaaatgactttgccttaacttttgtataagacagcttagagtccatggagcccggccctgggttggcgtgagtgggtcagagttactcagttactgcgtggatctcctgtcgctagttttactgagtaagcatactgtagtacaggagctagtagtagtttttgtaatataccttaaagatcttcaacagttgatcttttttcagaatgttggaaaatcctgtaaatgcaaatagtcaatactgtattaaatacgtgcacttggagtgtgcttcgcttgtacagttgtaaataatcagaacatatgaaaaaggtaccctacagagaaaattctgatacggattattgatatattataaatgttgctgttgagcggga

SEQ ID NO: 17846 - DNA, 292 bp, Homo Sapiens
  misc_feature (109)..(167): n is a, c, g, or t
taatgttaaacaatagaaatacagtcttataaattccaaatagcaattgggggattggatgggaggcgaatatagaaaactttttcaatctaagagatggagacggcannnnnnnnnnnnnnnnnnnnnnnnnnnnnnnnnnnnnnnnnnnnnnnnnnnnnnnnnnnatggcagaagtacaaatgtaccacagttaagtagtcagacttagtggtgttccatatcatttaaatgaactcataatctaaatatgtggaattagttaatttctgtttcattccatgttttcaga

SEQ ID NO: 17847 - DNA, 515 bp, Homo Sapiens
  misc_feature (193)..(216): n is a, c, g, or t
  misc_feature (235)..(473): n is a, c, g, or t
gcacgagggtaaataatatgtacaatagcatcccgtttttgttgagtgttcatatgtgcgcatatagacaatgattggaaggagatatagtaaggtattaacagtggttttctgtggatagtgacattgtaattataatctttttcttgattatctgtattttcaaaaatttatggtatagatagatactacnnnnnnnnnnnnnnnnnnnnnnnngagatggagtttcgctctnnnnnnnnnnnnnnnnnnnnnnnnnnnnnnnnnnnnnnnnnnnnnnnnnnnnnnnnnnnnnnnnnnnnnnnnnnnnnnnnnnnnnnnnnnnnnnnnnnnnnnnnnnnnnnnnnnnnnnnnnnnnnnnnnnnnnnnnnnnnnnnnnnnnnnnnnnnnnnnnnnnnnnnnnnnnnnnnnnnnnnnnnnnnnnnnnnnnnnnnnnnnnnnnnnnnnnnnnnnnnnnnnnnnnnnnnnnnnnnaaagctgtgagccactgcgccaggcaggtactactttttaat

SEQ ID NO: 17848 - DNA, 795 bp, Homo Sapiens
gcacgaggaacctttcaagcattttctgttattgactatataatatagcctccataaatgtttttaatgacaatattctgttgaacggttgtaccatactcagccatgccctttcattttgacgatagtgtttctaatattttgtatttttattcccctccccccatttttgtattacttaagatagattatcagaaagacagttactttgtcaaagagtatgggcacttgatacataatgccaaattattcttcataagagctgttgccaaatcagtgataatgttcatttaattggattcttgccagccatgtttactggggtgatagttgttattgtggttgttattgttctttaggggtaggttcccaatatgtggtctttaaataattatctaatggtgtttaaaaagatgtttattctgtttgtcaggtacaaagatatttatgatacatgtatgacttgtctaagttattaacattttctctagccttaggtaatgcatgaaagcacatgtttcagtgccactcacataagaagtgcccggtaagtgttagctattattgtctacttgagttactactttctaaaagtatgttgaagtctttttctgtaattgcagatttgttgattttgcatttgagtattttctatattttgaagctgttagatgcatagtcatgatttttggtggaatgttttatcaatttttgaaagttgcctttgtctcatataatgcttttcatattgaactatattttgtctgctattaaatacttcaagcctgaaaaaaa

SEQ ID NO: 17849 - DNA, 941 bp, Homo Sapiens
  misc_feature (405)..(414): n is a, c, g, or t
gcacgaggatttgatttgaattccttgagaattgtaattatccacacttcctccagctataattagcagaattaaaaatgattgtactgtacaatgagttgttgaaattgtaagccttagtaaccatctttagctttattgtagtcatgtttagaaaaaattatttttacatatgcctttatttttatgcccactttttgtggataagattctttagataaaatctaaagaattttaagtgactttctccaggtcatgaagattcaatgggtagaattgaatcagaattgaaatgttccagattcatattcttgtgtgtgtttgataaaattcatggcttccaaagtaactgaacacttcctttgggcccttggagggaaaatccatatttttactaattacacnnnnnnnnnnagacatctggcagttctttgaacttaaacatattctcatggccatagttccaaattaagcccgacgcagttgctaaaaatcttgctgcactgttgaatactaataatgcaacatttattggatgtttttgcattttgatgaccttcatgattcatttataagtctttgtaagtgcttaagtgaccccctcactagtgaaaataataaatgttctatatcatttattattatttgtgtattctctacatgatatattttttttaaggaagagtaactccacatgtcagagtgagtgatattatcctagggcaaagcgcaaatagggcagtttgtttctactctgcaaatatggcatgtataggaacaaaactcttttggagtggctggtcattgttttgccctcttttggtacctgagtacctttctggggtttgtaaatcgtgtgtcatttgtaagatttcacgttaactctgcgttacttggtgttcacctgtggtatcttgactgaccataatgattagtttggg

SEQ ID NO: 17850 - DNA, 247 bp, Homo Sapiens
gcacgagggagactttatagagcgtgtattgtttgttatacgaacctaacctaccttgttgttttctcatattaagaaatttaaatctactttgttttagtgaagctattttggtaatgtataagcaattttggttctgtttagggagaattcagggtttccatgacttgatttgagctttgcatatttcaaataagtaacacagccattttaatttagctaaataaaaaaatttcttttttctctc

SEQ ID NO: 17851 - DNA, 949 bp, Homo Sapiens
  misc_feature (136)..(224): n is a, c, g, or t
  misc_feature (803)..(816): n is a, c, g, or t
gcacgagggagaaatcttccagaaggacatttcagaccatattgctttctagattaaaaaacttcaaagacttccaagaatgtacaaagaattctcttgaattccttcctctggtcttcagggccctatgctatgnnnnnnnnnnnnnnnnnnnnnnnnnnnnnnnnnnnnnnnnnnnnnnnnnnnnnnnnnnnnnnnnnnnnnnnnnnnnnnnnnnnnnnnnnggcctgtacctagccatttccctgttcttgcatttccaaatctcatctatccttcgagagttggcttttacgtttgtcttccagctagaagtagtcttttcttcctgggaactcccaatggccttttcagtttgttattgtacttagtatcctttctgttgaactgtggttgttcatggttactggttgttatagttagttctttaacgcatggattcctgtctcattattctatttcttgtgtacgttttctggtacacgtatattcttaagacatataaagagctgtcttgttctgggggtatttcttagttgagaaaaataaaaccttggggatactttatatgctaaagataaaaatgattgtgtgttctataaagatctacaaaaatatgcttggaagtagttttgctaaaaaacaggtataagaaattagatatatagatgagaccttggatgacttgactcaaaccactttcagacagatgaaacgtaacttctaaatctttctagaaggttagattttacgatatgctcaatcatttaaacagttatttatatgagacttacaagcagaannnnnnnnnnnnnnagtatttttacaatatgcagttcacattttatgtactcctaatttacttcttgttattcttggaattttttaaaggattttcctgattcttaaatggttctattctttttgcagttcttctgttaatgatatg

SEQ ID NO: 17852 - DNA, 436 bp, Homo Sapiens
attataataccctatggagatttattttattaatgcattagtaactaaaagacctccaggtcctgaactatcgaacctgccttaaaaatttcagttggggcgagctcagaccatagcccaacctccgagcaggacatgcttttactttttattacaaagaaaactactatactcgattgatgctttaacttgaccaaatgaaaaatttaccctaaggatcacagccctcccctattctagagtccatatcaagcttagggtttattacctcgatgttggatcaagacatcccgatggtgcacccgctatgacaggctcgggtgttcattaatgatcttcctaattgatctgagttcagacttttttcttccaggtcggtttctatggaattcactttccaccctgcaccaaaggacgggaaaaataaagactactt

SEQ ID NO: 17853 - DNA, 587 bp, Homo Sapiens
gcacgagggacaggttgagacctgctttcataaggcatttaaggttcctttcccagaagcctgggggataaaaatgctgctttgccactagtagacagaaggagctcctgcttctctttcttcctgacatctgtggtgggatctactgagtctgaaggagtctgcctagcggggccactgtctggctaacaagggttttgtttgttagtttgtttacttagtagagtatgcagactggggaagacacctaaatatcttgggagaattgaggctcccgggggcagggagggattgagagggaatatgcctggaaacctaagagaaaacgagaggaagaaatgtagtatgaagatttttataggtaaaggagaggtggcataagttctcctttccaggaagcctttcagtaaaattcccatttttctggaatgctttgaggtagagccgcttgggtgtgtatctgagtactaagccctgccccagggtggacccagtggagagcaaaggcttttaaaggagcccagccaccataggtacacacatgtcctgccaccccatttgtctgtcccccagttctaacttggctc

SEQ ID NO: 17854 - DNA, 333 bp, Homo Sapiens
gcacgaggtccatttacgggtgaagaaatgaactcagaattaaagggacttgatgaagcccctttgaattgtgaatcaatgtagatttaagctctagggaggtgtcataatgcagtcctttagaggatggactggactgactgaaagtttatggacccagaaatttaattccagcattgaggctgatcttttgtttggattgttattttgcttattgcccatccttccatgtaggttccatgaggacaagggtgggtttcttcccccaccactgtgtctcagcacctaaagcagtgcttcacatacagatgttcaataaatgcttcttaagtg

SEQ ID NO: 17855 - DNA, 791 bp, Homo Sapiens
  misc_feature (436)..(478): n is a, c, g, or t
gcacgagggattatatggcctccccccaaaaaaaatttactggaataattgtagcaaggtcttaacatataaaagtgacatataaaaagtaatttctacaaacttagcagaagatgaaattaatgccatttgcaatagcatcaaaaacatgaacacttagggataaatttaacaaagcatatgaaggaaaactgcattttgtattgtgtacgttgtacgtgaaaaatacaaaatgttactgagaaaaagtaaagaacctaaacaaacagacaaatgctgttcatgatctgaaagacaatattcttagtcctccccaaattaacatgtatattcggcaaaattccagcaggcttttctgtagacattgacaaatggattctaaaagtccagtcaaaatcccagcaggatttgttttatatatatagatatatagatnnnnnnnnnnnnnnnnnnnnnnnnnnnnnnnnnnnnnnnnnnngattctgaattatacatggaaacacaaactagaatggccaaaacaattttgagaaagaacaataatttggagtactcctattatctaatgttaagaatgactataaagctacagtaattagtgctatattgacaaaaggctagccacaaacctatgaaacagaaacaagtccagagatacacccataaaatatggtaaactgatacttgacatgtccaaaaacaaatgaatgcaaaaaggataatcttttcaacaaatgggattggaacaattggacattcacatactctccccccaccaaaatctacttata

SEQ ID NO: 17856 - DNA, 754 bp, Homo Sapiens
  misc_feature (180)..(234): n is a, c, g, or t
  misc_feature (531)..(556): n is a, c, g, or t
gcacgaggaaagtttattcatgcacatagtcacaaatttgtgcataaaatttcaacaagttaaaaggaaccataaaaggtcattcagagtacccaagttagaaaaccctgcgtaagactttaaattttttgataatgtagagattttatattagttatcttgtgttattgggcctgtcannnnnnnnnnnnnnnnnnnnnnnnnnnnnnnnnnnnnnnnnnnnnnnnnnnnnnnaaatgaactgtagagtagaaatatgcaccaaggatattgaaagtatgaaagcaggaacatctaacactgccttggaaaaacagaaatccttcaatgcaaaagtttgaaggaggacattgccaagatgataaagaaagatacttctcaaagaaagaacatcagaggaaaaggcccaccagactgttcaaagaacagataatctaatccaaatggaatacagtgagcctttgggaagtattgaaacacaaggtaagtagccattctcttacactttcaggtgggcctgaatagaggggnnnnnnnnnnnnnnnnnnnnnnnnnnaaaaatatcacggcctccattgaaattatattctagaaaagttcagcctttactatctatgtatctgccctgaaatcacaccaaaatcctttgtgctttatttaactgaccattttaagtaaatttatttctaaagatgtaatttttaaaaactaaattaaaaagcagaccaataaagtaaacttcttacttgtaatt

SEQ ID NO: 17857 - DNA, 287 bp, Homo Sapiens
ggcattaaactccatttatttagtatttgaaacatgggggacatgtatggatttggataaacatttggtacatctaaaatccccaacaggtaaaaaatctgtgctttcttttgtgtacaagttgggggtttacctctggaaattttggtggtggggaaactcactctgggaaagtaatcaaaatgcctcatattaccataataactgggacaaaagtgatttggtccttaaaggggccgttccttggcaagaaaaggggtcacactttttaactaaaaaaccgggtg

SEQ ID NO: 17858 - DNA, 390 bp, Homo Sapiens
gcacgagggcaccctgtaactatgttaacaaccccagtctgtactacagaaagggctgcagccacatgagaattcagtccacacaagccccatggccgtgttccccacttcagccacagggctcagggagccccatctggcgctaaggggaactgctggggtgtgggtgacacctggcctttggcgttctgccttggggaggtttctggttttgttacggggtggaagaataggacctgggggtctcggatgcaacctgcagaccccgtggctcacccaaccccaggttctgcctcccagaccagaacgggcatggcctggtccttggcaccgaggtgcctgctctgtaaatatcaagggattacaactttaataataaagcagaacttg

SEQ ID NO: 17859 - DNA, 260 bp, Homo Sapiens
cctttaaaaccgcatttttgggaaaaaccccttgttcttgccggtcttgtttctcccttcaaatttgccctgggccccccgccgggccttgggtttaaaaaaggaatccctgaaaaacctcttttggacaacagttttgtccagggggaaatccacaaaaaacttggggggcataaggggattgggattatacattttcacataaaattttttctttaatcctttggggattttcctcttgccagggggatcggtccctt

SEQ ID NO: 17860 - DNA, 760 bp, Homo Sapiens
  misc_feature (602)..(616): n is a, c, g, or t
gcacgagggttatgtccacccatactcttgtgacaactccccagcactgtcctgcaataccatgctggccttggtagtaaaactccttggtatctgtgagagtcctctttttctatgccctagactacttttaaccacttttctctggaatgactcccacatttgattgggtattgaaagggtaacagcaaaatgatgattgtggagatggatctattaggtctcatgttggtcccctggttgaaactattttcaaaaaagccccaacaatgggcctgtcaccttgctagtcatccattcttaatgcctatttatcagccctctgaggtcatataaaagttgcaccttttgaaccaagtatttgtatttactatgggaaaggtgtggactacagattcgtattatattattttaatggattttaattaatttataagtatgctgagtgtaaattttttttaaaaactgtattataaaaggacatatcctgtgaaatataacattttactgtttaatagaataattctataagaagaatgatttatctcacccacggaactgattacattccggatgcaatcaataggcactttgtatttccnnnnnnnnnnnnnnnctgtgctggggggttgaggggtaacagataccatctgtataaagtgcagtttgtgtcactcaaaatatgcactgtatggctacacaaaagcgcttgatgaactaatcaccctcatggctcattaaagacaaagcttccagaacc

SEQ ID NO: 17861 - DNA, 716 bp, Homo Sapiens
gcacgaggccctctgtgtatcactctactgagaaatcctgcctagtgtgttttgggatgtgtcctagcatttacaagaaaatgaaaagcgtcctcttaattggcacccgaatgttgctgtggctcagtcacatatcccagggccctcgtcccgaggccgtgctgccccgagccccgagcccctctgcagctcacccttggcttgttttccgcaaacccggtaaacgcaagcccttggggcagatgcagaagcagaagagggaggggaaacctgcctctgggtcaccctgttagcacagcgttctcatcgggagacagcatggaactctctctcgcagtgctcgaggctgtgtgtcagtgtttgctgggcttgtggctccttttttggctggataaagaagtcgctgtttttgtactgcttctgtggctcttcacagacctcacggatgtgaccggagatgagtgccgatgaccacgttttaaaggagaaagagagctcctggtggggccctcggggtggtctcaggtcacatttgcagtctgcaacagtgacgcgcagcccggtccagagcgtggtgagctttgtttgccttctgggtcggctttcgctgtgtctcctgtgtgtgttagaatccagagcccagaggaagtgcaagcgggtcctccgtcaacggggagagtctcttcgcggcgctgttggcgacagcagcgctgtga

SEQ ID NO: 17862 - DNA, 235 bp, Homo Sapiens
gcacgaggatgtactgctgcttcctacctgcaagacgcacaatgtatgtttcaagggtgagcaagtgttatttcttaaatttctcaaatgcctgtagtaactattgtttctgcctctcaattgttgccagctctttgaagaaggggagaattgtgtgtttttgtgtggggatgtttctgatatgctgctacagttgcaaaacactggagctagagaaaataaagtactgatcttc

SEQ ID NO: 17863 - DNA, 931 bp, Homo Sapiens
gcacgaggagctatttttcaaaagcattgaatatactttccggaaagaaaacagaaattaaatattgccacatcttgccagaatcccatctgacaccttaactttgtcaggtttcctacaacttgctaatcaagttttatacattctaaatctccccagtttctttggggctggaagatgcaacttccatttaatagaaactttgaaatcttggggtaagggagcagtggggggactagggagaaggataagaaatagaattattgaaaagcccccaccagggaccttcctggccagaatatgcagagtaattcctgctggcttcacctttgaaagtccctcgaaactatgcagatgaaactgagtctgtttttgatattgtcagatgtattctaccttggaagtcccaacacctaaactggaattcttgtatttacatctcctccactgtcccccacaccacccctcaattcctgctgcccctgctaatgttaagcatttttctcttgttatcatcaggttcacattaaaaacagatacttacaaactgacttgaagcacagatacttttacgaatgtgataaaatattttcttaagaaaaggaaagaggatgtgggtcaaataaaacaccgcatggatgttgattggtgaatactggtgtaagaaaagggagctcaggaatttttattactgtatttgtaaatgagtttgaaggaatttgtaaatgccactggtacatttttaaggtgacacatttgctccttataaagttattaaaaattacagggtaagcttaaatgacgtttgccagtagttttactttatataatcaatattgatattgttgctgaactatgtaactttatgatgcatttttcagtcccttttcagagcaaatgcttttgcaatggcagtaatgtttagtttaaa

SEQ ID NO: 17864 - DNA, 400 bp, Homo Sapiens
gcacgagggcaaatgtcagcgccagcccagtcaaaagagcttgaaacctaccaagccggaggactgtgctgtgcctctctcgcccacattttccccaagcactctcaggaacctggcaacagtgtccccttgtggccaagcctggaacatcacatctgtacgttgcaatctgtggatcagctacgagactgagagaaaggaatgaaaggatggaagaattacaagatcaggcactgctgtctgtctgttccacggatgtaaccacagcacacgcgtggctcacggtactagtgtgataaatgcttgttacatgaaggcgtgaacagggatgagaagagacttcctggagaaacaaaaggactaacaatcaggaaggggaggtgatcggggcaggagtaaa

SEQ ID NO: 17865 - DNA, 484 bp, Homo Sapiens
  misc_feature (165)..(246): n is a, c, g, or t
  misc_feature (287)..(297): n is a, c, g, or t
ccccatttgatctttttgccaggcactctcctgcagtgtacaacctgtacaactgtacctggtgaccttgaatgtgattaggactgggagctccgtgaggccagagacctatgttcatttagcctacataaaagacactcaataaatagctggtaaaataaaatnnnnnnnnnnnnnnnnnnnnnnnnnnnnnnnnnnnnnnnnnnnnnnnnnnnnnnnnnnnnnnnnnnnnnnnnnnnnnnnnnncctcccgggaccccatttccccctatagggagccaaataannnnnnnnnnngggccgcctttttaaaactccgggaggggaaaaacccggggttaacccaatttaaccccctggaaacacatccccttttccccagtgggggaataaccaaaaggccccgcaccgatcccctttcccacaatttgcccaccctgaatggcaaagggaacgccccctgtaccggcccattaaccgcggc

SEQ ID NO: 17866 - DNA, 394 bp, Homo Sapiens
ttaaaaagtaagaagccagcactttattggctcacttgatccatggatagtgaattggggtcataacaacgtccttatcatacttaacaattttttaaattgtaatacaaaatgtgatgatataaagagctgttctatatatttaaatgactatttaaatatatgtatttcttttccaatttgtgattaagatcaatagaggtagtagtgatatatttccctctcataagtttcacactgcttatctctgaaacttcaagttgtcaggtgaggagtgcctatttatctatttctattccagtatgttttcactttagatttgtcacataaaatggagactgcgcaatgacatgcaaagtaatctgtttatgtgtctaaataaaatatgtgaagt

SEQ ID NO: 17867 - DNA, 892 bp, Homo Sapiens
gcacgaggcaggggttcttatgagtattcactcctttaacaaagcaatgaccactctaggacatagcttcctgtcttcctctgccctttatactgttaccatactttctgtcccttgtgcctatttatattctaaacttcgtttttacatagggatgcaggtgccgagaagactgggtataggtatactatatgattggaaggctagaggtggtcctttattttattgaaacatagcgaagaaattatcttagaactttgtgttttactaaatgaatatgaaacttcacatttcatacagcagatattaagaagggcctgctatatacctaaggccatactagatacatgacattcatatatcgtttgattcccacttcaacccagtaaagtgtaggtacttttacttccttctgtcctcattgaggaaactgaagttcattgagactgtgcactcacatcacccagggaataagtaagatgtgttgttctagagctactactgctactactggctggtaagagccaattgttaaatatccaagaacttgtaacccagccatggtttgcattggccacaggaggcacatttataccttagaaatcagcaaatgctgcaaatcagagctctctttgaatttccagagtcatttgctaggacacagttgggtttgaacctaggccttttgaactccttaatcctcaaaaccagagatgggtaaagaattgacatacactcaagaaagtctcatctgtgctataatagaagcacatggaaaaaatggtggaggctatttttgcatgtgatagtatatttttgtatttccttatatatttgaaatggagtaggaaagcttacggtgaagattacgaaaagtgaaataaatcgtttt

SEQ ID NO: 17868 - DNA, 596 bp, Homo Sapiens
  misc_feature (67)..(310): n is a, c, g, or t
  misc_feature (371)..(502): n is a, c, g, or t
tgggctcaattgatcctcccacttcagcctcctgagtagctgggactacgggtgcatgccaccactnnnnnnnnnnnnnnnnnnnnnnnnnnnnnnnnnnnnnnnnnnnnnnnnnnnnnnnnnnnnnnnnnnnnnnnnnnnnnnnnnnnnnnnnnnnnnnnnnnnnnnnnnnnnnnnnnnnnnnnnnnnnnnnnnnnnnnnnnnnnnnnnnnnnnnnnnnnnnnnnnnnnnnnnnnnnnnnnnnnnnnnnnnnnnnnnnnnnnnnnnnnnnnnnnnnnnnnnnnnnnnnnnnnnnnnnnnnnnnnnnnnnttgtgttcaagcgattctcttgcctcaacctcctgagtagcctataggcgcctggctaatnnnnnnnnnnnnnnnnnnnnnnnnnnnnnnnnnnnnnnnnnnnnnnnnnnnnnnnnnnnnnnnnnnnnnnnnnnnnnnnnnnnnnnnnnnnnnnnnnnnnnnnnnnnnnnnnnnnnnnnnnnnnnnnnnnnnacataactttttatttctttttgcactcaaccttatagcataagcattttccgcaaaaacctcctcctaaacaacagagcaaggctctgtctca

SEQ ID NO: 17869 - DNA, 874 bp, Homo Sapiens
  misc_feature (261)..(535): n is a, c, g, or t
aatttcatgtggttttattaggcatcgtccattttttaaaaatgagtgtagtcagttccaattaggaatctagagcttctgtattttttttatcaacttctctttagtttttcaaaggaatcaagttttgtgttccagtatgtcaaagtataatgaataaaacttttagttgacaaacattaagaaaagttaaatgtaatagacacatttaaatggtttacaaattaggggcagtccattgttttttttcttgagctggannnnnnnnnnnnnnnnnnnnnnnnnnnnnnnnnnnnnnnnnnnnnnnnnnnnnnnnnnnnnnnnnnnnnnnnnnnnnnnnnnnnnnnnnnnnnnnnnnnnnnnnnnnnnnnnnnnnnnnnnnnnnnnnnnnnnnnnnnnnnnnnnnnnnnnnnnnnnnnnnnnnnnnnnnnnnnnnnnnnnnnnnnnnnnnnnnnnnnnnnnnnnnnnnnnnnnnnnnnnnnnnnnnnnnnnnnnnnnnnnnnnnnnnnnnnnnnnnnnnnnnnnnnnnnnnnnnggggcagtccctttccacaggtcttgagctccagcacagaacacacttgttctattccgtgaagtatggctcagctgtatttccaacggattcatctttcttgccgatgctacctttttagaggattatacagggagtattcaaggtaagctaaagtaaaaactatggaaaaacagctcattaaatacattctgagtgttcacagaactgtaggcagtgacacattttttgtcattaattcttgacaatcacatacaccgtaaacctacaggaatccaagaactagaggtctgaggactctgaatcttcctgcaagttacatatgatttaagagaaaaa

SEQ ID NO: 17870 - DNA, 852 bp, Homo Sapiens
gcacgaggctatctgtgagtgagacccattcatgacacactagaaatgtgtacattcttttgttttccatcacgggtataggtcttctgccatgaaagagaactatcaaggaaattcctgaaaacaagatttgtaaattcgatttgaccctcccaaattcagggctgctctttgcagtggtccctggcccagcaggtggccggcgtggctcctgttggctcatgccagtgttgtgctggaccctcgagtatgtgactgtcacccttgtccaagactggtttttaacagtcttgatttgtcattttgatgctttgaatactataaggaaaatgccacgaataccatataaataccacaccaatctgttgaacatatctgtgttttctgacatgggacctgcagaatagtatttcttttaaatcctgcaactttattatctagtagaattccaagtaggtctgcttagacacatattcagtgaagattgtattgtgtgtgatattatcctatctttaataaagtcctactactgaaaaacagggatttgcaatgaaaatcatagctaaataggcaggtttagaaagttcaaaatattggaagtgctagaaggctgcaacttgtaaaattgtactccccaagttcagtaggatagtagagaagtcgtgctaagttgatttcattgaaatgtcacgtctcacatcctgtggtccaaaggtactagtttgttttgtggaataattttctgttcacttgctgataagaaatttagcagtcagaagtaatttttaattaataacctttctttttaaaagttgctttatggtttacaagtatactgatgcaaaaggattt

SEQ ID NO: 17871 - DNA, 525 bp, Homo Sapiens
gcacgaggctccaggaacttttctaggtgctgctggtcagtgaagaaaacaaagcctgctgaagttaccatttgaaagactgaacagaagtgtgactttaaaaaatgatttggcaaaagtatgctttaaataaataaacacagcaaacaaaaaacacaacagctctttcattctgtcctttcctctattctttctcttgtctcccatttttgtcctgtgtgtaacctgactccacaccttttattctctcactctgcttatcaacacagccatacttgcttctcaggctcttctgtgtctctttgttgtgtctgctgtgcttcatcatgtggcgatgaagtagatgaaggttgttggtggccggaccccaacttcgtattccttcttagctagttccttgattgatctccagacatggagtggcaggtaggtgctcttgttgtaagtcacagaacctggaggaaagagtggttcgtggccctggggcctctgggggctgatgcttggatatttgtttagatattt

SEQ ID NO: 17872 - DNA, 861 bp, Homo Sapiens
  misc_feature (673)..(682): n is a, c, g, or t
gcacgaggcgaaagaagcctgatccaaagaaagtacagaatggggcagagcaagatcttgtgcaaaccctgagttgtttgtctatgataatcacacctgcatttgctgaacttaaacagcaggacgagaataacgctagcaggaatcaggcgattgaagaactcgagaaaagtattgctgtggctgaagccgcctgtcccggcatcacagataaaatggtgaagaaactaattgaaaaatttcaaaagtgttcagcagacgaatccccctaagaaacttattattggcttctgtttcatatggacccagagagccccaccaaacctacgtcaagattaacaatgcttaacccatgagctccatgtgccttttggatctttgcaacactgaagatttggaagaagctattaaactattttgtgatggcgtttatcattttatattttgaaaggattattttgtaaggaataacttttaatactatagtttcacctgtattctagtaaatgttgagacaccgttttgcttttaagtatccctatttcttaagttacgaggatgaatacctttcacattttgatctttagttgactctacagtcatgaaacatacaggtctttcaaagtcattctcaatattcagcttttgtaaattatcaagctttcaaaaagcnnnnnnnnnncatgcatattctaaaaatgactattgggtgggggaggtgtaaataagtcataccttctttaaacagaaaatttaagtaaagtctttttaaatgaaaacctgtaaaagtattgactcttctaccaagttggtatgatattccaggcagctcatggatatcacatttgagaccctgtgttt

SEQ ID NO: 17873 - DNA, 917 bp, Homo Sapiens
gcacgaggatccttcacctttggtgatctggtaacttagcagaatgcttgtctgcagaacaggtatgtgctaaatgctgaaaagcaaaggacattcatctcactaaaaatgtctcccaacaagcaggctgctggggggtttgtagcgcttgtagggtggctgagttatttctttctgcaaacactcctgtcagcattatagagacttgcactatctgttaagtaaatgtgacttaggagaaggaacgacaccacccattcatggggtcatggctgcaagttactgccctactggttttctctttacctgataactctcaataattctaaagtttatcttagagaaaagtctttgagtcacctattttggaatttgagcccagtgaaatgataagcacctgcagtttgtatcacgtctctctctaaccaaatctctgagcattcttgtagcttgatagcaaattgggtgaactgctccattcactaaaagattgagttcagctttattgcaaacagaattatgaaggtctgttctcatgcatttactcagcctccttcatctgagtcacacaccactggaagtagcccctccttatattaagcaatattgacttgaaatggatcatttcctttttttaggtttactaaagaataccagagaaagaactgtatcttaatctatcttcctttccaatgaagtaaaaaacaaattatttgacctccaaatcctcagttaatgtaaattttgcatttgttgaaaacttggtatttcgcaggaaagacatcacgttttgtactgaacataacattgaacacgaagaacctttataagtcagtgtcactgggctgaaacttttactcctatctgaatatgttgggcttttgagagctccttgggggattgatgttgttgttttt

SEQ ID NO: 17874 - DNA, 741 bp, Homo Sapiens
ccctccgcggctaccacatccataacgaggaccgtttccgtggctgggtggggtgtatggctgggactggggccggattggcccttcctcctggggtgaaccctggacgccaaagacgctggggaatgattctgcccgacccatgacctgatggcttgggcgcccgaggacctggtgcctcagatcaccactgtcaattgggagaccccccatgttgcggccatgtcactaagtctacctggagggccggtgcgtggacgggctcgaccaatagggatacaatgggaatgtgtgcctgcctggctggaccccctgggatgcatatcactattggacggctctgacaccgtgaggctggcctgaggtgctgggccctgggcttctaccctgcggatatgacctgacctggcatggggatggggaggaatgatgccatcacacacctctcgtggaaatcacctgtgccagggatggaaatggccccaagtgggcggctgtggtaggactttatggattggatttgacatactgtgggccatgtgctggcatttagtctgcgcaagcctttcaccttatgatggttcttatcttcctttcccactcatccccgggggagcatcatagctagtctgatctccttgtagctgtgtagtcactgtgctgtggtcgctgcgtgatgtgagaaggaaagctcatatagaaaggagggagttacactcaggctgcaaaggcacctgcatg

SEQ ID NO: 17875 - DNA, 862 bp, Homo Sapiens
gcacgaggcacccccaattattcattccttaccaacctctcaaatcctcttggctttctctctgcagtgtggacactgttggctagtcctccccactccctgagggtccagtaagttagcttagaaccttcctggaaacatttcatctgagcaggtttccccacgtgtgggatgctccttttgcctcatctgtctcagggatgcaggctcccccgcatgcatggggatttctccccagaccagcatacttgtgacctgagagttcaatgcgtaaagatgcccctggtcagccatatccatcttctcttgcctggtccttgattctctggccgctccctgaccttcctccttccactgccttgactttcttcctttttattcctggtgccatctgtccaggcagctagacaagaacttgttcaccagcagccggattcaggccttcccaggggcataataagtgaccagcccctcctctccggacatcagatccaacacataaggaccctggcctaccctccagcccaacagccagttctgggtcagctgccaacttaggggtggtttgattatcccattgaaattcaccagtgcctttgccaaagaccctctcatttggacatacccagattcattccctggctccaactgaaaagactcagtttcaatctttaaaagttccctttagggccagaagaataaatgaattataatcccattttgaagaaccgatttataaccaatgaaaaggttataatgtaatttatattcttggaggaacaagattttcatttgggattatttccttcaccatttcaacaaaatttgttgtatgccactaagcgccaggcacggcgttggg

SEQ ID NO: 17876 - DNA, 520 bp, Homo Sapiens
  misc_feature (68)..(119): n is a, c, g, or t
gcatttttttgataccgtctttttaatacatacagtggtgggccgtctccaccccactcgggaacaannnnnnnnnnnnnnnnnnnnnnnnnnnnnnnnnnnnnnnnnnnnnnnnnnnncccaacttcccgttgaaactaatataatatgggttacaatgaaagctggaacctctttttaatgcccttatgtactggaaactgggttaaaaaaccccaaacaagaaactaaatcactggacgctcggctgcaagtacaggaaataccttggggcctaaacccggggctggggaagacctctgagggcctgtcaaaaccggaacaagggggaagacccttccggggttaagctcaatggttctttccctcagcggccccagggaagagagccaacagtctacaagaggcccctcacctgcttttgcccaaaataaatagcatcctaattctgtgagcgccgcccgggaattaccctccctgcctttctttgtccaggaagggcggtggggggcccgtaccc

SEQ ID NO: 17877 - DNA, 365 bp, Homo Sapiens
  misc_feature (106)..(119): n is a, c, g, or t
  misc_feature (166)..(184): n is a, c, g, or t
  misc_feature (207)..(296): n is a, c, g, or t
ctgtcctatcctttggttaaaaaaccctgcttttgtcaaaattcccaaaataaaccctaaaaaggggggtttttccgaagggaaattaaaaactttttcttttttnnnnnnnnnnnnnngaaggcccggcaggggggcccccccctggaatcccgggggccctttnnnnnnnnnnnnnnnnnnnattatttgaggttaggaatttgnnnnnnnnnnnnnnnnnnnnnnnnnnnnnnnnnnnnnnnnnnnnnnnnnnnnnnnnnnnnnnnnnnnnnnnnnnnnnnnnnnnnnnnnnnacccggggggaggagggcggaaaatcactttaacctgggaggggggagttgccttgagctgaaacaccg

SEQ ID NO: 17878 - DNA, 681 bp, Homo Sapiens
  misc_feature (192)..(222): n is a, c, g, or t
gcacgaggcacacaatatagtagcatcacgatctgtgtatatttttgatcaagatgataataatggccttacttgggtttttatcgtttatcaaatcttacatacaaaagagtggaagtattcctttacaaaatttctaaggaaaatatttcttccaatctatcacaattatagaatggatatatgtttctnnnnnnnnnnnnnnnnnnnnnnnnnnnnnnngaactaaaagtaagctggtatttaatatcccgttgatatttagaaaagattgttaataagaaatggaggatgcatttagtactatttttatccactagttcactttcagtacagttatgtatacttgttttgattgagagtgtgacatacatgttaaatcagattagcttgtttcttttaaatatacatatacacaaatacatataattttttctcctttttgttgtgcatatctctatgcatttttaaacttttagatttgtgaatgacctatgtgtaaatttttgtttttataaaccagaaattatacaagttttaatgtgtgtcaacaacttgttccatacaactgtggtatcgagcaataatgttaataacttttgggaattatataaactatgcttaaataatttgtattgagaattggtaccactatacaatacttttttcctgtattaaatc

SEQ ID NO: 17879 - DNA, 847 bp, Homo Sapiens
  misc_feature (130)..(143): n is a, c, g, or t
  misc_feature (562)..(575): n is a, c, g, or t
gcacgagggctatcggcggttggaccggcggctctcggtggcgttccggacgcggatctggcgccgaattctcacgagacctgataccttccttatttgtatattctcttacttaaaaagccagatgtcnnnnnnnnnnnnnncattgaaaagagaaaattgacaaggtaaacggtcgtttggaggggccacctggggacgcggcccgagccctggctctacctgaaaaatatcttctatttgccacacttcctctccccgtttcctttcttcgcccctctcctctttccccttcccctcgaaggtaatgagaactactggaccgattacgctaacctcttggccctttgtcaaaaaatggagccaaaaaggttgatttagacagaccccctgctcagtgcagcacctgttattctctgtatttatattaccaagggccttcggtaaattatgaaaaataggatgccacctgggacaacactgcttaaacagcactggaagacctttataaatatactaggttgcttttctccaatcagcctagccttgatttgaaattcannnnnnnnnnnnnngagacggtgaaattcatttttaaaagatagttttaacctcagcgatctctgatgtttgcgctaatacccttttaaaggctttcagaaattttaaagaattgctatgaaaggaaaagtaacattctagtttttctctgtaaaagaggttcacaaacggcagatcgctgttatgaaaaggaggggtggaagtatttaaggaattgtggcaaaccaagtcacagaagattggatataagcaaaagtagcacactgaaaaaaatggggaaaagtgg

SEQ ID NO: 17880 - DNA, 929 bp, Homo Sapiens
  misc_feature (586)..(823): n is a, c, g, or t
gcacgaggcctaaaactacatgttgaagcttccggtcatttccattattatccttcttttgaaattcaagttagtgctttttaaccaaataaaagaagaaccagctcttgggatatgtgactctgcctctgtataaagtgactggaattttgttaaaaccgtgtttccacttctgaaccctgttaccattccccctcacaaatccccacccaacacctggattttaaagatcctccagtgtcaagggaagccacagagtctattaaagaggcagttctgaaccaattaatttttgtccttataatttagagcattaaatagctaatatatttaatggcactaattgttgttcacggctttcatcatacttttaaacagaatccaaagtattcaaaggaaagtaagcgaagttatccaaagccaactttgtttcaggtgtgtcccctgccccaaatagattttagggcagaaatagaaaactgagtttacacagaactatttttggaaaagctgcactggagtagatggattcttcttcagcatacttttttgtttgtttgtttgagatggagtcttgctttgtcannnnnnnnnnnnnnnnnnnnnnnnnnnnnnnnnnnnnnnnnnnnnnnnnnnnnnnnnnnnnnnnnnnnnnnnnnnnnnnnnnnnnnnnnnnnnnnnnnnnnnnnnnnnnnnnnnnnnnnnnnnnnnnnnnnnnnnnnnnnnnnnnnnnnnnnnnnnnnnnnnnnnnnnnnnnnnnnnnnnnnnnnnnnnnnnnnnnnnnnnnnnnnnnnnnnnnnnnnnnnnnnnnnnnnnnnnnnnntgaaccactgcggcccggccagcatgcattttaaagtggcttaagatttagttttaaatattttggggtgaaaggcaggaacagtctgtttttgacatacaggttt

SEQ ID NO: 17881 - DNA, 819 bp, Homo Sapiens
  misc_feature (369)..(380): n is a, c, g, or t
acttcaaaattttactcccccaattttctaaaactggctactatgaaactcgtaagcccaaatcaacaaaggtggccaccagccacagatcaaacgtgaaaaaacaaatctacctctagcagcctgggatgtactacctgctcaaagtataaggctactgccatctccagcagctgtaaacatagcctggctgccagcccataacctcctcagccttccagtttgtttttataagcttacaactggggctacagagtaacctctgaaatgttattattgaaacatgataaagcaaaatcagtcttcaaaggttaaggaggcagtttttaatcaaagtgtggtcaacaggtttgacattttaaaaaacannnnnnnnnnnnaaagcatcattaaaacagcctcaataaacaggccgtatttagcccaaatcttgttcaggaaaacagcatgggctccgtttgaattttgttggattctggacgtcctcctcctattatataggtctgaaagttgtctttgttaataaaatttagctttgtttccccaccagtgataatgacatgaagcactaggaaatgatgcaataaccgcagtgcatgaggccttcctcctggggaaggtgtgagacaggaggggagcaggactcccccatactcagtccagtggaagcgcagaatgcctgctcgtgttggtaaaaataagacaggaatgtaagaaaaaaagtcttcacgctcaacgtgactatctttggaattcattttcatttagggttttcacaaaatacaaagctcaacgtaatcatctatgtccaccacaaaa

SEQ ID NO: 17882 - DNA, 916 bp, Homo Sapiens
  misc_feature (239)..(253): n is a, c, g, or t
  misc_feature (662)..(684): n is a, c, g, or t
gcacgaggaatttgtcctctctcattcactgatccaccagcctgactgctaagagctatagtctttttagttgttttgtctttttaagcaagatgaaaacctttctattagggattttggggttgggaggggatgggcagagatataaaccccagcctttaagactttgacaattgtacgtaaatacagatgtgtataaatataggcacatgcatatttttatgtgaaagttgattttnnnnnnnnnnnnnnntctaaactgcactcttattgataccatcataacgcaagtgggaaaaataagagtacgcagtctaatttaatttcatgcagtgggaaaatatatatgtgtgcttctgtaacatcctgaaaacatagctttccatcccctgttggctttgaatggtgggccgagcacccaggtcgtctgtattttggttttcttttgctaagcagagatcttgaattcttcaaggtgctgatagcaactgctggctcctttctgtagtcacacacctaatgctagtttagtgattcaaaatgcatcacatttttaggcaggacctagattttccctgtcaacctaagatgaaaataatttcagtgttgattcagaactgaacattaagtaggccctcgtcctgcagttggccacttgagtnnnnnnnnnnnnnnnnnnnnnnnaaggtgggcattttcctttaacctctactttttcaaaagcaacaaaggggcctcaacctgagtttcctatggacctctcttctgcatccccaaagcggccaagagcaatcctggggggataagaaaaaagtgtaaactaaggtaggattgtgatgctcaaataaccatctagcatatcttggagcttgagatagatttgtgggcttattcttctgcctctccccatctttca

SEQ ID NO: 17883 - DNA, 536 bp, Homo Sapiens
ttgtctgtatagcattctgatgattagttcttcactgtgtattaagattgacttatgttgctgcatgtatggctaattcatccctctgactgcttcaaaaatattccactttattcatatttattcaacattttacttatctattcccccgtgtactaaaagtcaaaagcattactaatttaataatgtcatatttgttcttctaattattttttgctgcataacaaagcactcctaacttagtggcttacaatgataacagtcatttattttattcaaaaatctgcaatttgggctacaattggcagaacagctcatctttgctccttacagtattggctggagttggcgatgactcagcagatcaaggctggaagactcattctcgtcaggtggttgacgttggctgtcagttggaacctcacctggggctgtttgccagaacacctacacatggcatgtcccatggagctatttgacttcctcactgcatgggctgggttcccagagcagttatcccaagagaacaaggcaaa

SEQ ID NO: 17884 - DNA, 219 bp, Homo Sapiens
gcacgaggcccagagctgctagagaagaggtacagaggcagcgaagacacgttgagggggaggacgagaccaactgcgagacgccgagtcccgggctctcaggacgctctcccgtacctgcgccctcgtcagcccatcaccgaaagaacggcctgacccagggtcacactgcactgaatgcttcctgttttgctgtctctcggaggataaaagacactc

SEQ ID NO: 17885 - DNA, 730 bp, Homo Sapiens
  misc_feature (74)..(145): n is a, c, g, or t
  misc_feature (495)..(519): n is a, c, g, or t
gcacgaggacctttttccagggagtaaatattttacgctttgcatatataatttatggaggtgttgagaggatnnnnnnnnnnnnnnnnnnnnnnnnnnnnnnnnnnnnnnnnnnnnnnnnnnnnnnnnnnnnnnnnnnnnnnnnaccatcagtccattttaccgaggaaggagccaaggtccaggcccactgaaggacttgcataacattacaatagcagtggcagaaccagccatgcttctgcaaatcacaacctctttgagcctctgtcacctgaactgcaaaatgagtgggttagacaaaatcatctgttgggacctcctagttccacgtgctatcattctactaactggcaccctaaggttgaaagtgcttatctgctttccaatgtggcttccttacagtctggaactgacaatatgcaggagcagtaaactggcagaaaaccaggaatcagagaaagaaaatataatttaactttaaagatgtaaatnnnnnnnnnnnnnnnnnnnnnnnnnttttaaagctttatatgcctcaaatatcagggaaaggagccaagtccttggtatttagtttggtgaatacttgcattgaatacatgtcaagatgtcaagtcatttttgaatgtgtctcaaggatttctatgctacacattcttttaacaaatcaagtatttatgtacacatgttcagattttttgacaaaatgattaaaataatgagatgg

SEQ ID NO: 17886 - DNA, 676 bp, Homo Sapiens
gcacgagggccccgtggggtggcatctggtttctggtgctattctgccaagttatcgagctcctcctcatgtttcaacattccatcttcccgtttctatcctcgactccaaagtaagccttcttagctccaatcagggatgaggggctcaacctcttctgtcctcaaagaggccaaacgcagtgccacagtcggtagccttcacttttagatgtcctattcatgtaaaaaagaaggtgcccccaccaggcttacatcagcaataagcaattctaatgcaacgatggtgtccacattttaccccagtgtgtgcccatgtatgcctttgtgcccgtgtaattattgttagcgcccctttcacttagaggggtgatgataaactgtggccaccttgattacaacccacatttcctgctttggggagcttccaagtaacaggccatttcttacctccctccaggaacagtgggcactgcccaccacctcgtgtctgctcataggatgacgctggagatccccacacttactctaccctcttggcaaattggcattccggtggtggtttttgtttcctttaacacattaaataaatgagtatataggatgtgaggggaggggtgagaacaactagctgtagcatgtgtaggctatatacttttaccattcgacttctttcc

SEQ ID NO: 17887 - DNA, 339 bp, Homo Sapiens
  misc_feature (226)..(244): n is a, c, g, or t
aggaattttaaaattttcagttccaatcaggggggcggggtcatttcaattccttccctgccaaaccgggggggagggaaggcttcattttccccgccctccctttttcagggaagaccaggggggaaagggatccgcggcctccaactttaaacttcccgttgtccttatttttcttgatcttgacaaatttggcctcctttcctcggggggggaacaggaaatnnnnnnnnnnnnnnnnnnnccaaagcatggggaaaaagcccgccgggctctggggcggaacaaaaactttcgggggggcccgggacccaattccccctaaaatgagtcctaata

SEQ ID NO: 17888 - DNA, 978 bp, Homo Sapiens
gcacgaggtgccttgtagtagtgttcggaatagatcttaaagtacccctcttagattattactgcgaagagacgttgtaaaaaataaatcagtgatttttgtagtggccaaatgtttgaaaagttgatccagttaacacaagttttagatgaagttcttttaaacatgaagggaggtaagatgtgtttttggaaaagtctatttagttctgcagagcttttaaacgtgaaagtacaggttggtacgatgcacaagtgcattaatggtgtcaagtttgtagagagataagattaacacaagcttcttcgtaagagtgaagaaactggaaccttgtaggatgtgctttgccgggtggtttggaagtactaatgcatagatgaagcgaatcaaaatgtcagaagttcttgacggtagtgttgtaataagattctaggttttagccttaaccttgtccaagctggagtggacaggcacctagaatactttgcaactcccttcatgagaaggtggatgagacaggattaagggagatgagctaagacggatcaggaccctactctgaacatgtaggacaaggattgatttcatatgaaaattgtgggtatgcaaggcattttgtatgcctgcactctaattttggaaaaatagtatttttttgaaattgggaatgttagggcaaacaaaaggaagtgttcattttatttgtggtttcataaactaagagacctttcatgcctgtagagattggggagactggaaagtttgagtgagtcaagagtgctagaatgatttccccatcaaaagggcatgaccccaagccccaagcttgtacagcagcatctgccccattatacctctggcactcaaggcagtgatgcctcttgggcctctggcaaaggagcacacttccgttagttttggtatttgtatggacttttataactatgacgtttctggttctgtttaatctgtttttcc

SEQ ID NO: 17889 - DNA, 276 bp, Homo Sapiens
  misc_feature (52)..(65): n is a, c, g, or t
  misc_feature (112)..(170): n is a, c, g, or t
ccgttataaaaaatcccccgggctgcaggaattcggcacgagggccctttannnnnnnnnnnnnnatatgtagcattatttataatagtgaatgattggagacaaatttgcnnnnnnnnnnnnnnnnnnnnnnnnnnnnnnnnnnnnnnnnnnnnnnnnnnnnnnnnnnntttttaaatgaggtaaatttccatgtattaatgcaagaggaggtccagaatacaatgcaaagtgaaaaaagttgcaaaacagtacatataatatcccatttcattt

SEQ ID NO: 17890 - DNA, 656 bp, Homo Sapiens
  misc_feature (538)..(559): n is a, c, g, or t
caaaaacgtgacctgaattctattctgtgagagcccagctctaatttcttgctcaattaccctgttacctggcccacacactttaggttattgaacctggatccttgaacatggactaaaggatatagaggtggtggtaaaactggtaaagtttgtaggtaagtgggagccacacagaatcatgtactctggcctgcttgtgggaattaaaatcaagtaactgctcgtcatgtgcccatgaaaatcccagagacgttttcaaactgttgtcagcctggtttttgttttattttggcaacatgtcaatctatgccagtaggagcatgtgtgctcacacttactcatctcctcattccattggtatccagtggtctatgggcaggtccctctgctaagcactgggaatacaaaggtgactgaaaggtcctcctgttaataggtaaacaaaagcagccaagaaaatacattcaatacacagcacacccagaagccaaaaaggaaattttaagaacttaaaatttaaaacatttatatggcnnnnnnnnnnnnnnnnnnnnnntccatagccaaagtctaaggacaaatactacattggttgttcaaaataaatgtgacagataaatggctacttaattttcaaaaagttttaccaaatt

SEQ ID NO: 17891 - DNA, 725 bp, Homo Sapiens
gcacgagggaagcaaccgggagctatgtctactttcttttttccttacctagttatttgcactggttggggtagaacctgagaaatcacataagccaagaaaaaaaatggcattcttgaagccatgagcaggccttggtaacctggcctctctcacctgcacaatgctctctatccacttcagagtcagcattacccattctcaacttggagtgaaattacatgaggcattcagtgaaagagatgaagctaacctggtcatgtctaacacctgcaagaggtcttcacagcccagcttctgaatgagttacctttctatctgagagccactacaccaagctgctactttccattccatcattaaataaagcctgtttgggattattttatgttttggattaattttactaccattcctttctaagtcaatggttgagtacacaatatgtaatgcaagatgttatctacatccagaaattttaacagccatggaaattcaatgtgtatttcccaaaacacataatgaaatgccttaaattttgaaaagaaaaactagggccatataaccacttatctcaccccaaccatctccaaaagagccatatctagcacctcctaattgttaatttctgtgcctggcccttatcaaaaacaataggagggaacccaactgattatacatgcatttactattatatcttggtttgattcccaggaaagcccctt

SEQ ID NO: 17892 - DNA, 374 bp, Homo Sapiens
  misc_feature (43)..(53): n is a, c, g, or t
  misc_feature (57)..(111): n is a, c, g, or t
  misc_feature (182)..(211): n is a, c, g, or t
  misc_feature (242)..(254): n is a, c, g, or t
  misc_feature (305)..(314): n is a, c, g, or t
ccaattttaaaaattttttgagttggcaaacaccgaatatttnnnnnnnnnnnttgnnnnnnnnnnnnnnnnnnnnnnnnnnnnnnnnnnnnnnnnnnnnnnnnnnnnnnncctttttgggggaaacctcccccccattttttttctgggaacccccccaccgaattcggaaggggaattcnnnnnnnnnnnnnnnnnnnnnnnnnnnnnnaaaccgggggggaaggcccaaaccgggggtnnnnnnnnnnnnngggggaaattttcaaaatccttttggggcccagggggccccctctttaaannnnnnnnnngggaggccctggggaaagtaatgggggttttcccgggttcccatttttttaagggaaaaa

SEQ ID NO: 17893 - DNA, 896 bp, Homo Sapiens
  misc_feature (491)..(519): n is a, c, g, or t
gcacgagggggtaatcattataagcattagtcatagtactattcagtaatactgtgcaactttcagggatgggtaagtatgtaccctctgcctctacagtattatgacatttcctaataaaaccccagaatttaccatggtgtgggttccttcactgtcactgttttctcagttttcagtggccccacacttactactgcttcttttctttgttttaccacgaaaaacagatcaagaagtcactaaacttagacccaattctatatcagtagactgaggcctgaaattatgcacacataactggccaaatatcagataagtgaactgttaatatatgagagaattttctggacttttaagttattaatctcaattatttgtgtggtgagtactaaattattttctgtttgtgttgatctgtccatttctgtatatagttgtccctcagtatattgagggattgattccaggtcaaccccgtcctcttcagnnnnnnnnnnnnnnnnnnnnnnnnnnnnnttatataaaatggtgtagtgtttgcatatatcctacacacattctcttgatactttaaatcatctctaaattacctgatacgtaatacaatgtaaatgctatgtaaatagttgttatactgtattgtttagggaataataatgacaagacaaaaagtctatacctgttcggtacagatgcaaccattctgcctcctccctaccccctcccaaatatttttcatcctggttgaattcacaaatcctacatggttacggagggttgactgtatttgcatatgttgttaaagtggtgtttaaaatgtgcaatctgtactacaattctaaattttggattgatttgaactaggatcttgcaaataatctcatagacattag

SEQ ID NO: 17894 - DNA, 865 bp, Homo Sapiens
  misc_feature (595)..(603): n is a, c, g, or t
aaaatgttggaaaaatttattaatgttatgagtgaagattaaaaaaatatgtactttgtcggaatagaaattaacagggaaatattaaacgttataaatgccattaaaaagaataatcacttaaggtgacccatcaagggatgttaatagggaatgatgattggaaagtaggaaaaggaaaattgaagaataaacacaagaaaagtttcctgacagtcaaacctttttcagtctctagggagtccatggaaaatccatcaattagatcatactaagcagtactgttcagaatattaacaaagctttgtacttcttctcaactttgcactttgggaaaatatgtgtgctgctctcagtagcaagttattcaggttttggcttgttttctttataaacccctccttcatcagccgtcaataagagccaagaagaccccggtaagactttgtgtagacattacagaagacagatgtccttaatgagtgccatttgtattcaaatagatttgaggctctactagataggccttccctggaatatcttcatgaacagctacatatccaatgtggttcggcattcatgtgtattccattcnnnnnnnnnctctgtactttcttttcatacatttcttgtctctgcaatgaggctgagcgagactgtcccaaatgtgtttttatcctgagtctgaggcaggctgaactttaatctgcatgatgtgctgcagcttgccatcatgtcgggacagcagatccagtcccttgagtaagccagttggtcacagtttcagagaggctgagatgatctgtgatgaaatgatggatgaatgtgaagatccccagccatccttagagacaggggtgccatc

SEQ ID NO: 17895 - DNA, 738 bp, Homo Sapiens
  misc_feature (66)..(143): n is a, c, g, or t
gcacgaggctcagcagagaggagacccaaagtgggtagctcctacctgcaggaaggtttctgaagnnnnnnnnnnnnnnnnnnnnnnnnnnnnnnnnnnnnnnnnnnnnnnnnnnnnnnnnnnnnnnnnnnnnnnnnnnnnnntgtgaagatgtgaatggaggaggcagagtaggcagtgagtgccgcagccacagcttgtgttctctgcagccctggcacagaagataggaacactcatgggggatgcggccactgtgatgtcttcccacacaagaagtgccaagtgcttttctcatgcttttctggattgtcccatggtggacgagtcagcaggagtgagatggagcagcacagtagaggggatgtcaccttcagcgtctgaaagctgggtttgatgcgtctggaaaggcgtccctgacaggcgtcgttgccaggagcccctagtgccaccagcagccagcaggggagggcgtcctctgcccgctcacttctgacccttctctcgttgcacccggaacatggtgcagctgggagcagcctgggctgcgcggaaggctcagatttggggacggcccttgccagtgactgtgagctggggtgtcttggaaactcccagtctcagcttctccatttataagatgagaatgatcataccatactcaggcaaggttgtttgtgcattagtgaaatcagacgtattaaataaagtaccacattgatcgtggagttgttgaat

SEQ ID NO: 17896 - DNA, 490 bp, Homo Sapiens
  misc_feature (53)..(180): n is a, c, g, or t
  misc_feature (210)..(227): n is a, c, g, or t
  misc_feature (274)..(289): n is a, c, g, or t
  misc_feature (340)..(399): n is a, c, g, or t
cttaaaaaaatcccccgggctgcaggaattcggcaagaggtccctgagatggnnnnnnnnnnnnnnnnnnnnnnnnnnnnnnnnnnnnnnnnnnnnnnnnnnnnnnnnnnnnnnnnnnnnnnnnnnnnnnnnnnnnnnnnnnnnnnnnnnnnnnnnnnnnnnnnnnnnnnnnnnnnnnnncaaaaaaaaggtgtttggttttttccccannnnnnnnnnnnnnnnnnaaataaaaccccccggaccccccaaaaccgggggttagagagtattnnnnnnnnnnnnnnnnagataaggggggacaaaaggcgggggcccccctttttgtgaaaaaaggatnnnnnnnnnnnnnnnnnnnnnnnnnnnnnnnnnnnnnnnnnnnnnnnnnnnnnnnnnnnngggccctcttttacaccccccggaaggggaaaaaaccgggggtaccccaaaataaccacctgggaaaaacaccccctttcccccggggggg

SEQ ID NO: 17897 - DNA, 647 bp, Homo Sapiens
actgcacctggcctatttatgtctttatttcagtaccacatcgttttgattaccatagtttttaatacattttgaaatcagggaatgcgtgtcctctctgttcacgtttctaaagattattttggtttgtggtagtgctttcagattccatttgaatttcaggatgaattttttgtttgagcaaaaacaatgccattggggttttcataggatttgcattggatctggaaattgttgttggtggcatggacaccttgacaatattaatccttccactccacgaacaagaatgtcatccacctatttgtgtcttctttcatttgttcagcaatgttttgtagtttcagtgtacaagtctttcacctccctggttaggtttattcctaaagatcttactttattttttgacattattgtaaatggaattgttttcttaattttcttttcagattgtttatgtttagtgcacagaaatgtaatacatttttgcttgcatgttaaattggtttcctggaactttgctgaattcattcattcacaggtaattttgtgcaatacttaggattttctacatatgagatcttgtcacctgcaaacagagatcattttgcttgttcctttccaattagatgcccttttatcccttg

SEQ ID NO: 17898 - DNA, 217 bp, Homo Sapiens
gtaaggaacactgtcccctaaaaagcagaattgtacttctcccgcccttgggtattgtgttcactccttttggtgtgggagaacccctttgttacctatgtcatcccccccgcaatcctcccccctgtgtacaaaagcagcaaggactaaattgcccacgggaaaagactttctttacttttggagtgaataatcggataatgagactggacctgta

SEQ ID NO: 17899 - DNA, 879 bp, Homo Sapiens
gcacgagggttctctagatttgaaaacttagtatggtattatagtacaatgatagagtatacaaagtatctgatttgctatttctgaaaatcctttctggaggaggtggcacatgagttggacacaccaagaaaggtaggaagggcatttcagagaaagataactgcaggagcaaaggtgtaggggtattgtgtatatatgaacaaacaagcagaaaagggtggaggcaggaagtggcaagagctttgctaggtaggaactaagtcttacagggcaacattgacaggcacttgggttttattctgtagaaaagtaatatatgacattcaaaggatttcaaaactgagaatataaatgtgaatttatttgatattctggttgcaatatggagaaaaggtgactgcttaggaagtaactagggtagcccaggaaagaggtgatgaggccatgatctagaacagtggtcatactggaatataccaacatataccaagaaggggaagattcgagaaagatgagaattgtcagaggagtctattattacttttaggtttctaattgagtacagatggtgttgcctaagtattggagcaaaatagattgcatttgtaataaaacaataaattccatttgaacacagtgagtttgagatacctgtgtgtcatccaagttgatatgtgcagaaggacatgtgaggctaaagttcctgatagagtaagactagggtgatatatatgggagtcagcaacttagttgaaatgatgagagtgaatgagatcactaaaaggttataataatgaagactattgggccctgctaaaagcctgtaaaacatacacaaacacatacttattgagaaatgatcagagagggaaaaaa

SEQ ID NO: 17900 - DNA, 718 bp, Homo Sapiens
  misc_feature (50)..(63): n is a, c, g, or t
  misc_feature (411)..(620): n is a, c, g, or t
  misc_feature (649)..(658): n is a, c, g, or t
gcacgaggtgcactccagcctgggcaacaagagtgaaactacgtctcacnnnnnnnnnnnnnnttgaatagccctataaactacaacggaaattgaattcatagttttaaaactccccaaaaacgaaacctctaggtccaaatggtttcactgcggaattctaccagacgtttaaaaaaggaatgaacaccaattctagaccatcttttgcagaaaatagatgtaacacttccctatttattttataaaactgattttactctgacactaaaaccaaagacaatacaaaaaaaggaaaagtacaaaccaatagcctttataaatatataagcaaaactcctcaacaaaataccagaaaatagaatttcaacaatatacgaaattgtgtatgtgtacgtttataaagtatannnnnnnnnnnnnnnnnnnnnnnnnnnnnnnnnnnnnnnnnnnnnnnnnnnnnnnnnnnnnnnnnnnnnnnnnnnnnnnnnnnnnnnnnnnnnnnnnnnnnnnnnnnnnnnnnnnnnnnnnnnnnnnnnnnnnnnnnnnnnnnnnnnnnnnnnnnnnnnnnnnnnnnnnnnnnnnnnnnnnnnnnnnnnnnnnnnnnnnnnnnnnnnnnncttgttaaagagcacgtgaacacacaccnnnnnnnnnncccacaactaatgttatacttaagggcaaaaggtcgaaggccttgttccttagattagga

SEQ ID NO: 17901 - DNA, 604 bp, Homo Sapiens
gctaagatttctttccgctagttaaagaatggaactgaatcctaaattaggatttttatttaaattcagattccatttttaaagtggatgcttattttttgaagttagaaagaaatgttatttctgatctaaatgggtttccctggatacaatctagctgcctaaaacaaagttggagaatggtattaacaaattcttaaaaataattagtggttcaaattcaacagctgtgtcagaataaaatcatacattaatataaaattgtcagaacctcaatatattacctgtaaaaactgaaataaattttaaaatcaaaatttaacattaaatcaataatttatgtattaatttagagattataacaattttaagaatatgaattactattttctcaaaactatagctttataaattttgctattttaaaatcagaaataagtaacaacaaggaagtgacaactcatttctgtaatttataatcttacataaagtcactttttaaaaaagtacactgtgcttattgttgtccagagaccatacttaaatattttacaatattaactcatttcaatttttataaaatctaaattagcaatcataaagg

SEQ ID NO: 17902 - DNA, 320 bp, Homo Sapiens
agtgtttcaccatgttgcccaggcaggtctcaaactcctgggctcaagtggtcctccagcttcagcctcccaaagtgctaggattataggtgtgagccacagtgcccagccccgtagtggagaatttctgttgaatgaaccaaaagcaactgccaacctctccatgcaccatgtgtttcagaggagaaagcacagtgaagaatgcagtgtgttctgaggtcctgtcacccctgaggctgtgtgtgtcctttgccaaattaaagagtcttactgaatgcggtgcatccaggagacaggcccaggtttggactggtcctcta

SEQ ID NO: 17903 - DNA, 442 bp, Homo Sapiens
  misc_feature (47)..(101): n is a, c, g, or t
  misc_feature (146)..(211): n is a, c, g, or t
  misc_feature (233)..(244): n is a, c, g, or t
tccttaaaaagatcccccgggctgcaggaattcggcacgagggtccnnnnnnnnnnnnnnnnnnnnnnnnnnnnnnnnnnnnnnnnnnnnnnnnnnnnnnnccccccggcgaaaggagttttatttaaaatggttgcctggtcccnnnnnnnnnnnnnnnnnnnnnnnnnnnnnnnnnnnnnnnnnnnnnnnnnnnnnnnnnnnnnnnnnnaaaaacctaaggcagggtcttnnnnnnnnnnnntcccttccaccctaggaatcttgggaaacaaaggcacgggaagtgaggggctttaacagggatgggaaaccaaaaccggcccctaaaggggggtaaaagggaggccctggcccccaactgccctgggcctttcatcccaggctgccctgccaaaaaagggggggaagtcactcaccagggcctcaccattgccccctg

SEQ ID NO: 17904 - DNA, 689 bp, Homo Sapiens
tcccccgggctgcaggaattcggcacgagggtaatcctatttttaattttttaaggaattgccacattgttttccatagcggctgtacccatgtttcattcccatcaacagtgcacaaaggttccagttattcctcattctcaccgacacttgttttctgttttgtgacagtggctatcctaatggatgtgaggtggtatcttcttatacttttgatttgtatttccctagtaatttgtgatgtcacgcatcttgttatgtgtttattagctatttgtatatcttctttggaaaatgtctatttaagtcctttgcccatttttgaattgggttgttattttaggagttctctgtatattctgggtatcaattccttatcagatacatgatttgcagatattttctcacattctgtgggttgcctttttacttggaaaatcttactttttaaaatgaaaataaataaaaatagaggatcttttattttctttgtctaccccagtgcattgtcatcttgtacactactgttttgaaaccattgtagtctagagcagtggttctgtaccattttttgttcctcaaaaaaagaccaaaaatattgcaatacttactttaactttactaagagaaattagaacataggtaagatggtgaactagattgcagcaaggttccatgaaggtgaggtt

SEQ ID NO: 17905 - DNA, 612 bp, Homo Sapiens
gcacgagggtggcctaaagaagtctgaagtggctgatgtccataacttctgagtctgtttccaaaagaaagactcttgttaatgctgttaccagagagtagagatttgaccagcctctccctaaaatgtaagcttctcaacaacagtacaggaagaagtgcaagagtagactagaacctttaaggaatttggggctggaacggagctatgttgcatctgttgttatacaggtagattataagttctacatgcaccagccaaaacttaggacaggatgtccccaaattaagatactacagattaccaaatcagaaataaccagctggatttaggccagctcacatttatttggaaattaccctccctgattaacaggcttctgagttgtacgtggaggactaatgagacttgtacaagacaccacggggcttggggtccaggtcccagttggatatcggaacagacacagataagtgtgtttcctcattaaggtggtgagagtgtgccttttggcattcagaaaagggtttagccaccctaagagttggaaataaagattcccaactggaaatgttgcagaatccctacaagtgtctcaataaaagccatttt

SEQ ID NO: 17906 - DNA, 951 bp, Homo Sapiens
gcacgaggatttgggatcagtgatggcaaaagaagtaatgagaccactgaaattgttttcattgttttaaataccaggtactcattttcttgatttgaaagtttaacatgacttctaaggacatctcttcaaaaagaaagtaaacagggaatgaaggtggtgggaaaatcacttcacttcacccactatttcatgttgtaataagggccaccataaggatgccctcctcatagtgttcggttctgatcttcctcgagaacagtcacttggcgcactttaataatctggactgctccagatttgactttagatactccatggtatctagtctttatgatcagttgaatgatcagtgtttaagtctaaaaataatgctttcctgaaaatgtttatatttcattgctgtttccttattgcctgctagccaaatggaatttgggcaagcaactctttgaagacttttttaccctagaaatttacttttgtcctaaaaaccctaactgtaaataagcagtcgaagcaagttgccaccttgaagttgagggatacactttgcttcatcagtattaaaaaccatggtactcttattttgtcttttttaattcaaaacattttctaaatgtggtactttgaaccttggagtatttacatgtttctgttcaaaactgtgacttattaatgtaagtctgctagtagtactttttttgtctgagcataagctatatttcaagatatactttgccaattttgttattggtggggtaatcatttttaaattatattgttattaggtaatttatttttaaagactactgggcatacaatctaagttgttccataaaagaatataactgagcaatgtatttctctaaatgacttgtaaaatcaatgatttatgtttaagtctgcattatggtaggtgatactcccagctcatttaaagacaagttt

SEQ ID NO: 17907 - DNA, 910 bp, Homo Sapiens
gcacgagggaaaaaagatagtttggaaaaatagccaaatacagacttaggagccagtgagtaatataggcaagagatagttcttgtatttgttggtggtggctgtagaaaggagccatgtgttttggttttgtttttcatggtgtaaattcttttcacttagaacttgcattggttgaaaactctgaatttttcctagaaatacactagtatttaaatgagacttatgctatggtctaaatcttttacctagtactgctcttagccaggtatcaagggatcaatcgcaggaaccacatatttataattcatcttgtctccatccatccattctttcagctctaaaaccaagtgtttggtttagtgctcttgattcccacagaattggctgccattctatagaaagaagggataacctttgatactcactagagatcattggttgtccgctgcagatgctatgacaactactgctcagtaggcttgttcaagtccagcttattcttatagaatcatagctgtctcacaaaaggttgtctccaagaaggcacaagacatgcatccgcctcatgtctagaaaactgcagcatggctttccatttcccttcgtgtgctgtcagtaataaacccctgcatggtgatcaatctgtggacaatgagaaaattataaaagaactaatcaagatagcaaatgacaacttcggtagcttattgcctaatgttcagaaacatctttccttgatatttttctacatttctcaattattctaccacctcttttactgctcccttggaagacaaacatgacactgccctgatagagtctttgtatcatccttaaagtgcttacattcccatgtgttctgtataacgggtaatgtttatatatggtctggctattcttgaattta

SEQ ID NO: 17908 - DNA, 411 bp, Homo Sapiens
gcacgaggtgaaattgtcattcaaacataggggcataacaaatatgtcctcaggcactcaaagacccgtaatggaaacagaatcggaggaagaagctaaatctctttacatttgtagagaaaaacaaattcaggaggatgcagtactaagtacagaaaaagcatagctgatcaaatactttggtaaatgtattgctgatgcaacaaagttccaacagacaacatcagtttataaaaatcagtaggatttccttacatttgcattaatcaactagaaaatttgatgaaaaaatgaaccaacaagagcaattcgcaataacaacaaaaactagtgtctagaaattattttaaccaaggttataaaagatctctatgaaaaacttttacaacttgaacagataatatagaaaag

SEQ ID NO: 17909 - DNA, 773 bp, Homo Sapiens
gcacgaggccctgatgcaacaaaaatagcgattttaaggaacgttcagcccatcgctgacctgcgcacgttaaaatgattcgcgttcaacattcctgcagaataaagctgtaggaaagacaacgttaagactctctgcaaggcaagaccagccaacgacgaggcgaccccgtggcaggctgggcggcggaggccgcgcggggaggttttctcgagcgtccccggttattgggaagggtgcgctcggcctcgctcccgcggaaagccgtgtggccgcctgcgtcccgggctctgctcacagaaaactcaaggggagctccctaagcacggccggtctcaggaacagaggtgcctggggaaaagggggaacctgctaaaacccgagagataatgggcttgtaaaaaccagaggggtccgcttatgagtttagctccggttatagacaacagtgtcaggtaagctgatcagaaagacagacggcctctccctcaggtttgccgagggagggttcagaaaagaaacagggagcgccttcagcagtctatgcggttataggccattttcttgttttattagcgtttaaattaaactatgagaagaaagtctcatcttccctccctcgccactttgtctatttgttttggaaagagggtagaagaagcccctctgtcttcccgaaaagaagaaagaggaaaaaaattacctggtaggtccaggggcagagggctccctcccaaaacccaagcgcgatttgcatccaagctagtgggaaa

SEQ ID NO: 17910 - DNA, 392 bp, Homo Sapiens
tttaatttcttaaactcccggaaaacaaaaaactgaaaagggtcactgaaaaagggttggggggaacccatcccttccgggagctcccggggaaaaacccttttcttggttttttcacccccccaaacccgcccgcattccccggctcaagaacggggggggccgggaccccatttcccccaaaggggggccaaatacgcccggtccccgggcctctttttaaatccttttggctgggaaaaacctgggggtaccccacttaaacccctttcaaaacatcccccttttcccagctggggtaaaaacaaaaaagcccccaccgatcccccttcccaacagttgccccacccgaaaggggaaagggaccccccctgtaacggcgcattaaacgc

SEQ ID NO: 17911 - DNA, 1013 bp, Homo Sapiens
  misc_feature (515)..(529): n is a, c, g, or t
gcaagaggaaccctttgagtccttggtattgctggtgataagagcctcctctgcccacttttggacctgaaacacaggagtaacttgcagtttcagcttcagttttagtactttgcttaagctctgtttatcttatttttgatcatagctttgtccttttgattttctttatctgtcatttctttgtctttggtataaaggggaccttaaaatgcaaatttggcaataccatcctaattggaagtaccctaaagatcattactaaagttacaaattttgttgtctattttaaggtacggagggggctgtttttgaaatgtgaaagtatgtatagtggatcctaattgcatgttatgtgtacatacgtactcctatgtatgtcttgagagagcagggagggaagagtgtatctgtgtatgttgggattttaaagaaggagaaaggatttgggggagggaaaaggaaccagtttgttgtacattgttttaccagcaggctcagtttactttgttttnnnnnnnnnnnnnnntgatcaaggagattcaaagaatgaggaaaaataggatgttctttcttagactctagtaaacaagtatacaccagatatactagtgtatacttgtctattcttagtttgcaaaatctcctttggaatatggttttactgcgtttatccaaggacttacagtaagacactttcagaaccaagtgaaggaggttgtttcacatacaagaataaggcagtgcagcagaggccagaatcaggaaaggacagtggaacagaagctgcagtgatactagactgtggatatttccatatgttgacaggatgtggtgaggttaagggagatcaaggaaatataaattgggctgaagagtaatattacacttcttttctgaggagactgatgacctggatctcatattgtgtgaatgtaaaagaaaactaatgttcagaactggaacaaacacaaacttgatgatgaataaaaatgttggttccttgatcatct

SEQ ID NO: 17912 - DNA, 460 bp, Homo Sapiens
gcacgaggcgccaggcacccctctgacatccggcctgcttcttctcacatgacccgcactatcccacgtcccagtcatataccaaatctctcccttcctccttctaagctgtctcctcactctctcaatcttatccgcatagcgttcagttgaggtggattaaagggctccagctacgcaaaatcttggaggctcctcaattacccacataggatgaataataggatattctaccgtacaaccctaaccaaccattcttaatttaactatttatattattggtgctactaccgcattcctactactcaacttaaactcccgcaccacgaccctactactatcgcgcacctgaaacaagctaacatgactaacacccttatgtccatccaccctccactccctaggaggcctgccccaacaaaccgggtatttgccgaaatgggccattaacgaagaattc

SEQ ID NO: 17913 - DNA, 813 bp, Homo Sapiens
  misc_feature (255)..(272): n is a, c, g, or t
gcacgaggatttgttctagggtatagtttaagtccattgtttctttgttgactttctgtcttgatgacctgtccagtgctgtcaatggagtattgaagtcccccactattatggtgttgccatctatctcgtttcttaggtctagtagtaattgttgtataaatttgggagctccagtgctaggtgcatgtatttaggattgtgatattttcctgttggagactaatccttttatcattgtataatgtctctccnnnnnnnnnnnnnnnnnnaccattgttgctttaaagtctgttttgtctaatataagaatagccactcctgctcacttttggtgttcatttgcatggaatatcttttttcacctctttacctggagtttatttgagtccttatgtgttagttgagtctcttgaagacaacagataggatacttggttggtggatttttatccattctgctattctgtatcttttaagtggagcattttggccatttacattcaatgttagtactgagatgtgaggtactgttctattcatcatgctagttgttgcctgaataccttgggcttttgttttgttttcattgtgttgttttataggccctgtgagatttatgctttaaggaggttctattttggtgcatttcgaggtttaagatttagaactttttttagcatttcttgtagtgctggcttagtagtggccaattatctcaacatttgtttgtctaaaacagactatctcgccttcatttatgaagcttaattttgctggatacaaactttttttcctgacagttattttgtt

SEQ ID NO: 17914 - DNA, 936 bp, Homo Sapiens
gcacgagggctggaaaaagcagttgccaagaagatcacagtcaacaattctcagatctatacatggccaggagtagttcctgttctcactggccaacgtggaaaacttcgtaactcgtgaagcaccaagtaaggctaattggaagccatttccctcagtagtggggccaaattagccttagaataaattcttccctggttcctcctgacaaaacttaaaagcaagacctggtagaatcaaactaatttgtaagcagtttagctacaacagagagcaaaggtcaagaagatttataggaatatgaaaatatccagcacccagcagataaaagtcacattatttaccatgtaattaaaagtaccagacaggcaaaggaggaggaaagtaagacccataaagaaaagaaaatgtaatcattcaaaactgatccagaaatagttacgtgaaaacatcaacaataattattataactgtatttcatatgttgaggaagcttagaggaaagattaaacatgttagtacaggagtgaaacatatatacatagataagaaatccaaatcagactttgaaagttgaaagctatagtgtctgaaatgaataatatgtttgatgggattaatggcaatagacattgcagaacagtttagtgaacttgaaggcatagcaatagaaactgccccagaaaaccacacgcagagaaaatgtgagccatgggataacatcacgtgacctaatatccttataattggagttcctgatggggctgatgggatgtgcagaaaaagtattttaagaaataatgggcaacattttcccaacttgatgaagctgtaaacccacagactcaaggtgtccagtgaaccacagcaaataaacatgaagaaaattacatcaaggcacatcaaagaagcagccatacccaaaaaacaaacaaa

SEQ ID NO: 17915 - DNA, 532 bp, Homo Sapiens
ccgataaagaatcccccgggctgcaggaattcggcacgaggcctctaaaggctagggaaaatggctacatgggggtcctatttctaatgctttatttgcccttatggccaggatgactctaaaaatccattccccctgcttccccctcacaaacacagtcatgccctcaatgtgactgtctggatcaaacccagcggcctgtaagaaatgtgcagaggattttatgatctgccaggaaactgcttaatttggcactcacattcctttcggagcttaaccgttggctaaaggccgatcgattttttggtttcatggacctgtcgtaaagagtggctgacatgctggaaagggaatccaagggctgcctgtaacagcacacccagatctggcattccagctgacccatgctgcccagcaactcaatctggccactaccggctgctctgagtctgctccttatgaccagaactttacacctttgcacagatacttgtctggcaactgcactgatagaatttgaaactgaattttg

SEQ ID NO: 17916 - DNA, 892 bp, Homo Sapiens
cacgagggtaccttcaactttatgagatattgagaaattgctttccaaaacatttataacacattatattcccagccaaaataggagttcctgtttctattctaaacatacttgtttatctcaaatgttctaatcaaataacctttccagatgtcactgaaagccagaagcttgtggcatctgggagactcagatatgtttggaacactcccatttctaaaatatggtgcaaaatttgatctgaaatcaacctctccgtttctcaacctatggcgttagagattgactgacttttccacaggtattaactttagtattattcatatgacttttccatttaacaggcacttactttagtattaatcatattaatcacaataatgataatgataatattgatagtaactattagtaccaactgagtacttactatatgccaaacacattaattatattatattatttaattaattttgaggaggagcagataatgctattatacctcttttagagatgaagaaactgattcccaggaatccttatgttaatagttagtaaatagagattgttagtctattccatctaggacagctgagaaatgatagatgggagcaaactgagaagagagacatcaaattattacagtccttaacttttaaaagtttagactctagacactatataaataatatcaaaagagcatacatacacacataatatgaggcagatctcaaataagtgctatatttgtactgagaagaatttagttttgcataggaagattgggaaatgattcttacaggtgactaaactttactaagccctggagtcttgacagaggaaattaatgaggcaaaattggaggcagtagctctttagaaaatatgggaaa

SEQ ID NO: 17917 - DNA, 692 bp, Homo Sapiens
  misc_feature (537)..(551): n is a, c, g, or t
aaaaacgtttagagaaagaagaatatgcaacagaaactgtatgtagcctgcaaagcctaaaatgtttactctctggcttgggagtttgtctcccctgctctagactgtcagcaagtggtacagtggtacagtacagtggtactgcccaactgcacttctctgctaggtgattctagtgtgcacttgtcagaatgaaaatatgttattcatttaagacatctcatgtctttgaatgtaatcacatgatttgtatttaatatttacatgacctaattattttttcacgtcagtttttctagattggcaatagcctgttgcaaagtgcctaaacctttgagaaaaattactatgagcaaggtccatgatttagttttcaatataaagggaattccattctatactgtaaaatccaaaaatgctagttgccctcagcttttgagttgacttccagaaagttgagatcttttgaccattttttctcatgtcatataaaatgtgccacatggtagttgtcaagctgtggtagtcatgtacacnnnnnnnnnnnnnnnaaactttctaaaaggaaaagttcaaagtcctttccacagttagtctacgcttcttttggatttttctttttagagctaaattattcatacaatgaataagtgagtctgttctaagatataaggggccataatctatttttg

SEQ ID NO: 17918 - DNA, 373 bp, Homo Sapiens
  misc_feature (83)..(123): n is a, c, g, or t
  misc_feature (195)..(249): n is a, c, g, or t
  misc_feature (266)..(278): n is a, c, g, or t
cccctttaaactttttaagggggcccaaaaattcggggaaaatttttgggcaaatttttttcctttaaaaagaagggtttttnnnnnnnnnnnnnnnnnnnnnnnnnnnnnnnnnnnnnnnnnccaagggggcccccaaaaccttcccctttcttttaaaaggttttaaaaaggtttgttatctaaaaccccttnnnnnnnnnnnnnnnnnnnnnnnnnnnnnnnnnnnnnnnnnnnnnnnnnnnnnnncccccccggattaaaannnnnnnnnnnnnaataggggaaaaaattttttttcccttcaaaacttttggggcaaaattgggaactttgccacctcccacacctttttttccacgggttttaagaa

SEQ ID NO: 17919 - DNA, 926 bp, Homo Sapiens
  misc_feature (221)..(386): n is a, c, g, or t
gcacgaggcccatagagttcttataaaacaaatcagacacttctaaatgtcgagtcatctgcctggcaagcctcacctgtgcctctggggttcagtgagcatgtgtcccatagctggtcactgagatggcactcaattttgaaaatggtagttgttaaatacttagtgactattgaattgtgacttttttgggacttcatttcatttaaaaaatatttttnnnnnnnnnnnnnnnnnnnnnnnnnnnnnnnnnnnnnnnnnnnnnnnnnnnnnnnnnnnnnnnnnnnnnnnnnnnnnnnnnnnnnnnnnnnnnnnnnnnnnnnnnnnnnnnnnnnnnnnnnnnnnnnnnnnnnnnnnnnnnnnnnnnnnnnnnnnnnnnnnnnnnncacacacacagacaaatatattttctaggtaaaccaaatataaatttattaaagatcctaagattcagagaaatactatacttaattggaggtccaggttttgcctggcaacctggctctttaaccagcgtaaaggttaatagtgttgcactgcaacagccccgaagacttcacagtattcacaatgccgttaactggtgacattgagctaagggtcacatgaacacagctggatgttcattgcagtctgaagccttgaccgttccagtctctactgaactcagcctaacacataagagtaaagaaactccaattgagtgttgtttgttgggagaaaaatggaatgaactaagataaagacagaccagtacactaaagcctaagcattccctcttcccccaacgttatgtttttttgaattttgatggaaaaatatccagcatggtggagtggtgtttcgaagatgggtttgatcacacatactttgtcgtacgtatctacccaagctgtcactattcgctaaagtttaaatgttctttt

SEQ ID NO: 17920 - DNA, 1060 bp, Homo Sapiens
  misc_feature (214)..(222): n is a, c, g, or t
gaaaaagaaattaatttttttggatcattttactgactaaaacgccaaaattaaaggggatataagtataaaaataaccaaattcttacaaataatactttgctgctacagtactgaataattagtggagggtgcaattataatacaactttaaataacatttctataatgggtttaacacaatccacccgggggtaagggttaaaggtttacnnnnnnnnntcccggacaacctgaaaactcccaaaggtcatatttcagctaaatggtgcatttaaccggccacccccaacacaaaaattaacaaaactcaaagcaactcctgagagaacagtcgttcttttttaagacaggccaggttaatacagaaaggtaaatggatctgattatttctccgcaaaaatgattccatcccatccctgggctattccatccttctacccaaaaatctgttatgaagtatgttaaatgcattttaaaatctggatatgcgaaatcttcaaatgtgtctctttgagaatggccaggtggaaaaaccgtctcggaactgtcgccttttaaaaccgaagggcccccctttgtttctaaggggtgcggtgagcaggttaacccacataatgatagagataagcgctatgagagatcttactacaacaatttaatgtgcgattaaccctcgatggtcccaccaattaatgcagatctctttctgggagatgtggaacgagtacctcctctagggcaatactctacataaacggatattcttatttctaaacaaccatgagacacttccaatgacactctgtaaaaggagaaatatatgtctccttcctctcccccaaaatctccaacaggagaaaaagagcgtcctaaggtgattttccagaaaaacaataatgtaaattccgaacttgtcatcttctcttttctccaaaaagtctgagatctcaaaaatggggaatttaaaatcatgggggtcaacatcgctgtgtgtgaggcataaatcattccagaagggccactggtaagggaaaggggccctttttcccctttgggg

SEQ ID NO: 17921 - DNA, 408 bp, Homo Sapiens
  misc_feature (281)..(325): n is a, c, g, or t
acctaactttatttatttattctttaaattacactcaggttttccattggttggtgctcttttttcaccccaactaaaaacataggctattaattagtttagtatctttgtttccctttccttaatttttcttttttctacttctgaaatagcatcttaaaattcactacaaacccttgaaaactttgagggatctgatgtaaccaatattgaaagtgaggaacctatttattgaaatttataaatattcttcattataaaattatcatttttattgtggnnnnnnnnnnnnnnnnnnnnnnnnnnnnnnnnnnnnnnnnnnnnntacgttctcaccagacttagggtgcttcaggagacgttgtattcctgcttctctttctagtttctgatgatccctaacgaaaa

SEQ ID NO: 17922 - DNA, 885 bp, Homo Sapiens
  misc_feature (97)..(394): n is a, c, g, or t
  misc_feature (410)..(452): n is a, c, g, or t
aaaaggcgtttgcagaagttcagtgcttttcagatgaggctatgaacatattctccagaattacgtgcagtcaagtgtaacaaacacggcgttggcnnnnnnnnnnnnnnnnnnnnnnnnnnnnnnnnnnnnnnnnnnnnnnnnnnnnnnnnnnnnnnnnnnnnnnnnnnnnnnnnnnnnnnnnnnnnnnnnnnnnnnnnnnnnnnnnnnnnnnnnnnnnnnnnnnnnnnnnnnnnnnnnnnnnnnnnnnnnnnnnnnnnnnnnnnnnnnnnnnnnnnnnnnnnnnnnnnnnnnnnnnnnnnnnnnnnnnnnnnnnnnnnnnnnnnnnnnnnnnnnnnnnnnnnnnnnnnnnnnnnnnnnnnnnnnnnnnnnnnnnnnnnnnnnnnnnnnnnnngctgtgttaacaagannnnnnnnnnnnnnnnnnnnnnnnnnnnnnnnnnnnnnnnnnnattatcaggtggacaaataatccgagtagaaagtagaacaagctaaccctggatatttacaaaaaacagtagagaaaaaattaggcaataattaagcaaatttatcctgtttagagggaatggtatgaactggattgccaaagcaaagatcaatgcatgggcaatttccatgtgagctcatttaaatccatttggcccaaagaattcagttgcttccttcctttccaaacaccccctgcttctagtcacatcaatacctcttctatattcggacagtaaccagatttttcctaactgctgcttgtccttttcagtttgttcttattttttccttcacccactttcataatcagcttgccagcttcccctttactcaggtgcgtcatgagcttcataaacacagcctatggctagattatacagggcaaaaccc

SEQ ID NO: 17923 - DNA, 602 bp, Homo Sapiens
aaagaaaaccatgattttctaggaagaacgatgctttaggggggggagtgtattgaatgaatggacaaagtgctgaaactgcctcttggatgtaaatgcttcacatttttcatttgttttaaaacaaaacaagggcgtgcttttattttggtacttttaaagggtgtaaataacatgccaataggtagtcctctgaatactttcctgctaaatggttttagggctacggatgtaataaatttttaaaacaattgcctttattatcatgaaatttggggccctattttaagaaatcaaatatttactgtttatggcttttgtataggggcaggttaacgttgggagaatttaattacctatctatgctaagggtagcaaggatagagatttaagcatatcaggtgtgtcattttcctctataatacagcaagcctcccagtgctgaagtaaataattgagcagggtgtaatacactcttagtgcagattaatttttttaataccttaaaatgttaggttttaacgatccttgcctctacaagtgttcaaatataaaatggtcgagctgtgagaatttaaaaagcgctatacggaagttccttt

SEQ ID NO: 17924 - DNA, 485 bp, Homo Sapiens
gcacgaggcctttacccaaatctgtattatggtttcgccagacaaatattatgtgatgtagcccagaaaatccacaccttttgtcctttttatgttttaatttgaataatcatgtgcttagtcccttggtttactgccacatcagtttaacacgatatcagcacattcccttgtcatcatcaaggtgttggctcagatttattcttaattggatgtttaaagcatgtactaccttgttacagttggtttagtgtagtggattattgacatgacatcatgagaagatgtgtaattttataccacatttataaaacatgattttgttttctacccttcaaggtaaacattaaaaataaggtggtacttgtgtacttgtacataaaaccaaaattatagttgggaaaaaaataaatttatatatgaaaatgtcaaaatcattttaaaagtattattttcaaataaaatggagaagctggtgaaaagtc

SEQ ID NO: 17925 - DNA, 883 bp, Homo Sapiens
gcacgaggaaaccagcagctaaggaacatcttattatttagttgtagcatattcataacaagtgtccttcaaggataaacatatattctctatttgtatttagcaagtaaaacttgtgttgacctttagtgcattatattcagcttttaacagtattatgtatgtactggaaagcaaagaaatcttagagtcttggacattgtttatttgtgcaacaactagaaaggagcaatgaagtttatttcagttgtatttttccctaagcacaatctgcaatagtttatgtatgacagagataattcaaaaaggaaaactatatataaaagttgtatataaagtttgtctctgaaatatttctttgaagtttttaaaaaattgactcatgtttaaaaacaaaaacacatattcagagcattggacttttttaacttgttttcatctgtttatcatgacttttttatttctggtgtagagtccacattatttagtttgttgtacttttaaatttcaaagttcaaatctgaagaattagcgtttgtgatttcgggataccatgcagtggttttaatcccaggaaaaaaactatcaacaaaagttcgtttgattctcattatgtaactttgtagaaccatcctttctagatgggtccaccacagtgaatttgtaacttttgaagtcaggatagaatatcattagattatctgtgagatagcattactatgttaggacagcagagttttgggttggtaaaaataatgtttgctctattactgggttacagacatttcagcattttaggttggttttaaatcactaaaaatatttattcggatttgaggatttaagtgctaaaaatcaatcctttcctgcccttcaatatttg

SEQ ID NO: 17926 - DNA, 526 bp, Homo Sapiens
  misc_feature (161)..(215): n is a, c, g, or t
gcacgaggtttttcaatatattttaacacaatgtcaaaaatatttcaacatgcaatcaatatgaaaaaaattgagatattttaacatttttctttccatactgagtcttcaaaatccagtgtgaattttatatttatagatctcaattcagactagccacnnnnnnnnnnnnnnnnnnnnnnnnnnnnnnnnnnnnnnnnnnnnnnnnnnnnnnncatctagagtctaacccccttctatctccagtataatcaccttaaaatgtacaaagtatataaaaggtaacccaaaattaagtagtgctctgttaaaatgcaagtgaaagatttaatgttgaaagtgtttagacgttttctaatgactaaaaggggaaatagttatttaggaatggcattgcaaatctttttgacattttcccatttgctcattaaatctttctgagaactaggttattttgttctttttcctccatctgagttttgtcattcaatatttatctgctgacaactatgcaaaacattatgct

SEQ ID NO: 17927 - DNA, 842 bp, Homo Sapiens
  misc_feature (116)..(156): n is a, c, g, or t
gcacgagggctagggtaaagaccattgtctgaagacactaaacttggtgttaacagtgttgattgtttaatggatatggactacatgccactacctgcaactttgtcatcctggannnnnnnnnnnnnnnnnnnnnnnnnnnnnnnnnnnnnnnnnaaaattcaaagcaaaacaaaattgaagataccattgagaatcagaattcaagatgacttgattctcactaagatcactgcgctttttaaaaattgctttgagatctagtcagttacatatttaaaatccccgtgttgattagagataaggttttcattattttattttcctaaataggattctcatggagctattgtagataactgtacagaatcacttttgtgtaattgaatgaagcagtttcctctgcatgattgcatagtgaaagccttttatatatctatatttttcaatacttagattttacactattaagctgctctagtcatgctatatttgtttttttaatagagtttataaatatttatgctcaaaatacagatcaactgaatatttttggtcttgtttacaagataaatcatactttaaaatgatacaggcccctcaagtgtcttaggaaaaagtcattggtgctataaaacctttcagtatcatttttgaacccattgttcagactttgctaggttttaatctgattcccttgtgatttattataatgtagcagcatacttataaaagtggtctgtgctgagtcagagagcccagcccattagaaacacatcataatttaagatatgatgcagaatgcccttacacttatttgtgccagcttcccaaaaagaaaa

SEQ ID NO: 17928 - DNA, 445 bp, Homo Sapiens
  misc_feature (170)..(243): n is a, c, g, or t
gcacgaggaaaacattgaaaaggaaacacaacatttagtaagaatagaaaacttgggcactgtatcaccctgttcctagataccgatttactgatggccatttaaatagaattttattctatctaattcatttatactcccagagtttgaaattacattttacctacaannnnnnnnnnnnnnnnnnnnnnnnnnnnnnnnnnnnnnnnnnnnnnnnnnnnnnnnnnnnnnnnnnnnnnnnnnaaacttttactatagtagtcaaagtattaatttctcacattgcaatttccttcaaagacataaatacaacctttctaaagactccttgttcatcaagatacctcttcaaattattctatttgtttcattcagtatattatctgtgtataccgatattacactcttttctttttttgagatggaatctcattctgttactgat

SEQ ID NO: 17929 - DNA, 629 bp, Homo Sapiens
gcacgaggatctcattcctttttattgccaaataatattctatcatatggatatgtcgcattttatgtatccattcatcagctgatggacatttgggttgtttgtactttttggctaccatgaataatgctactatgaacttttgtgtacaaatcttatgtggacttgttttcatttctcttggatgtatattcctaggagaatggctggattatacagtaactctttcctcataactttgcatatcaaaattatatccatctttcagaacccaaattcagtgttatttccaaagtgttccaacatctcccactcaaaatgaatcttctccctagtactcccattgtttagtacctaattgttcttaccagtttgtcttagagctcagtcattcctacacagcacttttcttcattatactgctaatttcattacactgtaagagtggggacaagctgttcttcttgtataccagaaagtagtgagtgcactgctgtgaagaaagcaggaactcaaaagttaagaattttgaatgagcctataaaatgtgtctaataaataataatgttcattttcaaatctcaacaattaaatgtttaacaaataacacttgaaataaatgtttatta

SEQ ID NO: 17930 - DNA, 845 bp, Homo Sapiens
cccttctgcagaagtaaattgccttgctgagaaaacgttttgcctgagtgctggttcttctttgtagcactgagcaaagaattacccatctgggatatcattctcctccgggaaagggtctccaatcacctctcataaggagacatgtcctgctgcctcactgcggtggcctcaggggtaaggaatcagaacccacccagtgtgaagaataaacctggactctcggcaacacaggaagaaaaagcctacagtacagataccacggcgacaaggactcaaggcctcctagcgagattacatccttgtcaaaggttggaaagagggaaagctcaaacccacctgggaaggaccttacctggtactcctaacaactgaaatagcactccggaaagccgaaaaagggtgaacccaccacacaagtgaagaaggccccacctctggcaaagtcatggaccatcactccaggaccaacagcctcaaaactaacattcaaacgggtttgtctttttcttctccccttagctactcaaggatatcttactgttaatgtaactatgcttgtctagtcttaccttgtggagatctccaaagtcaaagacagttagcttgtacagaaaagtacttctgcccctctgtggaaagagttaatactcctgtgtcttgcatatggggggaatcctcagaggaagagttaggcaattgggggttatggtctcagtgggcagttttagggcactgccctaaaaccatacctacacttcaccaaaggggcccaccccttctgactgtcaatctaatcattgcaatccagtacttatccattgtaaaaattaaagatctaaagc

SEQ ID NO: 17931 - DNA, 304 bp, Homo Sapiens
gcgcgatgaactaccaaatgtatttaattgtctttttgttactgatttcctcttccattgccctctggccaaggaatgtgatttgtattatttacctatctatcatatatttatggcttatcatctgggagttaatgatctttgctttgggtcctagggcctcgtggatttttaaaagattggatgcgtgcttaaggtgttttctctagcagggtgtcttgaaccatgtttttgtccgtattatcctgttctttggtattcctcgttatgatctaggccactagcagaaaaacctaaaaaatcg

SEQ ID NO: 17932 - DNA, 800 bp, Homo Sapiens
  misc_feature (162)..(228): n is a, c, g, or t
gcacgagggtggtgcacacgccctgcatcgagcagctggagaaggtgggtgggtagctcagctttgcccgcccctgccctttgggtgctgaggccctttcagcgcgcactcacacccacatgttatacaaacggcctgccaggagtgacccagcactcgggnnnnnnnnnnnnnnnnnnnnnnnnnnnnnnnnnnnnnnnnnnnnnnnnnnnnnnnnnnnnnnnnnnnctgtatccccactgcctggaacaaacctggcgcctagtgggttcgttgaatatcactcaatggaatgaattgacgaatggtggcccttgtaccatttcaccatgtccaaactagtgcttagaagaggccattgatttgctgaagcttcataactcagctgtggctacaccctgcctctgtggagacctttccccaagggccattgtccactgtgcatttgcagctgggggcatgtctgggcactgtgcttctagaggtggaggcagcactgggcagacgggtcaaggccaggggcagaagggttcgcatggaggggcagcgcttcccagcctgcagaaacccaggccatcatacgggagagactgtaagactaggagtggttcaggcaggctcacacaggctgctttccccagcctctgaattgtaaagtgaggcttccctatacctctaataaggctgaagtagggacagttatgacaaggaaatagaaatgcagccccaagcactgtacactcatcatttaaggtggaaatcgacctagggtccaccaattacctaaaggtctccagggg

SEQ ID NO: 17933 - DNA, 947 bp, Homo Sapiens
gcacgagggatttactgatagcggtcagctgtaataacacaatttgcatagagggaaaattaaatagcgaaagataacttgtttgtttctaatgcaacagtaaaataaaatcagcacatttaatcaaatggaaagaaaaacctgtttgatgcttaacttttgtattggaacccaaaattgtcccggcatgttccctctgatgagtatgtattaaactttcagatggctgtgcagatgagctgtaatcatcgcaggctgagcagcatcagcgctgctttgtcacagtgcctcctcttccctcagatgctggtgtgtggcataaacagggctttgttaggtggcgggactgtggttttgctgtgtggaaaatcaaattgttaccaccatcctccacatttcatttatatactgtcacactgcctaaagtaacctgacattctactgctttcctcttcaatgcaaagccatgtatctggttcacattttaaggatgcaaccttctaaaaaggtcaaacagaaagttactaaaacagttcactgcacaatgataaacatttaaatggccaaagatatttgtataattttttcagtagctagaaagacaactgtgaaaaaatataaagaaaaatttccagagaaatgtgatcaataaaaagtaacccatataaaagcatacataattttaatttttcattctaattgttatctttttaaacattctatgtatccacatcccttagattgaaaaattcagaatggcacactgcatctgcagatgtgaaaagtaaagatcctaaggttttttcttaatttcatatcagtagcctctaactacagaagaatacaaattgaacttgtggtccattatttgttacaaaataacctccccctcatggtgaatcagtttgataagttgtttagtattttcctgccctctttccaggtaa

SEQ ID NO: 17934 - DNA, 544 bp, Homo Sapiens
gcacgagggtcaaaccgccagggatctattgttacaggacctatggcccttgttagttggactctcaaacttccttctttttccctaactgattaaaagtcgacattacctggttttaaggggaatgggaagacatgcctatttgtgtaaagcactatgtggacccctgcctaacactatattataaaaaattcatttgtgtaaaactctgaaaacataaatttaaaaagatgttagtaattctggtataaggtttgggggggcccggtggaaatgtaggaaacatttataacgttcttaaaagatacaaaattcacctcttttttctttgtacttggggatggcactgctggaacaaatatttaacaccttgatactgcttatactcctttcttcggggagtagttacataagacatgattttactactggcttttcttttaaaaaagatactatgattaatacttctgctttatttagatggcttctttacctaaaaagactctggtggcagatagaagcatggaattgaaaaatagcctca

SEQ ID NO: 17935 - DNA, 934 bp, Homo Sapiens
gcacgaggcacaaaactaatgaactattccctccaccaatgttactattttccccaatacaaattagagaagcagcagcttgccatttttttccattgcccaaatcaagagtaaaaaataaaaatcaatctttcatttatatggaaatgttagtattcttttctattcaatagtttttatgcttacttggggaaactattgtactatgtgccaggtactgttccagacattctatgtgtctattagcatatttaatcctgacttagctgtaactgtcctcaatctcttatccaaagtcctaagacagatatgtgctttggaatctgaacatatgcagtttactaagaaacactcctaatatgcagaccaggcaaaatgtaggacagcactccataatcaagcatattacatttctgtagcaagcacatgaataattatatcaggtaggataaatgaaaagagcctcatgtctattcaggtcagcttttgccaccaatgagttcatgtcaaattttgctgttcacttctgactggttaagactgctgcccccagaaaatgtcccatatctatgacatctatcatcttgcagacttatttcactgtggtgaacacatttaaaatctactttagcaattctggaatatacattattaactatagttaccttgctatgcaatagatcaacaaaacttattcctcctgtctaaatgaaactttggaccctttgaccaaccactacattcccctcagcctatccatgattgaaaataccagcttccaaatatcaacttattcaaaataattacagattctaaaggctggctataagatgtctaagctgattgaacagcatattggggtacatggtgtacaatagtcaacatttattcactccacaaacacatagctgccttctttatgttcatttaagcc

SEQ ID NO: 17936 - DNA, 857 bp, Homo Sapiens
  misc_feature (115)..(148): n is a, c, g, or t
  misc_feature (302)..(313): n is a, c, g, or t
gcacgaggctggaatcagatctgttggattctgccttcagagtagaatggctgactggcctttctattgcccttatcaatgaagactgtttaaagctgaattgactgagcagtgnnnnnnnnnnnnnnnnnnnnnnnnnnnnnnnnnngtagaaggctgtcgcagagtaaaataatatcatgaaatgacttcataattagctactttagattcatttgtgggaaaaaaagtcaaagtcaaaactttacttccttttcttttccttcccaaaacacctacatcaccatgccctattttctaannnnnnnnnnnngccaaagttattgactaataagatcatggtatcttactggcagagtaagtggattattttaattcccattggacttcttttccaagtgacttcctcagcaataaggaaagagttcccacatctgagctctaaaagtggttaatggatgtgtctttctctacaaatttagtgtcttaaaggcacacaacatacttacttaaaggaagctctcctgtagttctactgtgattttcatgtccatgcccatgggaaagagcctctgtcttcaatcttacatagttactctgggtctcataaccaaattaagagcagaagaaaatactgagtggtaaattaaatcagctttcccagaggttagaaacacttctcagctacctctgtattcatacatctattttccaatctgttcaattcgctgtcacattttcaccccatttaccctttgctaacacttgaaatgctgcctttaattaattctccacactcagaactttgagccatgccaagttagttaattatcccagtgtattgctttaagcatttc

SEQ ID NO: 17937 - DNA, 392 bp, Homo Sapiens
gcacgagggacggttacagtgtcctaatagctgttacatgtgtgtgtttcagcgtacttgaatcaagtgtacatttatagtaccaataaccgcctttacagctttacagttaacaattctctcacaaaactgtagagcattaggcatctgagagccatagagggccaactttgttccagagtgaacatgccttttttcctcaacatatacactactgattttttttaaaagtatgactttcaagtgaattaatgtattggttaggagaactgcttgctaagtccttattacctcttgttaaagcctcagaaggccgtgctgaaagccagaggggaaaaaaagagtaatgcacaggtatctcttttgcagtggtgactgtattttgagtacct

SEQ ID NO: 17938 - DNA, 666 bp, Homo Sapiens
atgagccactgcgcctggccccaggctcattttgtacatttcctgccccagtcttggaatcagtcatttctctaaaatgctctggttctttttagctagaaaatagtatctagaggctacagttgggacattagaagttttcagtgctactgagctgtgattgcatctaggcctttcaataaacagaaatagaaaataaacattttttaagaaatgaaaaagttgtgagttcatactggtatttccaattcaaatgtaaggtgatagtgtttctatttatttgattttatactagtgtcttgtaactctttatcttatgctggaaatcttgttctcaataacattaacaaaatgatgtatctgctagatcctactgaatctgaggtccccaggaccaccccaggttcagtgatgcactaggactctcagctgtggcagtgaaaggataccaggtatggcggcacagggaaaaggtacatggggcagagactggaggaaacaggcgcaggcgtctgagtgctctcccattggatacccacaggaaggatttgtggcaatgtgtgtgaagtgttatctagcagggaaagtgagttagagactcagtgcccacatctcttactgaggactggttacagaaagcacccttggcctagcatgtaccaaatt

SEQ ID NO: 17939 - DNA, 822 bp, Homo Sapiens
  misc_feature (655)..(663): n is a, c, g, or t
gcacgaggcttaggaccagtgccaggtgacaatctttccgtcatgctgctgcagcattttgcaccttgagagacaggaaaaaaaatgggggtgagggagtggaagatgatgaaactatttctcttttatgtctacatccttactcctcaaaatactttaagctcactcagaccccatataccctgcccacaatactaacacatgtactttgcataagtaaattgttgattaaataagagcaaaactatattcttatgtgtagattaaccaaggctaatttcctggagtttaatacactttggattcaagtaaaaacaatcacttaatgcagcaacatctcagaccctcttcactctagaaccgttttatacaagagaactcaacatttactgttttatttctgatattgcctgccattactcaggatgcaagagatgctctgcattccttattaggaaaaattggcctgtaaggagaatggtatactgcgtattactactgtgagactgtaaaattgttaatggacagtgtaaagaattgtattcattttattagcaagaaaaatattgcatacaagaactactgccctgaaatatccatcactccaatgaactgttctgcctgatctaacataaagttatatttcattgctcannnnnnnnngcctcactaaaatgactaacttaagggaatgtgcatttctacaaagacttttaatgggataaactcattagaagaaaatgtttcgattgcattcaggaacaaagaagcataacctttgttgactcttgtaatttattatatgcttcatttaacccattt

SEQ ID NO: 17940 - DNA, 742 bp, Homo Sapiens
actgcatcaaacacgtttaataacaatacaaaattcacactagaggcacattctggggaatgtaaatgaactatcacaagtagtaattctgctggaagaataaaataaggctctctgattacaaatatacaggaaggaatgatttaaaataggtatgatttacaatcacattacattgtattaagcactccaaaccggcatattaattaaaaagccagctaaaaggcatttgaacatatataacaaatcttacagtccacaaagttcatgtataacggtaattttaagtacttcatttcaacacagaaaaaatgaacaggtgagggatgcctctcaaaatattaatttatgtctatgacaaaaactaaaagagctttacattgaaaatggattacactactgatagaaccatgtagtggacagggcaaccacattaaaacaaaaccaacagtgccgagcaactaaaacagtactggcctttccaatcctctttcttcctggtaccaccacactgtcccaaattacctcttcattacccaaatcaaagaatctttctgttttcccaatcctcaaaaggaatgaagaaaaaccaaagagcaaactcaaaagatgatttttaccataaacctcaatgtggcttaacaagtacaaaggaaacccaacattcatacatagtgctccattccatggaaggaatagacacatcaaacattatccaacaggggtttctttatggattttg

SEQ ID NO: 17941 - DNA, 271 bp, Homo Sapiens
ctgtgcaatctctatggtaaccacatttcccagttgactactaccggtaataaaatcaaatggattgagtgctcacaactcttcagtctttgggctactttccattcttgaatttttagctgaattcatctctttggctggattttgtggtaaagtagttttttgcttattttttcccccaagaagggcttacatgggtctttttctatgaattattttcctacttgacaatatttacttgttacttttttactttcatcatgccttgggc

SEQ ID NO: 17942 - DNA, 746 bp, Homo Sapiens
gcacgagggtccctgtaggagtgccttatagtactgtctcgtgcttctagtctagtctgaaccacttgaagcctgcaggacccttcaactaaatctggatccctttgcttcttccctgctggctactcttcatatagatgctcttggagcctgtgcattccatgatgcatgtcagaactctcaccttgttcagcctggtgtgccttaacctcaggagtaaagggaatcatgtcggaaacacgtcgttaaagtagaatggtacaaacattggcttcttagtgccattagcacttttaccaggaaatgcaaaagatgcaaccacataatgttttcactttgttttatgctgttcttcaatcgctctttttgtttatttgtttgtttgctttcattaaccaaactcaggggaatgtcatgatgtcaccaaggccaatgggtagagaaataaaaaccagccatccataattgaatctgtaaagtcagtgaacttagccttttcaggttcaaaattacacaaacacaaggattttcttatctttcacctttcaaaggttttctttttattttgccacctgttttccaaataagaagtgggaagcctcttagataaattgtgataaaaatgtctctttgtttggcgtgagctatcaaattagctttgtgtgtccactgagccatcaaattaggctttggctgctggaggcctaggttctagctttggtcacctatcagaatcttactgttac

SEQ ID NO: 17943 - DNA, 883 bp, Homo Sapiens
  misc_feature (735)..(745): n is a, c, g, or t
gcacgagggttttcacaattttacagtgcattctaattactgatgggtgcaattacttttaatcgtgttttataaaatagaaaaaaagtggagttttcatgagttatagtaaatcccacgattattaagaaattcaataaaacatcctgcgcaacatgttaccgtgcctttgcctaacctaaatggatagttgccagttaaataagtgagtaattcaaatttcaatgtctcttctgaagtaactatgctatgaattgcaaagacctccataaaaccacccatggccttgcttttacactaactataacaactaaatgttcaatcagtttgtttgcctaactagcaaatgctgacatgtgtttgttctactgcgcaatactcatttgctgtgtgattactgtttagtgttgaaaaaaatcaacttcctagttatcagtgtcttactgtgaagaaaatactggtcttagttgtaattaggatacaatggtacagtgtgtaattaaaactagagtaaactgttggaatggctgttttacttaaatattatcaaaactagcataacataagcaaaatagataagtacaacactccatttagtgttttgccagattgttaccagaagtctacagataccaaactttcagttctgagtttgtacaggcaagtcctgggctgggtaaaaagttatattaatattgttatccacaagagatgtgattatgggttttgattacnnnnnnnnnnncccaaccctgcttttgaaatatccttgtacttaaattcatattgctaagacactgtattagaatatttaatattccccagatcctcttaggataaactgtgggaatccttctatgccatggatatcaaagtccacatt

SEQ ID NO: 17944 - DNA, 505 bp, Homo Sapiens
  misc_feature (131)..(143): n is a, c, g, or t
gagaaaatgatttacttatccaagctcactcatgtctaggaacaaaatccagaaatcctggctcttacactttacctggaaaagcaccaggccaaagaatccttgcaggttggaacaaggatctctgaggnnnnnnnnnnnnnttaaggggggtaggggaagaatctttgcagggactggcttatgtaaactatggagaaaaccaggtatcatctggttcctaaataattcctgtagcccttatagtaaccaattaataacataaagataaattatttcctgcagtttttcaacttagggaaatgttcctgtgaaggactcacttgatggaattgagaagctgtcttggcattctctaggataaacttgaaagtgtcttagtggttggcacggttcctgcaacatcgtcccctctaggcttgcacatagaagtcacagtgtggctggggattatttatgcaagtttgaactcttatctgaagaggtagcctggcaaccaatttat

SEQ ID NO: 17945 - DNA, 848 bp, Homo Sapiens
gcacgagggttttcaaagcgagtgagtccttgcagtttaatcattaatgttaatttctttgaaagccttggggctcctgttcctctgaatttacttagcggaaggttgattctgcctgcaggctcttcttgaggaatgaatgagaccctaggcaatacttccagcacaattccaggcatgccatgatgattgcaaacgtggagcgcctttgtcggggggccagacattgctctaataactttctaatgggtatatccaggagcttaattccaacaacaatcttactgtgtactgttcttaaactggtcctgaggctagagaggttaagtaacttgcccagggtcacacagttaatacacaataaatgggtgagtcagattgaaatttaggcagccaggctttcaagtttctgctttagcttaacttctactctttgtgctactccaggtgtcccatcgttggtaactaaagacgggtttagaataggttgagattttaggctggaaggcaaaggaattctgaggtggaaggaaacaaggccagagtgaggtgatgacttaacctaaaccaaaggctaccttgcctaaaatgttagtggctgaggacccaagccttctgcctctagcacagtgctctaaactaggccctgaaggatgtgtcgggtcaagccactggggaagcatccgaagggataccacctaggcagtacagggaaaaagaggaaaggacccaggaggttgctgagtcaccgtgtgcccagtcacatgccagtttcctcccaggggctgctgagctttcaagtgcttcagggtgctgagcagtcagctgtgtcctgggggcattctgaa

SEQ ID NO: 17946 - DNA, 834 bp, Homo Sapiens
  misc_feature (171)..(462): n is a, c, g, or t
gcacgaggcaccaacttgcggtggcgccccctttacccaatcctttccctcacttgcgcaaccagacatgattttaaggcacgacaaaagacccgaggtaaaaaccaaaaacagcactaggaaaacaaggctggcgtttttaatctttccgactaaactggaaactagagnnnnnnnnnnnnnnnnnnnnnnnnnnnnnnnnnnnnnnnnnnnnnnnnnnnnnnnnnnnnnnnnnnnnnnnnnnnnnnnnnnnnnnnnnnnnnnnnnnnnnnnnnnnnnnnnnnnnnnnnnnnnnnnnnnnnnnnnnnnnnnnnnnnnnnnnnnnnnnnnnnnnnnnnnnnnnnnnnnnnnnnnnnnnnnnnnnnnnnnnnnnnnnnnnnnnnnnnnnnnnnnnnnnnnnnnnnnnnnnnnnnnnnnnnnnnnnnnnnnnnnnnnnnnnnnnnnnnnnnnnnnnnnnnnnnngtgggagatcagtaaaagttaacaccttgccttctcctaattgtcaatgcctgctagcaaaagatggcagagtagatttttaaaagtttttcttgttttcacccaaacccaactgtttttcgtatactatttaccatccaattttactaacatttattaagcatctactattcaccataggccagtcatagtattctgctataggaatggaaaatcctggaataagcctcccacaccttaattctcaatcattgctggtggccccacaaattggtagtgctttcataaaggaaaatttggtaatacctgtcaaaattttaaaatgcccctatctttacatcagaaaatttcacccctagaatttactaattt

SEQ ID NO: 17947 - DNA, 624 bp, Homo Sapiens
gcacgaggggctgatgaattctagtacaaatcattcattgtattgtttttaaaagttgacttttacatacttttggaaaaggtaacattcacatggtacaaaattcatacagaaaggagatacagtgacaaataggtctctggcccaccctgtatccagccacagtcttctacctcaggggcttaggggcacccgtggtttaagtttcttatgtttgcttccagaaatactccatatattttataagcataaagaaagatgcatatatacatgtatgtgtataaaattatttatgcccaaatagttacatattatactcagctcttgaaaaatatctattaaaagtattatattcttattggcttcatagtattctcttgcaaggatgcaccattatttagtctccttaatgttgtttccaatctcttgttattgaggactgaatatacttgcactcatatcatttcatatatgtgtaaatatatctgtaggataaattcctagaagtggaagtccaaattatatatatattttaaattcttgtggatatatcagtccatttacattcctcccaaccatcaataaaactgtaaaaacctaaagttatccaattagaatttactt

SEQ ID NO: 17948 - DNA, 288 bp, Homo Sapiens
gttgattcgggaggatcctattggtgcgggggctttgtatgattatgggcgttgattagtagtagttactggttgaacattgtttgttggtgtatatattgtaattgagattgctcgggggaataggttatgtgattaggagtagggttaggatgagtgggaagaagaaagagaggaagtaaagtttaattatgcctttttgggttgaggtgatgatggaggtggagatttggtgctgtgaaattgttttaggtaatagcttttctagtcaggttaggtctaggagga

SEQ ID NO: 17949 - DNA, 644 bp, Homo Sapiens
gggcccggtacccaattcacccaatctagaacttaatgggtgcccctcactgtgtaacgtttttattatgatgactggccttccccggcgttacccaacttaatcggtctgctgcctctcgacctttcgtttactggtcatttagcaaagaggcccgggaaaatcacctttcccttaagctgctgggcctgaatggttaatgagattggcggtagattcggatgttactcacggcctttgtggtggttaacagaactctgaccgcctccttgctggctggctatcgccgacgcctgtcccttgtttcccttcttttctccccacgttcctcggctttccattgctgctctagtgttcatggctccctttatggttaagatttagtgattggcggtcccttggggtgatcatgcttgataagggcgatggttaattgcatgggccctcacgatgttttctgggttttcgccatttacttttggagtgatcgttctctctgattggattcttgttgatcactgggatttcactacttcctatctcggtgaattgtttgatacataagagatctcgttcagttcgacgtattcgttccattcgagggcatacaggcatcctgcaactgcaatgctgataaattatta

SEQ ID NO: 17950 - DNA, 594 bp, Homo Sapiens
gcacgaggcaggcaccagaaagggtggttcagaaacgaggtaagaacagctctggctctgagcgctgtgaagcactctgctaagcgctttatgcactgtctttgtgtagctactaaaagtacctcatctgacagattcgaaggctgaagctcagacagattcagtaacttgcccaaggccacacagccaatgattagcagagcagggatagcagtacttgacccctctgctgtctggtctctcctaaagggggagactttaaagctagataatcgggggaacaattcagcgaaacaagtaggggtttgtgctagtaaaggccacatccaattctggagttttcttctcctttgttttctgcttattcagagaagaagatagtacagacctgactgcaatttccccacgctcaaacagtgtctgttacacacaacaaaagcctcagtctatgcagatcaggatcactgacagagaatgtccagatgtgtgacaagacagagacacaaccataaaagtgacatagtgtctcagtaatggtttatataagaagcacagaggatatcatgtacaaagagggatttctatttgtctctt

SEQ ID NO: 17951 - DNA, 400 bp, Homo Sapiens
caaagttcaaagttgtacatcaggtataaaaagtacattggggttcaaataaacttattacatcacaatatgaaaatataacttattccttaatcatctgagttattatcatacaggctgtttcttcatttcatggtaaaaactttaaattattagctataaagaattgatagagaaaaatacatgtgtcgatagctgacttttaaatatcaataatgtcattatcattattctaaatttctattttaaaatttttccacaataaataaatctctctcttctttggcttgtctaaaacaatgagaaaagtctgtttaatcttaaaccactgccatgatttccagaacactgaaaatacctgagtgtttcatatatgaatttttttggaagcccaattttt

SEQ ID NO: 17952 - DNA, 736 bp, Homo Sapiens
  misc_feature (77)..(239): n is a, c, g, or t
  misc_feature (408)..(424): n is a, c, g, or t
  misc_feature (471)..(513): n is a, c, g, or t
ttctttcagggtcgcggtggtgcgatcatggtgcactgcagccttgatttcctgggctcaggtgattttcctacctnnnnnnnnnnnnnnnnnnnnnnnnnnnnnnnnnnnnnnnnnnnnnnnnnnnnnnnnnnnnnnnnnnnnnnnnnnnnnnnnnnnnnnnnnnnnnnnnnnnnnnnnnnnnnnnnnnnnnnnnnnnnnnnnnnnnnnnnnnnnnnnnnnnnnnnnnnnnnnnnnnngtgtgagccaccatgcctggccaaattatattttctagtgggcacataaaaaaggaaacaagatagaggtgagattagttttaatattatacatttcacctgatatatccaaaatagtaccgtttcagtaaagtaccaatataaaaactaacaaggtatttcatattcnnnnnnnnnnnnnnnnnggtactatgtctttaaaatttagactactccacatttcaagggctcnnnnnnnnnnnnnnnnnnnnnnnnnnnnnnnnnnnnnnnnnnnacctacgagcatgatgcaatagtgaaataaatcactatttcatcattctttagttatcttactgcagtggccaaaatatttcctcatctttccaagaaggtataaaagacatctggagataaaatctttatacattttgggggtttcttttttcaccctattaagagcacagatgaaaatccataatttctgatttatctttcataaaggcaaatagaagaaa

SEQ ID NO: 17953 - DNA, 279 bp, Homo Sapiens
gccggggggggaacacgttttattctgtgggcaggctagcctgtctcccagggctggtggagagcacgtcaccctaagctgccgcaagagcagggaggggcagccctgcaaaaagaatgcagggaaaagcgggggctcttaaatggctgctggaggcaacaggccccgggctgggagtgctcaataaccctccttagcccaagtgacctcctattccggggactttggtttgattttcttattttaaatggcgtggtggggcggaccataagcctggag

SEQ ID NO: 17954 - DNA, 629 bp, Homo Sapiens
gcacgaggcttgctgtcaccaggatgcaggtcccaggaagacagggatgctggtgacctgtttgctgtgtatccagggcctacagtggagtcagagttaaaaatctgcggtttttaattgcacctgaggatgcccccctgctctgttcctagctggtgttcgacaggcggaacggaaggattgaagagctgaccacaatacctcccaagccactgtgcttcttacagcatggcgccaatacccgtccctttgagaagtggagtctttgttcccttcccttgagttttggcaggactctgactatgtcataggtaaatttatgtgacttccgagactgggtcatgaaagacaacaccggttctgcccagttccttagaatgaaggaaggctggcaccatggtgtgaggaagccgaagccacacagaggctgcacgtggatgctccagccaactgccccagctgaggctcagccgccagacatgggcatgaagacatcttcagaacaactctggccccagccgccgtgatggcaggagaggctcccagagagaaccagccaacccccaggactgtgggacatagtaacaaaatcttgttgggggtgatattttacctaaagaacaatgaac

SEQ ID NO: 17955 - DNA, 930 bp, Homo Sapiens
  misc_feature (317)..(385): n is a, c, g, or t
gcacgaggaaggttaccatgtgatgattaatgggaatagtcagaaaaaattatgaagtggcagttcgctttttaagcagattgaaaaaaggcctgtctactgcaagtattctagatttgcaataagtacggtaattaatagatacccaaataataaatatttatgaagtgtgctagacactgttaggcatagtacagagattcacaatattactataattatggaaaaagtaaatacactggttgagcaaaaacaggcttgagaagccaggagcgcacagagtagttgacccagtaccggatttggaatggggagtnnnnnnnnnnnnnnnnnnnnnnnnnnnnnnnnnnnnnnnnnnnnnnnnnnnnnnnnnnnnnnnnnnnnnttctcacagagccagtttcttcagctgtaaaatgaagcttttgaccttgaaacgatgatcctcaaggtccttctcagcactggtattccctgaaggcattggatgaataacggagattctaacagtctctgttaagacaggatgtcgaatgggggcatttttgggagtatgttggcctcttattgttggtttgtttctttagctgcaaatgtacttaggactcatgatttttctgtaactagagtgccacaaataaaatacgtttttcattcagttggataaacagggcaggaaagaagaaaacccgattttactaaggtaaatgggcaaaaactggaagaaaggggagtgtgggtttggagagggtcccgatggtaagatcctgattggaaggtgtgttggttaaacaatttctgaactaaccgccagatggcatcactggccaggactgtttactacctgctagaaagggtagggcaaagtgaaacgagtcctctagggcgatggggtaaggggaaagcacgattaattgccctttataagat

SEQ ID NO: 17956 - DNA, 747 bp, Homo Sapiens
tgagctaccatgcccagccagtctttttttctactgagtcctaatgcctgtttacaatgcaaattttaccccgaatatatatttaactctacatttgttctttgagaaaggtaaggttgttgagcatagttttatcttttcgttcttagatccaccatgcttttggtggtgtgcatgtaaatgttcactgagcgtctactgaaaaagtgtttatagtgtttttaacacatcacatattttgaagggaaaaaaaatatgggcatacaaatagttgtttaactcatttctttctagggccatggagttggggagagaatgtctaaatctctgggggtaagtagtggttgtgttgctttcttttgagggtaatactgttacagtgagatacatgttctcttctcccagactattctgtgattccttgcttctataaatggtactacccctaaactgtaaaagtttggctaaaattctagttcttttttatgccccacaggtatgaacgggtagatgaaattatttgggtgaagacaaatcaactgcaacgcatcattcggacaggccgtacaggtcactggttgaaccatgggaaggaacactgcttggtgagcagcagtggggcccaattcataggtggagcacaaagaagaatcatttgattcttactgagaaaagtcaaaggtgtggtttcataaggtaatctgttatctgtggtgagcaggttgggtgtcaaggaaatccccaagg

SEQ ID NO: 17957 - DNA, 258 bp, Homo Sapiens
  misc_feature (176)..(213): n is a, c, g, or t
gcacgaggattgaaagtcagagtaaattcataatgtgttgtggtgctgcctgtggacttctattgtcattattgtttggatgaatggtgaacagaaatgtaaaataatatgctattaagggcaaataatttttgcctgaatacattaatttggaaaataaaaatatgcatgtttcnnnnnnnnnnnnnnnnnnnnnnnnnnnnnnnnnnnnnngggggggcccggaaccaaattaaccctaaagtgggtcggggtacc

SEQ ID NO: 17958 - DNA, 897 bp, Homo Sapiens
  misc_feature (513)..(684): n is a, c, g, or t
gcacgaggcattgaaaatgttaaaaacaacccgctcctcctgccaaatcatttgaaaacttaatttggggagtttcttagagctgagttgacctttaaatattattaagtattaaagtctctagtagctcagagttaaagggtattcccagcaagtttaagagatgaggaagggccctgaatgtgagccagagctactaaagtaggatgtgccacaggccacctctctttctgctctggttcctgtgaaacatagtgcttgttccagtaacgtcacctctaggaatgtatcctcaggaaataatcgttcacatgtgcaaacctgtatgtgaataaggatgcttttctcagtgggtttataacagtgaaacaaggaaacaaggtaatgaatggctctaaagaggctggtttaataaatcatggatacaagtaaataattggatttaatgcagttatgaaaaataatctaaacaccttggacctcagttgcctggtttttaaatgaagaaagccnnnnnnnnnnnnnnnnnnnnnnnnnnnnnnnnnnnnnnnnnnnnnnnnnnnnnnnnnnnnnnnnnnnnnnnnnnnnnnnnnnnnnnnnnnnnnnnnnnnnnnnnnnnnnnnnnnnnnnnnnnnnnnnnnnnnnnnnnnnnnnnnnnnnnnnnnnnnnnnnnnnnnnnnnnnnttgtaataaatcacgaccaaatcttgtttatttcaggaatgccctggttggtttattattagaaacccaaataatgtaatttagcattttaactaataaatgagaaaaaagcatatataatagatacagaaaaagcatttcataaaatttcagcatccattgattattttaaaaacttatggtaaattacgaatggaagaaacatttttaaac

SEQ ID NO: 17959 - DNA, 755 bp, Homo Sapiens
cactttcttggctaacgggaccccagagtaaccttgaaaactgagttctgggccaagagtaaatagagcgtcagatacaactctatacctcctctcttgctaaccacaattaggctttgttctataaggacttaagggaaaccagccctttcaaaagattctaccactgatatcaaccaaccccctgatgctgcccctccttttgtgcctgataagaaatcacagaccacagaatggttctggccagtctactgaaaatgcacagtaagggtttttctgtcctctgcttcaccttttgatataagagggccaaaaactccatcctgtgattgtggtaacaccgccattttttgtgcatggtacccatgaagctcaattactcatgggtactttcctcctttcataaatattcatgagtcatcctacagcttactgaatatgtatatttggccaccttcctcagcataaattcctgttccctttgcccctccctggaagtgtcagtttctggcttctggcctgcggctacacttctcagccagtcagaatggctgctctacagtctgaaaccattcatgagaaagagttctcccttcctaaattatgaacttctcattcttcagctgacagaccataaactgcagatccatctgaatgtatgaggaaaatgcccttccttttcatgtcaacttctgcaatattaaggacaatataacaccattattctaacattcccttttaatcattaatgaaac

SEQ ID NO: 17960 - DNA, 821 bp, Homo Sapiens
  misc_feature (746)..(754): n is a, c, g, or t
gcacgaggtacctaacaggaaatatttaattttccaatctccactttccatttttataaactgaaagaaaaaaatttaatatattacaaaatatctgtacatagacaagatacacccaatgggggtcaaaaacgagagagaaaggaatcagtgtcaggaacctaaatcagggagaatgaggtggcaactgacacttttctgatgcagcattctctctcaaaacctgctggtaaccattttagcacggtaactatatatgcatattatatatacacacacacatacaagtggttgggtgatgtctatggcataagctaatagaagttctacttgcaaatttgtgctaactgccctgctttaaacgtatagatttgatgttgctttcaaatacttatcgttcctatggacagttgaagaaaaaactaaggaaactgggtcaagtatatttgttttcaaaaccacaaaaatgatcacggtcaaaccagttttgcctcccactcatgaacagaatcagatttctcatctgttcaaaataatgtatttaatagacaatatctctcattgtacaataattaaaacaaaacgaaaaccacttttgaatggaattaattgggtctgtaattttcaaatagtcaaggtgaaattctgccaaacctttacttccatcatgtttatagataacgtaactgaaaaattaacaaataccttttcttcctccatacagattccaggatatttaaataagnnnnnnnnnctcctctgcttttagaatagtcaaaactaccaaaactttgtttttcattttaaaagactcccaaaat

SEQ ID NO: 17961 - DNA, 944 bp, Homo Sapiens
gcacgaggctcatttattactgtagtttaaaacaacaaacaagtattaccttccacagttctggatcaggaatctaggagctgcttaactgggtggttctgtcttgagatctcagaaggttgcagtcaagctgttagccaggactgtaccatcttgaagcttgacaaggctagaggagccatttccaagatgtcttgcttacgtggctcttgggcttctgttcctcactgtgtgggtattacacacagtgcctgatgctcacgtggctcttgggcttcagttccttgggcaccagttgcctggtggacaactggtatgtggcttcccctagagcaggtgatataagaaagtgagcagaaaccatacttttttatgacgtagcctcaggtgacattatttctgccatattccatgagtcacacagaccaaccattgaatcagcttggtatagtgtgggaggggactgcacaaggatgtgaatactgggaggtggatatcattgggccctctaggagactggctatcactgctcagagaagatgctgggcttcgttgactcccaaggtcagggtagttttggttaggttgtgttttattagtctctaaaaggagtagttttctaaatgagggttataaagcactgcactttacagttattcgggatataaaagaaatagtgggtctaaaggctgtgctcttgtggttgggttttcagtggggaggggagactagtctgtctcagactgatgctgttctcactgatttgatatttctgggaaattggatactacagtcacaaataggaacagtaagcctatagaagtttttcagggagtaatattttctatggcagtgtctgaattggtctcccttgcaagactgaactgtaggaacttagtcctagtttatgatacagcccaagtaacatattcccatgggaaaaa

SEQ ID NO: 17962 - DNA, 746 bp, Homo Sapiens
  misc_feature (130)..(138): n is a, c, g, or t
gcacgaggctctttgaatcacatttggtagtgattttgacttagtccagtagtcacatagctttaatatctagttcaaagctaaccatagtataattgttatattaaggagttattttttcttaaaacannnnnnnnngcttgttttggttctgttctcacttttaaaggatgctgagatggtaatatgactctccctattttggtaccaattctgagactgtatgaattttcaggtggaactttagcacacactgaagcaaagttgtgaagtgcagggcgggaggtgggcgtgagctttctattttgcgttgtagaagaagtgagatgtagtaagctaattaacagactttctagcagttctttttgtgatgtctctttgttaatctgagtctatctattttcggcaataaggtaaggacgacagtgttttgagtgtcctccttttctataagtgctttttttctgttgaaagaggtgatattataaggttttttgaaattgtgaattctaaaaaagaaatgttgtaaatacaattccattaactacatagaaactattaagaaagagagaatcaaaaatatttttgtgagggagtcggtcccaggcagtttgatgctctgtggaaggaggcgggaagggaacgttggcccagtcagttactgagatgaagatcgcccagctgtcaggacaccctaggacaagttaaagcactgtttagcttcctttgtctgtgtgataacctaa

SEQ ID NO: 17963 - DNA, 473 bp, Homo Sapiens
gcacgaggcccctttatggctacgattttcctggggggccagggaattgggtcccggaaatttcctttcaattcttagctcatcctgccccgcgtgtaactgatcttcggtcgctacaaccatcctctttcccatctgaatgtccttctcaccatatgccctttctgacactggggttggggctgtacttccgtgccgatcccccccttaccccattggggcttgtaaacggtgttcggaacccccgatgtcccctcactgtggacacctccgtcgccccgctcactgatggcctgacggctaattgtgtcagaaccgaaacacaaggtcccttaaatttcaacccttcaaaaaacaactttcccaccatacttaatgtctttcccatactcatacgggtatacttaaagaccaacatacaaagctatttctaacatggttgacaagaatcattcttctggcctgggtaaccc

SEQ ID NO: 17964 - DNA, 581 bp, Homo Sapiens
atgagccaccgcgcccggcctgcattggctatatttataataccaaatttgtgttgagttttgagttaatgtcttctagttatcaaaacaggtttgatccattctttgcaagtacctctaacttatctcaagtggaactaattagttttgcacacagattggtgctctctaggctatttccctgaaatttatcttgttacataagtcagatatcaaggagttatgctaaactccttttcctatcaaactcctaaaatgcccttttctctgtctatatttcttagacatagttacattataaatgtaacagatatatttaaagtaggttaataccaagtgtctcaggtagaaaattctcagaggttccacaaaaacttctggaactaataaatgactttagtaatcttgtagaatgaaaagtatatgaaagtcaattctatgtttatatgcaagcaatgaaaaatctgtaattgaaagtgggaaaatttaaattacaatatcaacaaataaaatatttaggaaaaataaaactgtagacattaaaaatgacaaaacattgccaataaattaagatctaaatg

SEQ ID NO: 17965 - DNA, 677 bp, Homo Sapiens
gcacgaggctttagactgtggagaaatctttcagatagccttcatgaaattactgagacaaaaaggtgaattccagaatgagactgttaagtgttgtctattttaggctaaacacaggaatggttattaaattgatattttttgagtacttttgaaggaaacagtaatcattgagtaaggatggcttctctaggagaagtaatgtcaaacttgatgttttctagacttaataggcaagggggatgttacagagaacaaattcatcaaggcatatgatgatgtcaagatgcaaatattttttttaattgttacatctctatatgattttatgtttaaatagcttttggagatactcgtaatcaatttatccaaccaactcacctcaaatattttattgctgagctgagactgttctagcaatgtaacagtgaagaaaatggacagagtttttataaaacttatattttagtgatgtgatacgtaacggagaagagctctgaattaaaatataacagatttgagggttgaagagtgagggtgagggtgttaatttatataggatgataaaaagaggcctctgataaaattgacctttgagtatactgtgtgctccacttaatagaatcactgatgactacgaacgaccagtgactgaataaaatacagcaaccaaaatc

SEQ ID NO: 17966 - DNA, 298 bp, Homo Sapiens
gcccgggaaaatgccctttattggctcccagggggtgggatgcaggattaaaatggaaacccccagggggctggtgtggggaacaaaacgccgggcctgcccccgaacctggtttctctgaagaacaacgtgaatgggggccccactggaaaaatgcttggggctgcaaaacggatggaatgcaagcccaggttgctgggtggtgccctccacttctggcaaggttgaacggggggggtctctgtgctctgcccacccatgggcccctgggacctgatcctgtcctccagcttcactt

SEQ ID NO: 17967 - DNA, 234 bp, Homo Sapiens
ggaacaaaagcccagatttattgaagcaaaagtacattccagaaagcgggatgaggctcaagcaagtgccctgtgtaaaaaatctggggtttaagtaccctttagaggtttcctatttggttacaccctatgtaaataaagacttggcctgccaccagtcaaaggctgaagtgaatgctcctttgtctccagaccctattctctggcctcagtgggatcctatcactacaaaaa

SEQ ID NO: 17968 - DNA, 252 bp, Homo Sapiens
ggcgccaaaacataagggtaatacgggcccctatttaaaaaattttaaggggattatatctaaggagaaggggccggaaccgggggttggtccccacattttccaagcattgagcggtatataccccccggcgtgtagcggtgaaagtgggttgtgttaaaaggtcgggaaatggcttcgtttttaaacctaaaggggggaccagcccagagtggttgtagtcctggggagtaaatattatacgaatggggg

SEQ ID NO: 17969 - DNA, 886 bp, Homo Sapiens
gcacgaggtctgactcaatatcctagatccaaaggacaggaaattagggaaggcttcaccctgtgggatcaagataagaagatcccatacttcttcccaggtaaggaggcctgtggcaggtcatgattcaaagctgacttggaatggcagaaactgctgagaggccacccttggagatttgtgccttcaaagatgggtttcatgagtctcagagaggaaaagacttgtcagctgggttgattttgcatgattattgaactagagctggtagacacgagcttctcagatggcagtggccagatcctccatctgtgagaatccgccacttgaagtggtttcctgagagtgttcacttggcagttgctgcgtttctcaagcccacctggcgaggtctcgccggacccttccctccaagtgcacttacttcttcatccccatgtacatctctaactttgaaattgtttacctctcctacaaaaatcttaccttttgacctgagcagagtagcaaagccctgttcactctgagggagcagctggcgtgttgaaggggaaaggccaggcacagcactgtcctcagaccacaccatatttggagcagaattgtgatacatgtcatctgtgtctattctggaaggttctttgttcatcactgtactcgcatcagcaaattttcagggtcctacctgtcactccaggctactgagctgaaccctcagaagctgaggtctccgagcatgctaagtaaccttttagaaaagctggaggcaaactgtcgaatgctagcaggctttatgaaaggaaacataaggagtttgtgtagtcagaactttgcttaaatttgcttcggaataagcaccataaccttagttggagatgggacttaa

SEQ ID NO: 17970 - DNA, 252 bp, Homo Sapiens
gcacgagggctccatgagctggtgaaccctagcgaaagtcccttagctcttcacgtggaatttgagccaccgctgatttggatgagaaatattctgattatcgacaatattgaccacggtgtggtgacggagcttttgccgaaacctccgggtgctgtgttggtacttctgaatggatggccggtcctcatggaaatactcatgaaaacaaaaccgtacaaatttgtcattgacatttctaccaattactat

SEQ ID NO: 17971 - DNA, 574 bp, Homo Sapiens
gcacgaggggaaggaaggccttggatggaccctcagattgaaggacccggtggaccttggggttggtgaatcctaaacagagagaattcgaggttgcctgaaagctgggtgtccttactccttttcctggagccaatatacccagtttttactcagtttgatttatattctgggcaaggaagctttgcctactttattggcacaatccgttgttctgtcgtttagtgcatatctgctggcttcagccctggcagctgagaaattgttttctatatgtagaaggaaaacctgagcatttgcaggcatctggttaaagcagggtctgtgtgtacaattttaaaacgggtaatatgtcatgctcttagttcatcttcacaacaaaactatgagtaagcggtattagcctcacttaacagatgaggaagcaagattccagaaagtaccagaaggtcattttatacaacaggagattggttcctgcccagatgacagaaaatgggagctctgtctagttgtccttaagtctgactgacttcagtggctcataacccgtgagccaagtatttgttggttc

SEQ ID NO: 17972 - DNA, 225 bp, Homo Sapiens
ccgggggcccggttcccccttcaccctatcgtgattcgcactatccgtgctcactggtctacgttttactgactggtgactgggaaaaccctgccgttacccaacttttgcgccttgccccacttcccccttccggcggctggcctaatagggaagaggccatcacccatcgcacttcctgaccattgcgaatggtgaatgggaaacggcacgcaccgtctaatt

SEQ ID NO: 17973 - DNA, 839 bp, Homo Sapiens
gcacgagggctctttgcctctgtgcttgcctgtgtgcgtgtggtcctcatggcggaacacaagaaccacccacaacacccagcaagcaggcccaggatgcttgggtcctgagcccagacccactgtgaatgaattagggcctactgagagatttcctaggattggggaatctgaatgagtgaaaagcatcccgggagatgcttgactaggggctgactgctgctggttctgatgcccaccactagccctttctcctcccatgtgatccttctcctggctgatggtggtcctgctcccgtggcacttgatcagtccttccaccccttagtaatcatcttcccttctctgggctatgggtggttctccccactggccctggtgtttttccacactcactttaaactgtctggagctggtctgctttctttcctgtcagcgggtatgtatctttccaaccaaagagaaaacttctggaaggcagcaacagtcatttgccctgcctcctaacagtctccactttgtccgtgtctgtctctttccctcccttcctctccttttcccttttccttctccacctcagcacacagtgggagcttccttgttccttatttctcaagttgtcctgagcaattcttcctcttaaggaatccttagtgcctgtccttgaggtgcccagcactggctgtgggcagcagcccttcaccctggccatggcctgccccgccctttcatggctgccccttttatggaagtgttgctggtttcaaagctccatctgctttgggtggctttagcttacttgctttgatgcaaaattggtagcacataacaccaagctc

SEQ ID NO: 17974 - DNA, 334 bp, Homo Sapiens
  misc_feature (75)..(174): n is a, c, g, or t
atactgagtttaattactggagctcactggccgtcgtttgctctgctcctgactggcaaaatgctgccgttggannnnnnnnnnnnnnnnnnnnnnnnnnnnnnnnnnnnnnnnnnnnnnnnnnnnnnnnnnnnnnnnnnnnnnnnnnnnnnnnnnnnnnnnnnnnnnnnnnnnaaaatgggaacctccctgtatggacgcattttccccggagggtgtggtggtaaccctcatcgtgaccgctacctttgccccttttaatttgtccgctcctttcgctttcttctcttcttgtcacgacgaggccgccggttttatccctcaagatctaact

SEQ ID NO: 17975 - DNA, 499 bp, Homo Sapiens
  misc_feature (202)..(246): n is a, c, g, or t
gcacgaggattggattatttcctttactttaagttaggaattactgtgtaatttattaattcatgattctcataacattcagcataaatgtaccaaagttgctaataacggaaggggatcatagtggtgttgaatgtaactttgaagtagggaatggccttttaagtctgagagacaacatttgaatccttttcagggattnnnnnnnnnnnnnnnnnnnnnnnnnnnnnnnnnnnnnnnnnnnnnagataagtgtatatacataaatacactcttctaaagttgtatatacatatgcacattacatacattttaatttattgacaaaattaaccaaattaagatttggagatgtgggatgttcttgttttaaaatagcatgtttgaaaccatcattttgtgtctaaaattacctgtaacacatggatgttgtccatattaagctatttgctgtttgaattatacaggtctacagtatttgtgttggcatagtttttgt

SEQ ID NO: 17976 - DNA, 705 bp, Homo Sapiens
  misc_feature (121)..(211): n is a, c, g, or t
gcacgagggtgaacttcagtggtactgtttttatttccttccttcccgtcttctctccttttttccttcagtaatagtataatggttaaaagcactgactttgaagtgatgggcataggcnnnnnnnnnnnnnnnnnnnnnnnnnnnnnnnnnnnnnnnnnnnnnnnnnnnnnnnnnnnnnnnnnnnnnnnnnnnnnnnnnnnnnnnnnnngtgaagtgaaattagatgattcatatatggtccttagtccacagcttagcacttgattcgagctttaaaaaaatgttaataatgtgccaggtgctgtgttagacactgaggagtgggtacaaaggtgactaaggcacagttcctgcccctgtcccctgaacttaaccttctgcattgtatgacaatttctggagttcacggtctgtttcagtacactgtatcacaaactgagtggtaatcataatcctaaatcctttttgctcttacattgacctagcatccagccccgggtagagctggaacttggtaaattataggttctcagaatagcagtttcggaagtgagtggaggctgaatagctcattgcatagagatactgtagctgtaggtcagatgggagcagggcagggggtggggatgggatggtggcgtgaattagatcacatcctgtcacttatacattcaaaagacatttgagcacccagctttatgc

SEQ ID NO: 17977 - DNA, 753 bp, Homo Sapiens
  misc_feature (116)..(124): n is a, c, g, or t
gcacgagggtttaaataagctctgtgccactgagcttaatctgaaagtatagtgacatgtgaaggatgcacatatgaatgaaaaactaaaataattgtaggctcttctataaatgnnnnnnnnngtgattggattgtgtctacctttttcctcaaagtaatctaacctaaacggtcatggtgttaaaactttttatggtgctaatcagaaaaattgatgttgcaagaaatgaggtctcaaaaatgggaatgtgcctcctcactctgcgtcacatgggaaataaatcctgaggccaggatcaccagtggggtagagtcatcttcatagtctcctgttatcctccccctgaacaaagaacaaagtgagactgggaagctagtgttggggaaacatttctgggataaactgtggagtggagaagaccatggagggcaaggcaaaaacccacagacttgtttacccatagaggccccactcacctccatgctgacagaattccagaaaaattccttccctatctcccaaacacctgaaattctgaaatattgccctactatttagcactttaagcttcagtgaggtgctgtaatggagagatagcttcatagtttagcctatagccaactttgcctcaagacctccagataagatgaagtggcttttacctcatgtgagtctcaaacgctggagagagagttccacaaccacccctgccctttctcccatattacgctcattagaaagtctactcag

SEQ ID NO: 17978 - DNA, 868 bp, Homo Sapiens
gcacgaggccctgaatgatgactttgccccatgttccttacctgtgctcagtgggcaccactgaggtctctgacttcaggtgggacgaaggtcttgcacctcaggtagctccagactcagctttggctttctcagtccaggaatacagagcatcctcctttgtgctcttctgattatgaatgcaggggatgcatatagtgacaagtggcaagtaactacttgtgtcttctgaagcagaacaaatggagactgatgtgaacagactgcttaagggccgagggaagtgctgggcacggggatggatgatattgacctggggtatcaggaagagtatgccagtgagccctaatacagagcagatgctgggagtttatctgcaaatcggtggttggtgtctacccaatgtagaaggaatttccaggtcccagtggcctttgcagcgtgtacattttcatacacaccaactgtgtctttagctaaggtgaaagcagcttggcccttgtctccaggactttgtgtgtgggcaggagtgggttcacccttcggtcttcaaagaaccaagtctgatcaggatgtccatgctgttgaagaaacgactgtcagctgacatggttaaccttattctgtgagcctgtcaggtttttcttgagaaatggatagattttgtttagattaaccataattttgccacattacattattttcaaaacactgaaatgaaatagaaatttctagaacttgtgatgtttttatcttttgctatctatccaggctactttttataccattagtagtaacctaatgatatcttgttctgaagtgaatatatattttttggcctccattataaaattccaaaagtaaagta

SEQ ID NO: 17979 - DNA, 701 bp, Homo Sapiens
tgctcatctgtccatccctataggtctgtccacaggggcaggcaccactcagaacagacccttccactgatcttgcccatctgatgttaccatgtttgttgtgaaggaagagactggcattctggacaactggcatcagagactggctgacatggagaacccactctgtgtgtgctgagggcagggcactcaccagtgcagaggcagaagtgggtgcctgtcctcgagggttaacccgctttgcctcccgcccacagcccctccaccttctaaaagctcaagagatgatcagactgaaacacccgcccatcttgctgttctgcctaggctggaagacctggcccaggtcatggaggcccctgctccacttgccagattcgcaggagtcttctgaccagagctgtcgcaccttgctgctgccactggcactgctgccattctcatcctcttgggggccttcattggtgccacattctttgtagccacctgggcctgtcagccatgagggaaggaccctcgttttagtctcggattgtaaggtttccatctctgtaccttctcacaaagaagagtcagggcccaagcttaaatgacctgttttttaattcaggaaggtaaatctcgttctctcgtcacacccggaattacaggtccatttgtcctcagtgggagttgatctttgattcctacaaagaacaata

SEQ ID NO: 17980 - DNA, 785 bp, Homo Sapiens
gcacgaggatgtatattcactctattcttaaaagcacaataacaaagatatattacagaggaaataaaactatcacaagaattaaattcaaggagttattaagggctactgcagcctcacaattagttttttaaaatttcttgtcctgaagaaatttcaagactagttatttggatgacagtctaggtccacagcatcaccggatcattggagatgacatttcaagacaggcctctgaacatctctcataacacataatttggttattttccctatgtaagatggattgtctcctgtctagggaagaaaaacagccattactaatatctgcattagtctactcaggttgcaatcataatatgctaaagtagtaaacttttaaaaatgacagtaaacctgagtttattaacaggttacattctaaaagctaagctagtttggaaattggaaagcaaatgtgtgtagatattcatatgtccttgaccagactgggcctttctcttcccaggtaagtcattctctccaatggggccagttacttaaaattacatcagacaattgatagagcttctagatctcccttctaaaacaaaagcattttgccacaaactaggatggagtaggtttttttcagactatttatacttattttatgtatttcaatactgccctttaagtaaaagtactatatactttctctttttttagattaattctgcttaagtcagtcttttaatttattctagtttgagtttttaaaaattttagaatgaaaaatctccaaa

SEQ ID NO: 17981 - DNA, 309 bp, Homo Sapiens
gcacgaggctgagccaagatctctggagagcagaaactcaagcagataaggcaggtttctggggcctagatgcatttactgattgtacagacagctgataagactgagcatggcttttgaaagcttcataggctgctgggcgtggctgtgcaacagcagtagcatataaatcagaagtggagtggatggaattaatgtctttctgaggcactcatattgtctgagaagaggtaaaggtactaattccttctggaatttgataactcaagtatgttgcaatatctgtttgaccaacaaagatcttatttt

SEQ ID NO: 17982 - DNA, 370 bp, Homo Sapiens
  misc_feature (70)..(144): n is a, c, g, or t
gcacgaggccgccttctctttttccctcttcccccttcattccctcttgtttccttccatttgcggttcnnnnnnnnnnnnnnnnnnnnnnnnnnnnnnnnnnnnnnnnnnnnnnnnnnnnnnnnnnnnnnnnnnnnnnnnnnnaactcattttgggggtggagggggccacctgggtggcaggggccctggagctctattgacctggtacactgctccgggactcctcccccgccaccctccgcgcatagggtccttggtctggaccctgccccccaaaagtagggccttgctcctctaccttgctctgagcacggagagccctgaccccaccagtaggctcgcccccagaagggcccaagtggccgtc

SEQ ID NO: 17983 - DNA, 511 bp, Homo Sapiens
gcacgaggatctgattagttctgtggctgtgaatgttataattaaggagatttgtagggagattagtatagagaggtagagtttttttcgtgatagtggttcactggataagtggcgttggcttgccatgattgtgaggggtaggagtcaggtagttagtattaggaggggggttgttagggggtcggaggaaaaggttggggaacagctaaataggttgttgttgatttggttaaaaaatagtagagggatgatgctaataattaggctgtgggtggttgtgttgattcaaattatgtgtttttttgaaagtcatgtcagtggtagtaatataattgttgggacgattagttttaccattggagtatgtttaggttatgtacgtaatctaggccctatgtgttggagattgacactagtatggctaggcccaccgctgcttcgcatgcggcaaagactagtatggccataggcacaatattggccaagatggagtgggtgttgagggtta

SEQ ID NO: 17984 - DNA, 806 bp, Homo Sapiens
gcaaccctctaactaagaaatattactgctgtgtgaaacacaaatgtctataaaccaagtgaatttttggactgtggtttaaaatgatatgtttctaacattatctttctactttatgtgtaatcacctgtcaaaacacaggaaaagaataactaattaaacattaatgaatagggggagtgtgtgtgggagggagcacatatttaacctgttagatttattttttaaattatatgatcaaaaattaaaacattatgttactggtccaagaatcaagagacaggataaatactgctaaaattttcaccatatttgaagggatgttcaggatgatgaacttaaaatgttgtcttttatgatttatgcaaagttcagtctatcctaagggaacaccttaaaaggagatcagtaatccactcaaaatcctaaagctgaggtcgacagagggtaagaaaagacccgatatgagcctccccaaattgaaagccacagggcagagatgctgaatttcagttgtgggttataaggagctcccttttcccacagccaaatctagagattagaatccaggattgcttgattgggtccattaactcagcaggtgagctagtgctctctaggttccttgtgtgcttagtttatgccattttcacatcatagtgaagctgacattattgttatccatgctttacacttagaaaatgtgggcatacagagatcatttgttcaaggtgatgcactagtaagtggtaaagccagttataaatccaatgtgacttcagaacttgcataaaagctactgtgct

SEQ ID NO: 17985 - DNA, 396 bp, Homo Sapiens
caaatttaaatttttattatgacaattgacatattaagtgaaagaaatgacaaaattattataataaaacattttgaaagaaaaagttacacaattaggccaatagctataaaatggctttaggcctggcttataacaccaaaagttctgatcaaactgtagtgaaacactgaacatttcattaacaaaaatactggcaccacccacaacatattttggttgtcacttacaaggaatattgtatttaaacaactatgcactgcaattctaacacactaggggttcatacactgaagttaacccctgaagctttaacctaccaaaaattcccatacttttaatgcacaatttactttgcgtgttatcaaaattacttttccagttttctgatcttcc

SEQ ID NO: 17986 - DNA, 511 bp, Homo Sapiens
gcacgaggggctaaatatttgttcagtataactattaacattcatcatccttcttccttaatgtattagtttctctgaaaaataagccacaaagtctgtccctttagttaaaaaagaaaacaacaaacccaaaaacctgaagataaattttataacatggcgtgaactggaatccctaataaaaataggcaatatcctctcctactgtttagtgtgcaaatcctctgacgtactttgaccagtttttagctccatgctgtgttttccatacattcaataaaattcatgggccacctattttctcattgtcaatttctgcatgtgctcggagaagatttctaatttttccataagtaaaatacaggtaaatgcaaatctaggatttttttccccccataatgtctcaatgcattgtttctggaagtaaactgatcagctagagtgaacagaaataataatctacctcagacttatgtctggtacaattctcaaaataaagaatttaaagttt

SEQ ID NO: 17987 - DNA, 927 bp, Homo Sapiens
ggtgaggtggaggccagaacgcaaagtaggttaataccaataccaggtaactaattcgaatcttagagagtggaacggtgggtatttgacaagttcgaggaggctggcagcttgcgggaggggccggagcggtctggcactggtttctctctgtctcacctccccagagattggacacacacgtgcacacagttctgatatcgtggtttctggcacgtgacatggtacccgtgttgctctgtggccctgatcccccggctgcccctgcaaggctggagctccggcagcaccgcagggcccggtaggtcctggcacacaggccgcatgctcattgggttgtgtctgtcaccgaccctccctgctgtcatccccgggctggacgtcatttgaaggaagagccaagtttcagcaagagttcgtgtctagaaggaagcacttgaacctcctctgtctgagacatggagaaaggaagtagagaacataaaaagggcctggaaaagtgtgtgtattttcagtgtatctttttcacacctctacactgctttgtctgctggtaaacatattgaaggttctggaatcaatttcaagatggaattgaaaagaacttattacatcttcttgtcaaatgttaagagctgttacttttcctgagacagtacctgcctttgttctttggataaatgagctactgcattgttggagcttcttgtcaccaggtgcagtaatattgttaacattcagtatttcaccagtcatgctagtgaaagtggaagatgaagcgataacgggctgcacgaagggtgttgagcatttagtaatcagtgccctgggtgctgttctccccaaggctttctagaactagagtcctatatgggaaatatggcctgtatctggaaataatgctgtgctggattatatcttaatccc

SEQ ID NO: 17988 - DNA, 299 bp, Homo Sapiens
ggaaagcccatgaactctttttccatgaacataatataatagtactcccctatcccctctacccaacttgggttttaaatgagtccttttggatctttttccccataagggcctctctccttttgctttacagggcaatcagggcagaataacagatatgttgagtacctaatttatttttctgaaaatctccatagaactcttaagttctaattcttcatagtctttgcaccttgccaagtttgctttcctttgggaattttgtcataaccacaaggttattccccaaacttgcagtt

SEQ ID NO: 17989 - DNA, 736 bp, Homo Sapiens
agctgctggatacaattttcatggcaataggaactgaagtacttcaaataatgtgagcttaaacatgttacttcattgaaacaaccaaaactacttgatgtttacatctaaaatcctggttaaaataaattttaaatttggaaagggaattggcaaaactaacattctttgtagcaaaatgtcccttagtaatagtcaagttgacctcatttcagtagttcataaaggaaaatccaaagccctcagcagtgaattacctggccacatagctgattttggtcactgtgaatgcagaccaatcacctagtactggaagctcacagtggtagacatcactatcacagtactttacggtcatggatttctcgtgaactatttcaggaacaatcacaaagatgacattcttcactgtatttgcatttgtaaccaccaagcaagtaaggatctctgccccagatgcatggtttgaggtaaggttcacagggaccactaaaggggcagagccaagtaaaaacatggatgtctccagtggacagtgtaggatttcttgataagcaaagcacctaaagcttttagttttaatacttgagaagttttaaaaacccatgcataaaacgtggaataccggtaaaatacacatatccctaagtctagtttaaactaaaatttctagagttaataattttcaataaaaaaatccagcttattttgatacaaggggtctttgggtaacatc

SEQ ID NO: 17990 - DNA, 405 bp, Homo Sapiens
  misc_feature (141)..(185): n is a, c, g, or t
gcacgaggtattttttgactttttagtaatagccattctgatggatgtgagatggtatttcactgtgattttgatttgtatttctctaataatcactgatattgagctttatttcatgtgcttgttggctgcatgtgtctnnnnnnnnnnnnnnnnnnnnnnnnnnnnnnnnnnnnnnnnnnnnngggttgtttttctcttgtaaatttgtttaagtttcttataagtgctagatattaaaactttgtcaaatgagagtttgaaatattttctcctattctgtagggtgtctttttactctgttgatattttcttttgcgtgcagaaactcttaagtttaattagatcccacttgtcaattgttgattttgttgtgattccttttggtgtctttatcatgaaatc

SEQ ID NO: 17991 - DNA, 573 bp, Homo Sapiens
gtggaccaggaactcgggccccaatgactggtggaaatttatttcccgcaggtcgccctggggggaagtccaagagggaaggatttctggcccgcgcttctggataattctgggcattgtctggctgtgtttttagtaataaaacgacaatggtaggtctctcccgtccctttcctacagatcctaatgctcatgactgaatcagcctggacaggccggggtgtccgggcactcgaatggggatggggtggcatcatgcggggctgggagtccatctccattgggaacggcagcaatgcgttctaactcttcaagaccttttcatttttagtggaaaatgtaatttattttgtatatttacttgttctcaaaatcttttaaattgtaacaagggattgggaatcaataagaatggacaaggaaattaaaaccttttatttttatatagaggggggcaagatgggctggaaaaaaggaactgattttttcagcatattttcaaaatattgattatgtaaataattacatttatataatattccacttttttcacgtactacaaatgagtaattt

SEQ ID NO: 17992 - DNA, 712 bp, Homo Sapiens
gccgaattccgcactaggatcaaagttctccatctttatttatgctactgtttaaagcatgactatacttttcagctgactctcttgaaaagtggagtataattaatatattgatacctggatatattatattttggttcatgattccatttgctcctgaaaattagaatgcattgtcattttgtagacatctccttgatagatttgtgttagagttaactccattttttaaatgggggatgtagctctatgacactaagcacctgtcatcagtcactgactatagttcaatatcatttgagtcttcaaggctaatatataccagataactgtttcactacaggtgatttgcatttatcagctaagagcttagaagaaattcctctcactaaagtatcacaggtctaacttttacccccttggtgacatcaaaagcataaaacgctgacatatataaagaggagatttcccggagtttgagaacttactcaaatgatgtaactcatttgacaaatgacttgcttcatgcatcttctacatagctaagtcccattagctaaaattatagttgaattgcatatgtaaatatctgtaaagttggcctacttagatccctaaggtggtgtaccatctgtgtttaaagcccagcacttgtgaagaggttttggctgcacgcttaagggaggctgtgaacactggcaagtctaagtcc

SEQ ID NO: 17993 - DNA, 533 bp, Homo Sapiens
cgcacgaggggccaccgggtgagtgctgcgcctccctcgctctttcccgctggcgtggagaggggcatgggtgtcccggccggaccgcgggtgagagcgtcagccggggtcgctgaatgccgcgggtaggcgcctcttcccgttggcccggagtcccagcgccggtgggcgagctgcacgctccgagtcagggtcagcgcgggggccgcagctcctctccactttcttggctgggtccggctccccctgcccccgtttgggggccccaccgtgtgcggctgcggtgggggctggggtcgacacgcatgttcgctgccaagacccccgggtaggagggcggcgttgcgaggaccccagggacccgggcgcttcccggaggaggcggtattcgagacggacttggaattcccttttcgcagcagggcacttcccatttctttcaggggccaaatgtcaccccctcagggaatccttctctaaccatctatcccactttttgtgccctcatcatcacctgataaactatataaagc

SEQ ID NO: 17994 - DNA, 306 bp, Homo Sapiens
  misc_feature (151)..(199): n is a, c, g, or t
  misc_feature (244)..(257): n is a, c, g, or t
cccgaaaaatgggccgggccccattttcccctaaaagggggttaattacgggggctccctggccggctttttaaaaagtcgggaaggggaaaaaccgggggttacccaatttaaaccccttggaaccaatcccccttttccccgggggggnnnnnnnnnnnnnnnnnnnnnnnnnnnnnnnnnnnnnnnnnnnnnnnnnttgaaggggaaaagggaacccccctggaacgggcctttaaccccnnnnnnnnnnnnnnttacccccaaggggacccctaaatttggcagcgccctaacgcccccttc

SEQ ID NO: 17995 - DNA, 507 bp, Homo Sapiens
tttcggcacctggcaccgccgttcactcattcatatgttttctttgtcctttcccagtggctagatgacttcgaggtgactttttattaaacggtcccccaaatattgcttatgtactttctcgggagggcattttccctgaaaattaagtcgtgctccaggtcggcgcgccttgttatgatttggccactctggctgttgcggggtggaggccctgactaccctggaactatatgccgcatgctttaaattaaagtttaaggattcctggttcttgctggaacagtgagaggtattactttgtttgtggccaaacaagagaagaacagtaagaatacaggtcgttataattcacggatgcatctgtccggcgctttgattttttgggcctacttttggttatttcaagggtttccatgcaaatgcttttgtcttttgtaattctggctttctctaataaaaaagtcttttttatctgatacaccataaatattaaagtgttgaata

SEQ ID NO: 17996 - DNA, 431 bp, Homo Sapiens
  misc_feature (162)..(170): n is a, c, g, or t
tcaaccttttttgggcccccccaagggtttgaaaacccatccataaacccaaacaaaataatattttttctaaaaaacccggaaaaatttcccagggggatgggttttaagaaccaaaaaaatttttggatccccaaaatccccccttttcccctttcccgnnnnnnnnntttttttggcccggggggcccaattgaaaacaccatgcccaaaaagggggggtttcccgggggacccctttcccaagaaaggaaaccccccaggcccccaaaggggatccccaaattccctccattttcctttggaaagggtttttattccccaattccttttcattaaacccctgattatggaaacccaatttttctctctcttgatttcaatttttgttgaaaaagggcccttggatgggtggggattcccccaaaaaa

SEQ ID NO: 17997 - DNA, 881 bp, Homo Sapiens
  misc_feature (591)..(599): n is a, c, g, or t
gcacgaggcggctccccatctccaggacatggaacttttgggaaagatgtccacctctcctccagtcagcattacaatctgtccttactgctgtcggaacaatttatcttattgcacatttgactcaaaccctggttccacctctattacgattgctaatagctggagacttgatgtgcccatttaaaagaaatatccctgaggctaaacttttctttatcttggtttcaccttatttatagcattcttgactttttctactttcttcttttctattttctatcataacgttcaattctatcaaaatttatcattcataaatcataatgaagcacgtgcattttcagctgattcactgcagctctttttttcttgggatagaaatcatgtcaataaaaaccatagtcggaccataaagcatcaaatgggacctcaatatcaaattgggctcaattctggaatacaactaaaacaagtggagatctatacacaagttataggttggtgttgggggaggagtcagtggatggaaaattgcttagaggagatattaaggctagggagaccaatgctaagttgactcaattggannnnnnnnnaaggcaggcctggaatcaggtatcacatgaaggatgatggggggaatcaaggaatttggtcagatattgaggggagagagattcatgataaacccaaatctctagagcagattgtcactaaatgacagcagagcggccgaggaagacacacagacacttccagatgaatttgcaaaggcagtttattgcatggttcacaagggacttcagctcaggaaagctgaaggggtatgagactgatgaggacagttgctgaacccaaagtacttggagggatgggat

SEQ ID NO: 17998 - DNA, 901 bp, Homo Sapiens
  misc_feature (768)..(815): n is a, c, g, or t
gcacgaggaaaactatatcattttagtctgaaataagcttttgattaaaaggttactttttcctattaataaaaaatggagattaagattgcttttcttgctacacaaaattatttacatactttcctgtcactagaaaagaggggaacataaaatgttccatggctgtaattgcagtgcttagagctataactcagattactatacttcctaaatgtaaagtggttattaattttagctggaggaaagcaggaatgttcagaggcaaatgaagattctgcagaataagcaagctcagattgtcaaagagaaagttcacttgcagagtgaatacagcaagaccatcttggcaagaagcaagctagaatctctttgcagggaacttcagcaaaattaatgtcaaaataagacattaaaggaggaacatatgcagcagaaaaaagaggaggaagaagttcttaaagaagtaactgcacatttccaaattactttaactgaaactcaagcccagctggaacagcatgaaatacacaatgccaaactgcagcaggagaacatggaaatgggagaaaagctaaagaagctcactgaccagtatgcactgagggaagagttattaaaagaagcaacagaatcgaggcacaaatatgaagaaatgaaacaagaagaagcacaactgaaagagcagcttttcctttatatggataagtttgaagaattccagactaccatggcaaaaaccaatgaactttttacagccttcaagcnnnnnnnnnnnnnnnnnnnnnnnnnnnnnnnnnnnnnnnnnnnnnnnntggtaatatggtataccaaatggggaaaatataatacaacactttctgcaaatgggctgaagagaaaactattcgtgataaaaatt

SEQ ID NO: 17999 - DNA, 785 bp, Homo Sapiens
gcacgaggggcccacttcggcagtcgtcgagccgaggactacggggagcaccacctggcagtccttaccaacctgggcgacatccaggtggtctcgctgcccctgctcaagccccaggtgcgctacagctgcatccgccgggaggacgtcagtggcatcgcctcctgcgtcttcaccaaatatggccaaggcttctacctgatctcaccctcggagtttgagcgcttctctctctccaccaagtggctggtggagccccggtgtctggtggattcagcagaaaccaagaaccaccgccctggtaacggtgcgggccccaagaaggccccgagccgagccaggaactcagggactcagagtgatggcgaggagaagcagcccggcctggtgatggagcgcgctctgctcagtgatgagagagcggcaactggcgttcacatcgagcggccgtggggtgcagcctcagcaatggcggagcagagtgagtggctgagcgtccaggctgcgcgatgagcacacactactactgatggcctttcgggggtccctgccccagccggagaggccggtgcacagggccccgccaggggctgggggcatcccggcttccacaatgcagctgctctgggcctcgggagaggagagaccccagtcccctgggctgcccttcccgggcctcgtctgtctgggtcctttgggtcaatgttgcacagtttttattgctcccatccctttttgtagtgggctgggttttaagttataaatgttaactgcctctggtgaaa

SEQ ID NO: 18000 - DNA, 231 bp, Homo Sapiens
ctacatggcaatgcagaaatcccagaagctttctttgtcgctgatgggatcttcaggctgaactgattgagttacttactcctgagcttgctgagaatgggtactctggagttgatggactagttaatgttacctagacggaaatctttatcttatgctccacactccccatcgttcttggtgaaaagggccggcggattcaggaagtgactgctgtatttcccaatatgt

SEQ ID NO: 18001 - DNA, 753 bp, Homo Sapiens
  misc_feature (524)..(593): n is a, c, g, or t
gcacgaggctccctcctaccaagtagctgggactacaggtacacaccactacacctggctaacatctttaataaaattgagtttttcctaccagatacacagttattcaatctattcaagagtcttttgtgctactcagtagtattttaatgactttttttcttctagttcttgcacactatttgttgtttgctagatcttttctctttgcttgctaatataacaggaatcttttctctcatcttgttatctaatcagttgtgctttgtgttataggaaagctgttgatttttgcataatattcttttgcctagtcactcgcttctctgaattttcttactatttgcagtcgttttcagttgattctgttaggttttctaggtttacaataatataatttaatctctttctttttgatatttttaaagagatggggtcttgctgtgtttcccaggcaggagcacagtggctattcataggtgcaatcatagtgcactgcagccttgaactcctggactcaaggnnnnnnnnnnnnnnnnnnnnnnnnnnnnnnnnnnnnnnnnnnnnnnnnnnnnnnnnnnnnnnnnnnnnnncatttatttttttctgttgtcaagttccatttgtaaccaaatgtaagtctggctgctcgctgcctgagaagcctaatactcctgaggcgaggtgtggtgtagcaccaacagttgaaaaatggctaggctcattcttcaaaaaaaccatttcaaacttttg

SEQ ID NO: 18002 - DNA, 660 bp, Homo Sapiens
gcacgaggtgaatgcttagtgtctggattttcttgtgccagtgtttacatatctgacatcgagctcctctaagaggccacgttcaagcttgtgtgtccctgacccaagatagccagtgctgctcccaggtggtacttctggtaccgtgttgagacacttgggattctcagactgtggacaggagtgtttgtcatttttcatactgttttcttaataagcgctcaggcctaaggtgtgacaggaagtcgcacgcgcttggccagagcacagtgaagcaaaggactgggtgctgatggatggagccacggcggcttctgcccacccggccgcagcccccagtgcctctcctggtggtcctcccagtctagagggtcacggcccccccgccctcctccgtctctggcaagctgaccttgactaacccaggaattcagggtcatcctcattcctaattaagtcaaacagcgagacgtggtttgcgcgggtctttgccggaagccggtcctgctggccaggtgttttacgtcatcagggaaatgtggcacacgccctcgaggcattttaacactgcgcttcaggatatctcaagttccatcttgtgttagtaacgtacccacatttgctggagttagtttattaaagatgcctacggtgaactct

SEQ ID NO: 18003 - DNA, 751 bp, Homo Sapiens
gcacgaggggcacctgtcccaggcactcctgcttcccagagggaggtcttcccagccaatcaagaggaagagaggagaagctagtaacagaaggagacccgccatcgtggccaacgacaccgcgaagagggaagggcggtccatgcacgagacccagcgtccaatcaagcccagcaggcgccggccagccgcggtgagtgcggggcccgccgatcccgtgcccacccggaacccgcgcagcctgcgaacgcctcgcgcagccccggttcccgccttcgcctctcttttcaaacttccccgctagcagagggacccggccccggcctatgggcagccccagagaggggccctcatagtgcagtggggggctgaagggctcctccagcgaggccagagtggacgccgaggccgaggaggcgctgagagcgagggagggctgctagcacattttcacctctcagtaagacatcacctggtctagcgcggtctcccttctcatcgcaccgcaccttcctcttgcgctccagaccacgtccagctgcctattccaatttcattttgctgttcaggcgtttgtttaaattatggcaggagcacatgacctcgggcatgggggcgccaaggcatgtcacagtatctagacataagcatggctggctgcatctctaacctcgccttctcgttctggactgctttctttattggatcttacacattgtgtgtacattacaaaataaataatacatttttt

SEQ ID NO: 18004 - DNA, 312 bp, Homo Sapiens
gcacgaggctccttaaaggcaagggaacatcaaatttggttgttttcttgcatcagagacttctagctcagatttctttgttggccatttttaagggcatttccaatgagtttttaagtgtaatgagtttttaagtgttggggttcttaaatggaatatgatataatttttttcagatgaactgcagatattacttaaaatcttgctgtgaaactttcacctgtggagtaagtagaattcatgattaaggtgaatctcttttgggatccagttcagtttttccaaaggatctgtttataagcataggactac

SEQ ID NO: 18005 - DNA, 905 bp, Homo Sapiens
gcacgaggtgaaactcttccagagtctcacaaatgttctccagagcagtgcttctcagactctctgtggtaaagaataagatttttacatttccaattcctgccagattgacattttttcgaaaagtataaaaactaattactaaattgtgtgcttggatgttgtagcaatatcaaattgctataaacgtttctaaacaactcaagttttcttcctatctcaatatgaacaagtaacactttgaggaccagcatcagtctgtgacccgcactttgagtcacactaatataaatagctgctacagttcaaatgggttctaatacttctgttttaattttcagaatttatttccaagaaatgtgggttgtgtcagaaacattagcacaatatggaataaaaactagcttctatttctggtagaactgcttcttgttctgccattagtaagtagtttccattgtctgatctcttaaaataactggaatttagaaaatccaatttagcccaattttaactaaaaaaaagaaataattctagattttaaaacttaggaaataatgtaaagaaagtattaaatataataacactctctcatctccttattacttagtggaatttctatataaaatggcttgttttggcatatataaattgtttttgctaataagggggttccaccaaataagtgggtttaaatttcagaaaactcatgcacatatttttgtaagtatacaaaagcatcagaaaattgtcctaacttaagaaagctgggtatgactaagaatgtcttaatcttttgaaaaattgaaagactcagagaaataagaatgttactttagagaataggaaaaatgatgggtttagggcatgttatactttatttttatgcatggaaaattgttttg

SEQ ID NO: 18006 - DNA, 740 bp, Homo Sapiens
ccgggctgcaggaattcggcacgagggtttccctcacaactttggtttcttctactgcctcactacacattactcctctatctccaacaacatggttcccatccatgctactttcctataacaactctgccaaaaattaccaaaacaatcactggttctcaatctctactcttgacttctccgaatgctttaagagtaatgactgactctgacttcaggacttccaagacccagcccaatttttaaattattcttgttcttctgtctttttgttatttcattattgactcctcttttgccactaattgggaactgtaaggattcttcacgatttgatcagtttattgagtttaacagcttttaatatctaacctcccaaaccactgagtttccaaaatttccaattgctcactgagcacctgtatttggattgcctgccagctcctcctcacatgacctctagttcatatcatttgattttctcgaaactgggctgtcctcctttcccaagtgctaatgaaattaccattatcccattcaatagacataaacttgaaggcaactgtaattccacgtctcttttgtcactgagacttaatctgttgcttcaattccactctatctcaatcttctctatttccaaatcacttctaccatctaaattaacattctcactatctgtcacttctggcccatttcctatctcatttttctcattactgctttcttatttcgcctag

SEQ ID NO: 18007 - DNA, 356 bp, Homo Sapiens
gcacgaggctcatctgctccggcacctttatgacgtgcaggggagaaggaccccaacccccggacattctgtcttatctgtacctatgtccgtgcaataattgaacccctgacctctatatgttcaaaattccgcttctggcctctgtcacatgaaattcaacaatctcgattactttacattgggggcaacgaaaatgtggtatttaatgatgagggaataacttatcttgttaaagggtcctaaggagacccttgaacagccattacatttgttcaaagcgctactcgattacaaggtggaaatgagatcccccactaagtgattatcgaccttgttggggtaagaccgactga

SEQ ID NO: 18008 - DNA, 613 bp, Homo Sapiens
  misc_feature (165)..(178): n is a, c, g, or t
  misc_feature (200)..(252): n is a, c, g, or t
  misc_feature (260)..(402): n is a, c, g, or t
gcacgaggctcttaccgagtggggggggcttatattacaggtaagaagtgccatagatggtatttataagacctagacaagaagatcttttgcctttctaaaattacattacttcatctgtgattcgttttaaactggtatattggcggacagaggaagccaacnnnnnnnnnnnnnngagatgtgtctccctctgtctnnnnnnnnnnnnnnnnnnnnnnnnnnnnnnnnnnnnnnnnnnnnnnnnnnnnntgatcatnnnnnnnnnnnnnnnnnnnnnnnnnnnnnnnnnnnnnnnnnnnnnnnnnnnnnnnnnnnnnnnnnnnnnnnnnnnnnnnnnnnnnnnnnnnnnnnnnnnnnnnnnnnnnnnnnnnnnnnnnnnnnnnnnnnnnnnnnnnnnnngcacctggactactttttatgaagaaatttatcttgacatagttgcctcagatattttcgagatatattatatcataaatttacgcatattaaagttccatcaattggtttaatgataaaatgtgtcagtttagtgataaatagcacacctactacatatctgtagtttttccagtgagcgagacttaactgagttcttggatcttaattt

SEQ ID NO: 18009 - DNA, 660 bp, Homo Sapiens
  misc_feature (43)..(73): n is a, c, g, or t
cataaagaagccccgggctgcaggaattcggcacgaggcttcnnnnnnnnnnnnnnnnnnnnnnnnnnnnnnnaaaagcatatgtaactagtgatgattttagcattagctttacttggaggggagaagaaacaaaattacaccttaaactctattagatagactacaaaatggatttgatgtattcttacttttccaaagaattttttccacctggaataagaagagaggactagttgaaacatttgagctggagaggcttatgggcaatatgaagtgggccaaattcttgcaatacaccctattcaattgaaagtacagtgtctaaggataagaatacttctttaaagaccaacaattgttttaatgcaatcttaattagtaaatggtttacattttttctattgttattggttttaaaatttgctaccctgaattctgaaatattataagagttaataccaaaaatacttttaatgtctgacatctcttacatttcacatggttctttttattcattgtaaataaaagtaaacttggataaatttgagaataaactttgaattgttgcaaactatgattatcaatttgtaaatttaccctttgacataataatgtacatttttaaatgtagccattaaattctctatatttaaccta

SEQ ID NO: 18010 - DNA, 293 bp, Homo Sapiens
cataaaaagaaagtagttggctcttcttgccctggaagagtgtctgtatccaagcccagcacagccagtttcctcctttgagctgtgtgtggtggagctcccaaactcctcccacttccaggtgctttccttgccctctgtgttggtgatcttctcttcatgtacgtgtccagagctgaactccctgttttcgatggcctctggccaacatagaacacaccggggtgctgctcccctagaagtgttttaattgatataaaatgcctatagagagataggcacacatcttgaaa

SEQ ID NO: 18011 - DNA, 889 bp, Homo Sapiens
  misc_feature (563)..(574): n is a, c, g, or t
gcacgagggggatacatcaagggaaaccaaggcagctagtttgcagaggtggaggaccggagaggagagaactgcatagagagagctttgcggatgtacagagtcctccttgagcatgcaagtgcgtactgatcaaagtgtggttgtgagaaaactacccatcaccagagaaaggatcacccgaaagaatgagggaacagtgcctgcctcccacacagtagccaagaagaggtgcctgttgccaacagctagagtgaaaacctctgaatgcaggggcactggttagaatactaagaagggtcttgccagacatccaatccaaaattagcaggcatgcaaagatctaggaaaataccacctaaaatgagaaaagtcaatcaaaactaacccattatacagatgatagaattcatagacacggacattaaagtagttgttgtgactgtagtttgcatgtttaagaaactagaagaaggatttaacatgttaaatagagacaaagaagatataacaaagatataaatcaaactgaagagatgaaaactgcagtgcctgaaatgatnnnnnnnnnnnnctcttaattaatagcagattagacattgcaaaagaaaagcctagttaacttaaagacatgcagtagaaactatctgaaatgaaacagaaaaaggctgaaaagaagcaagagagcaacattgagctttgggatcattttaagtagccaaaaatatgtaaaactagagtcccacaggagtggaaaaaaggaactgaaaaatatttgaagaaatattgggcaaaaacgttttcaaatttgatagaaactataaactcatacattcaaaaaatgagaacattttaaaaagagaggataaatgacacattatgtagagag

SEQ ID NO: 18012 - DNA, 649 bp, Homo Sapiens
gcacgaggtaacattaaaaaaattttattactacaaaatgctgatggtcatctgagccattaacacataatcgttttgctgttggaggttcttgccttgatgttgattactgctgactgattaggatggtagctgcttgaaggttgggatggctctgtcagtttctttaaataagataatgaagtttgctgcatcgattgacttttcctttcacgaaatatttctaacatgtgatgctgtgtgatagcattttatccacagtagaactttcaaaattggagtcaaaccatgttgctgctttatccacttattttatttaatattctaaatcctttgttgttacttcaacaatactcagcatcttctccaggagtagattctatctcaagaaatcactttctttgctcatccgtaagaagcaactgctcatccgtttaagtttgatcatgagattgcagcaattcagtcacatattcaggctccacttctaattctacttctcttgctgtttccaccacatctgcagttacttcctccactgaagtcctgagttcctccaagccatccatgagggtgggaatccgtttcttccaaactcctgttaatgtttgatattttgacttcctctcatgaatcatgaatgatctta

SEQ ID NO: 18013 - DNA, 786 bp, Homo Sapiens
gcacgagggttgtgaagaggcccttctgggttcccaggggggtctcacggtggcagctggggaaccaagtgcccctggtactcgccgcaatcaggaggccatgcttgctaccacccagtcctgcctcctgcgcagcggtttccactgaagtcaccccttttattagagacctctgaaaacgtatctcccgtgtctctgttccaaagcacgtctttgtctgcactcctggggtcccagagggactagtgacacagtctgagtgtgctgtccctgtcacagcagcaggggctcagcagagaggaccctcccctcctgaatctgcctcgatccggaaaaggctcgcctggctcctcccatcccagctcccagccctcctcacaccagcagccccagaccttctgggcagcaagccagagacacattctcaggtgtgctgggattcagactcgacccggagggtcacggagtgggggcttccgtacagcagcctcaggcggcactcccagccatgactcctgggaacaagcctgggggtagggacccccgggcaccttttctgggcctgaccagttttctgttcatgctgaagctgctgcagcgcctctggctcagtcctgccctctgcttcgcatctctctacgggcctcctccactgctcccgtttctcttttcagaacttatcagcatcagaacttctatggaaagaggtcgttgacctctctgtctgcacagcagggttctagtggctgacggtggtgctcatagccacctgcccctctggagctt

SEQ ID NO: 18014 - DNA, 495 bp, Homo Sapiens
gcacgaggtatattttgtctggttttatttaaggaaggaggataaatgtggcctctgtaattccctgtgacctgaagcagctgataagtcccatattttataacaaaagactgacttcttagatggcctttcttatataatttatactctctatatataacaattgaattggaactcataaaattatagcagtggcagatgtgtccatcaattaagttccataatacataagaataaaatggaaagtacattgtgaacttcgatagacatgttcacagaataacttgttattacttggtttaaaagtgcaatcctagttcatttgtttatatattttctaaaagtttttatagatctctgaattaaaatacttgtaatgatatttctgcttttatctgtattttatgttccaaaacttcacaaattatactggtaactaggtttgtataccataaagacaaatgttgaataaatagctgttctttcaatttcttt

SEQ ID NO: 18015 - DNA, 825 bp, Homo Sapiens
ggatgagccaccacgcccggccaataaaactcaacttttaaaacttcagaaggaaggaattgaacaaaacttgccttgtgaactttttggcttataataaattatgctggacttcaaaggagtcaaacaactaggctaaaaactgggttgatcatgtgttatacttcttcattagttcattattcatttattttgatggggaggtcaagagataattccacttcatagggaacatatgtatgcatttgttttagcctagtggtagggagagcagtagataaaagtagagataattagggaaggggaagaaatggcattatagaaggagaatgcttatttcatgggttcagtagatgtttatgggacttttaaaaattgataaaacattttaaaaggtggtatatgatgaaaagaaagtctgctttccaccacaaactcccagcctttccttaccccaaccccccaatccaagcaaccatattcaatcacatatgtctaggagaaatatattgtatctttcattcttatctttggcatatgaagatctttttgtatttagcacatatttcttacttttttaaaaaagaccgcatgccttgctagtgtagatgaaccataatttattcattttccgtatttattttaccattttctattgacagatatttacgttgtttttagccttctacaaacactgctgtaatgaacatacatatataagtctttgcattatttagtatctatacagaatgtattttcaaagtgtgactgtaagattgagactgaagttatgaaaagttaaactatttcaatcccatgttggct

SEQ ID NO: 18016 - DNA, 921 bp, Homo Sapiens
  misc_feature (371)..(620): n is a, c, g, or t
gcacgagggtgtcctgttccatgttccggttccatccaaatacactttctggaacaaatgcatggctccatgcctgtgtatctggactggtccctccctaaggacaggtgcaggactgagagtccaggagggtgaggacccttctcctccactagaccacagcagaagccgagtcttctgtcctcatcttcacattgtactcaagtcaccttgcccctgggggtgcctataagaagtaataagtcacagatctctctttctatttctgcttccctcagaaaacttggcgcatcatctggaaatagattcaggtaaacagcttgggatttggggagtcattcttccattcatccattcaatccatggcagcnnnnnnnnnnnnnnnnnnnnnnnnnnnnnnnnnnnnnnnnnnnnnnnnnnnnnnnnnnnnnnnnnnnnnnnnnnnnnnnnnnnnnnnnnnnnnnnnnnnnnnnnnnnnnnnnnnnnnnnnnnnnnnnnnnnnnnnnnnnnnnnnnnnnnnnnnnnnnnnnnnnnnnnnnnnnnnnnnnnnnnnnnnnnnnnnnnnnnnnnnnnnnnnnnnnnnnnnnnnnnnnnnnnnnnnnnnnnnnnnnnnnnnnnnntgtgtagatattactcgttgaaaaatacttatcaagccctagttttttgagagcattgtgctgggctctctactgatttgaacaaaaaatgtgcaattttttaaaaatcacatttatttttaaattggtgcttaatttagaagttgtttccataagcatcacctcactcactctggtataggtaagtgcttttcaaactaatatgcagaaacgtctctagggatcctgttaaaatgcagatctgatttagtaggtgggatgggcccaatattctgcatttctaacaacaccagttggtggg

SEQ ID NO: 18017 - DNA, 262 bp, Homo Sapiens
gcacgaggatgcctctgtcctaggttagaacaccaactagaagattaaactgctagtgagaatacacagataattgaattcagtgagtaaattttggactttagatccctttatcctattgataatgctctttacaaagcagtcttcagccatgctctgaaatcaattctgctatatagacaatacaagtccaagagagaactggaaggaacagaactgacctaatggtgccaaatttcccttgggaaccatacctgtaagg

SEQ ID NO: 18018 - DNA, 808 bp, Homo Sapiens
ccccgggctgcaggaattcggcacgagggcacgggccgcagccagcaccgggcggagagggctaccatggggaaaatcgcgctgcaactcaaagccacgctggagaacatcaccaacctccggcccgtgggcgaggacttccggtggtacctgaagatgaaatgtggcaactgtggtgagatttcggacaagtggcagtacatccggctgatggacagtgtggcactgaaggggggccgtggcagtgcttccatggtccagaagtgcaagctgtgtgcaagagaaaattccatcgagattttaagcagcaccatcaagccttacaatgctgaagacaatgagaacttcaagacaatagtggagtttgagtgccggggccttgaaccagttgatttccagccgcaggctgggtttgctgctgaaggtgtggagtccgggacagccttcagtgacattaatctgcaggagaaggactggactgactatgatgaaaaggcccaggagtctgtgggaatctatgaggtcacccaccagtttgtgaagtgctgatccctcttccttcccagttgcccttaagaactgagaaaggacagagtactctaagcagcagagcccacagaggctcgttcctttgacccttgtctcctggtggctatacgaaaccttcacaatctgcatgctggacttattacagctttccaagccccatcaataaagcccctgttcacgctgcactggtgcatgaaggtgaagtaggaggagctactccctcacaaataagaattcctgcagcaccgttcactcctta

SEQ ID NO: 18019 - DNA, 841 bp, Homo Sapiens
gcacgagggacaaaatcatttccagttgagccaagagtgagatagaaaatatgaaaaagaaggaaaaagtgagaaagcatttcagataggaacagactagaggagccatattgaaaaagataacaactgctaacattttggagaaatgaaaatgggcatgaatttattgattaaagaaatgtaccaagtcttggcagcctgaatgtttaaatgtgctataataaaagataaattatgataaaaagtattcatagaatagtgacagtttgcctgtcattagactttgatcagatttctcatcaccagtagtagacaccagaagacgacaacgggcattctccaaatggtagagaaagtaactttcagcctaggttttcatacacagcaaaactatcattcaaacctgaatgagaagggttttttttcagagagaatttttgaaaggactactaaagaaaaatgccttttgagaagaacgttatatttgaaggggaagaaatggaatgcattaagcagtgattaggaaagatgttggtaaatacgatggtaaatttagataagtgattatttaaaaagtaatggacgaaggttaaaaacatcctgtaaaaaataatgataagtttacaggtatagagattgtagttaaaagattctaggggccttatatgggaagatagactggtattttaaaactgtaaatttaaatttacatgtagaaattagtggtaatcactgtgtgctacctttataagagaaaaatccacttccattttatatttgtgaccacatgactgaaccatgcatactaatcagtatgggtttcttggattcttgccatgaa

SEQ ID NO: 18020 - DNA, 834 bp, Homo Sapiens
  misc_feature (403)..(422): n is a, c, g, or t
  misc_feature (434)..(499): n is a, c, g, or t
  misc_feature (521)..(627): n is a, c, g, or t
gaattcggcacgaggtttatttcttaaatgtttgatcaatcatcagtgaacccatctaagcctggtgctttctattatagaaggttattagttattgatttagtttaacaggtataggcctattcaaattttctatttctccttgtgtgagttatggaacactattcctttcaaagaactggcccattgcatgggtttgggccataatcccaaaagacacaatcttgaatgttataatcccaaatgatgaaatcctgaaagatcaaaatccctgaagtccaaaatccccaaaattccaatcccaaatgattaaaatcctgaaaggagatttgagaaacataaaaacacaacagagcacttcatagaccattttagacaataaaacaggaaataataacatacnnnnnnnnnnnnnnnnnnnnattgagacaggnnnnnnnnnnnnnnnnnnnnnnnnnnnnnnnnnnnnnnnnnnnnnnnnnnnnnnnnnnnnnnnnnntgggctcaagtgttaatttttnnnnnnnnnnnnnnnnnnnnnnnnnnnnnnnnnnnnnnnnnnnnnnnnnnnnnnnnnnnnnnnnnnnnnnnnnnnnnnnnnnnnnnnnnnnnnnnnnnnnnnnnnnnggtgtgagccactgtgccccggcctcctcagtccatttttaatactgaaggtataaattgtataaagatgtttataaagttctaattcattttatgcatttttgcaaatttgactccatgaaagtgaattatcacgaagctgaatttgtgtagcattgtgcatgtatgtaaaacattgcacttccctcataaaatatcttctttttg

SEQ ID NO: 18021 - DNA, 692 bp, Homo Sapiens
gcacgagggtgaaagggacttcatagtccagaagaaagaagggtccttaaggtcgagttgctcctctctatcaccaatatgtccctttctgtcacctctttgtgttttttcacctactctgtgagctacaaggaacaaggaggctttgaaaccagcccacactttttccccaaatgagaggaggaagccccttggatgaggcaggagcagctcagactctgctccctgctctgcgcccggctcacccggtgactggctctgccctggctccacttggggtgggaccggggcatgtggagaaggtgtccaggtggcctgttttgaatctgggtaaatcaagctgccaatccacagcagagcctcccttgggtcaggttgcagggaaatgggaaaagagggagcctcgggacagactcctgagctgtgtcctggctctgaagtcactggctgtatgaggctgtggacacagcacataggacacagcagaggaaagtgagtgacacacacttggagaaatagggagattcagccataggggctctgcatgggagggaacaggcagtgccaaaaagtgtgtgtttatagagagggtaagactatcagccactatatatatctaacataaaacttaccattaaccatttctaagtgtacaattaagtgaaacagcataaatatcaatcaagtatatt

SEQ ID NO: 18022 - DNA, 882 bp, Homo Sapiens
gcacgagggtctctggtagcatgagtgttgcgcacaattaacagggttattccaagggaagtttacaggatttgctattagaaccttcacactccaggttctatagcaagataccgccaatgtccaggtcttttttaaagccttagaggagtaggcgaggcctcccagcatagaggccaagcctcttccacctcttaccagaccagacctgtcccaacaggtagcccacactagaactctgtaatggcgtagggtttcgttaaacgacatcctcacgatggcagtagtgctccaaatatgctaagtagtctggtcttggcgccctctactcccgcccttcctgtatgaaaaaacgtcacgcatccacaaaggcgccaccaaacatggctgccttgcatttagcccagtttggggccagctggtcttaccgctgcacttttgcttttgttttccacttgaaatcaaacaaggcccgccttcattaagaatcttgtgctttcagaaattaaatatcctcctgtccaagactttgagggtgcgatttatttcacagagttaaggggccagtacacttcatggtataaaattatctttttcaggggatgaaggcacaaggggaaaattacttgaaacttggagatcttctctggcaagcaatttacaaattctggtgttctttgatctggctccccgcccagacaaccagggagttcttcatgttctagcctcatgtgttgcactataggcagtaatttggcatcagccatagaggagggatccgatagttgtcattgctgcccgccacatatactccacatggaatgatactcataatgcatatgttcaatttcctgtcgaggttacacagagttatatctcatg

SEQ ID NO: 18023 - DNA, 229 bp, Homo Sapiens
gcacgaggaataaactgacttgccttagatttaatggtcctgtggtggcagtgccaggaacaaaatttttctttcttgcccctaaaaagggggtttctgttgaccctaattgagttttgaacgttttaattactcttattgttgttgttgttgtcctttaaagaataaagctttttctctttcaataaagtctctttctctgtccctcccttccttcctgcctcccccc

SEQ ID NO: 18024 - DNA, 790 bp, Homo Sapiens
  misc_feature (370)..(389): n is a, c, g, or t
gcacgaggtgaaagaaatgggatatgctgcaacagagcgggaaataagcctaagagagagcctccaggaggaactcagtaagttaccattcccccagagatccagacatgtcttcctatcctcgctttgagcaccttgatgactcttccctgttcattccattgcagagaggaaaaaaatccagtacttgactcgtgagtggctttgacattttctctgaattcaaatctgttactctctctctgcttcattattttccagcccataagtcatagcccagggttgaaaagtggtcttggatccctttacccagaaaaagaaaacaagtgtggctctttggagaaaccacccagtgctttttctctctagnnnnnnnnnnnnnnnnnnnngaggtcttcaatctctttgtactaggggctacagacccttaagctctaaaaagcactgaggaatatccaggggtacacttcaaaaggaagagggaagagaaggatgaggtgcattttctatggcaggaaacttacttgttgtttcccataatctagaggctgttgaaaggaaaacaagaatggaagatttaagaaataagaaaatcagaaaagagagagggagggagaaaagtgtgtctaataaagaggagtagctactgtggctcagttggtacagatagatcataactgctttcaaaactagtccctgaaattgctcattaaatttcccaaattctttttagagcaggtacgaaatgatacagattgagaaggatgaattcttgtactcctaggcatac

SEQ ID NO: 18025 - DNA, 926 bp, Homo Sapiens
  misc_feature (666)..(709): n is a, c, g, or t
cttttaatatgtataaagaactgcagtgttaggtggtttatttgcaaactgttttcagtgttgtccatttttatggcacctttaacaatattcttgtttccaaagtacaaaaaaaataggttaaataatctagccataactgaatgtcaagcaataaaacaaatgacttttgtgcatagacttaaaaaatacaaattttagacatctgcatgtaaatgcaatctcttgtttactgctttcttcaacttgagcaatcgattccttatttactattaacttaagaacttgtaacggcctgtaaacattttctctcttactcttctttcaaatttacctgtccctgcttttgagtcataatatttaatgttgttctgcacatctctatacagttaactttttggctttcattctgtatagataagaaaatgttatattataaacagcctactcagtgcaaatatttatctgtttatcaaatccacaatatgctgtataataccggttttactatataatctattttagacatagctgtttagaactagagtgtgctatttttgtgtttttctgatgtgtggtgctagacaagttacttttgtgaacaacaaaaattatcccttttattcctagacaataccacctttgggtcttgttaatttcactgannnnnnnnnnnnnnnnnnnnnnnnnnnnnnnnnnnnnnnnnnnnctacctatgcccaactggcagctgtatcagagtgctggatttgggacatgcttttctctttaaatacataatatcattatataaattatttctagagtgtatttaattagggataaaattacttccctagtatggatatttgacatctatagggtgaatttgtttataaatatggctatatggaaacttattagcatttacttatgttgctacttgg

SEQ ID NO: 18026 - DNA, 794 bp, Homo Sapiens
gcacgaggcacgtttaaaatttgtacaaaagattataaattttacaggtgatttcacaattatggcatgagtttaaatttgattatatgtgggtgtcagttactaaatcatgtatttatgataagacttctaaattttagagaataaggaaacatacagaattagaatatgtttgagtctttgcagataaagaccacattgacttcagaatgcagcatataggcatgctgcatttaaaagaagggaaattattatttcaatttaatatgagcagtcgctatcttctttttaagggatttgttctaatagcagttacggtttaagaagataatggaagtgttgctttaacttcataggggtctgtaagagtattctcccatactcaaggggaaggaagcagaactgttgttctttctataggctgaggttgagtaaatacaggttttttacaactcctaaagaagttctttagtaagtagtaaaatgaatattgtaaggtatttgaataatttcggtacatttcccttctttttgggtacttgtgattttcctcaatgcactagtgtgtatctatggaaatagagcgccagtgtcataaagtagcaggaaaatacatttttagtaagtctgttttacaagcttatactcatagacttggacttgagtaaatttggccctattaaatggcatagaatttgcctggcttaatgttagagtaagttacagtatagcatttaatagtttatttattttatgggatagcacatatatatattgtggttggaattcttttt

SEQ ID NO: 18027 - DNA, 624 bp, Homo Sapiens
gcacgaggcgttactttaaagtacaccaatcaaatgtaggtttggtcttttcacatagtcccatatttcttggaggctttgttcgttccttttcattcttttttctctaatcttgtcttcacgctttatttcattaagttggtctttgatctctgatatcctttattccacttgatcgatttggctattgatacttgtatatgcttcacgaagttctcatgctgtggttttcagctccatcaggtcatttatgttcttctttaaactggttattctacttagcaattcctctaaccttttttcaaggttcttagcttctttgcattgggttagaacatgctcctttagctcggaggagtttgttattacccaccttctgaagcctacttctgtcagttcgtcaaactcaatttctgtccagttttgttcccttcctggtgaagagttgtgatcctttggaagagaagaggcattatggttttttgaattttcagcctttttgcactggtttttcctcatctttgtggatttatctacctttggtctttgatggtggtgaccttcagatggggttttcgtgtggacatcttttttgttgatgttgatgctattcctttctgtttg

SEQ ID NO: 18028 - DNA, 755 bp, Homo Sapiens
  misc_feature (88)..(145): n is a, c, g, or t
gcacgaggggacaaatatgctaatctttcaaaaaatatcttgtgaccccaacttaagaatatagtcttatctttatctgtttactctnnnnnnnnnnnnnnnnnnnnnnnnnnnnnnnnnnnnnnnnnnnnnnnnnnnnnnnnnnaatctattctagttcctcaatattacatatattcttttatagataagggacaaataaataaaagttggtcattttctgattattctgctgattttgatttggctcattcatgtcttttctttcaaacacaatcttattaagcctttctaaccccatttttgaaaaacgtaaaacccaaggaaagaagaaattttcaaaaaagataaaaattagaatatttgaactcagggtcagatatgagtaagaataactatttttacgaattaaaaaaattctcttaaaatcgaaatccacaaattaaatacatgatgaatattttataaaataattttccctcttctaaaagatttaacataagtattttccttaaattaatatatttaaagtataatcatatctataggcatggtttctagaacaattctatatccttatccagaattcacccattaattttcatataaatgctatttgcaatatacaaaggttgaaagctatctagacattagtatcttagtatgaaatagttcattgatgaagtttagtaggtaagaaatatatttttttaaaaaatacacatatatgcacatgtctgtgtgtatgtaaataa

SEQ ID NO: 18029 - DNA, 679 bp, Homo Sapiens
  misc_feature (199)..(215): n is a, c, g, or t
  misc_feature (497)..(536): n is a, c, g, or t
caatttaaagaatcccccgggctgcaggaattcggcacgagggcccatttctctagatagtgaggatgatttccgaaggagtgccttccccatcacaactctcaaaccgctgaaccttatagaaaggagatttgcttttctggataattatcaacacctttaggctgcagtagaagtgatgattctgtttgctttatgnnnnnnnnnnnnnnnnnggaagcagagttgaattgatgctgttcccattgtctgtaaactttgagaagtatgaattctttgttttagttagaaaaaaatctacttatataggtagacctcattaaacaataccaatgcaaggaccgctcctcagtggagcagattgctttttgaggtagagaacattcaagcagctgctaaattgatttttgtactgggttagttggcattttcactaggagtgaaaactgtgagactaaacagtttaatttacttagaatgtccctctttctctctcnnnnnnnnnnnnnnnnnnnnnnnnnnnnnnnnnnnnnnnncccgtgcgtcggcggggggggcagtggtgattctcaactttctaggaatttattaagtaaagtgtttagaaatggaaagaaacaattatataattcacagtgctccaggattttaggctcctacatttgaaaatacttgctgt

SEQ ID NO: 18030 - DNA, 826 bp, Homo Sapiens
ccttaaaaaaatcccccgggctgcaggaattcggcacgagggaaattgtgtaagaggtcaccatcaggtagctaagcacttcttttaaacctatgaataaaggaaaaaacacaagatgttaaatagtaagtgtgtatggttgctagttttgaacttcagtgcttaacaatgtcaaagtcaaagtgttcctgtgttgctgtgaaataagtaccaatacatgcagagtagctactattgttgccacatgcaaagaaaagacagcacactcagtaaattcttttagttgtgtttcttatagttaaggaatgttgatctattttatgtttttgtggtgtaacttaacatggcaaagaaaacaatcatgttaataacattttgcgattattttccatatgccaagcgttggctgaaaaacataagggtaagtactacaggtactatcattccagttttatagaatgtgcatgctgtaagaaagacaaaattatattattgtatgaatgaacaccattacctacccctgttgggaatcaatgatgataatctcattagaatattgtgctaattggctgcaaataatatgtcagcaatatttacagctttaaaaagcttttggttttaggtggttgattagcgtgatggcattacccggaaaatacaactaggttatagtagtattaaaaataactcaggtttttctaattttgaaacatttaatattttttatgctaaaaggttttagaaaacacttgccatttacagcgccttgttttagccctcgcgatagaatagtgtaattttaaaaaacccaagtagggccagtgtg

SEQ ID NO: 18031 - DNA, 1066 bp, Homo Sapiens
  misc_feature (868)..(878): n is a, c, g, or t
ccttacacaatgaagtggtggtgggggctaattgtctcacataacagaaaaaaaaccaaattttgttgtctctctttcaagaaatcagaattgcgtacaaaaaaaacctttcataaattaaaaaagaataacttttcaggcggaaatggcaacccgctctcactcaaaacaaggaacagcccacgggggtctgggccaagaaattctcaaacctgacagaaccgcaagaaaaaaaactgtgtcttggcagccctcaaagaaattccagaaaacttaggccttgaacgttaataacctggccagaataaagggtggttggccaacaaacttcccaaggcacagaattgtcttctcaaagcacgtttctaccttagtcccgagtggaccaggcccacgtacttaaggttgaactctaagaaatgtatcgggtatttacaaataccaaggggaactagtttaactcatatatcaggtccaattcccaacagttttctacattcagtgtggatgatcaataatcagctccaggacaaattctttttcgagggttatttcaatttctgggagtctacatgaggggtgtgtcaggggggcgggaccccatttgcctaatatgggagtcgtattacgccggctactatggcgctgttacaacgacgttgacttgaaaacactggcgtatacacattaatctgcttgcagcacatctctctcctcagtggggaataagcagaagggccgtacgattctgctctctacatgtgcctacctgaatagtgaatggaccggctcgtaggcgccataatgtgcggcgggtgtgtgtatatccgaagggggacgttatttgtcaggggcttagtcgcccccnnnnnnnnnnnccttcttttacgcaaaggtttggcgttttttcgggaagtcttaaaaagggggttttcttttagggtccggattaatggggttactaggcccctcctacccccaaaaacctgaattaggggggaaagtgctttcaggtagaggggaacattaccgtcgtttgtaagaaaaagcggtttttttgcgcctc

SEQ ID NO: 18032 - DNA, 488 bp, Homo Sapiens
  misc_feature (119)..(158): n is a, c, g, or t
gcacgaggccaggtcttaagaaaaaaggcagcttacactgttttgcttgcagagtcatatctttttcgtacaatggaaatcctcaagtccactttgtgcggtctccctctccttccccnnnnnnnnnnnnnnnnnnnnnnnnnnnnnnnnnnnnnnnntgtagcatgttggctaaaactggagcaaagtgcactaaaacaatttcctgaactcacctgttgtactattcaccttttaaaccataaattgctctttagccatttgtagtgcagtaaatgttacaggaaaagacttggcacattttcttccaaattttaagaggtgattttcaaaagctttattggggtatgttgtcagaccagggttttcagagttgatggaaaagagtcttgtgagaaaacttattttgataaattattacacacgcagaaaaactgatcacactgactggatctgtccacgacatggaaaataaactggattttcag

SEQ ID NO: 18033 - DNA, 741 bp, Homo Sapiens
gcacgaggcaaaggagagcatgcttccagctggagctgagtccaagcacacagccactcctgcacacgcatgcgtgcaaacagggaagcccaagtaggagaagaggaaagaggttgtagggatttgggaagaaccttgattattccctggaggaaaagacaaatctacttccctgaaatcaccctcgaatctacttccaccctcagaacttaaaatgaactgcatcctttttttcatcttcttttcttctccagtgaatatgatctccaaacccttattttttctttgaactgtaaaatttccactcatggacgatgcaaccaacagatgcaatctctgagaagatgaaaattgggacctcttattataaaattgacctagctggactcaggaaaccagggaagaagtcaatgcaggcatttaaaatgtaaagttttttctggttaaatctatttatttttcttgtaggttgagtatttcttcccagtttttctgctctggtgtataacaaacaggtcaaaatttcccatctttcctcctgatagtagttgaatcctaccttgcatacttaatgcatagtgaaatggcatctagcagaaatacacacccccaaaacacaccaccatttcattaggtgcccaaaaaaattctgtatttagcttatttatttattgttatttttgctttttcttaacccactatatattgactgcaaacgaattaataaattatcccttctgg

SEQ ID NO: 18034 - DNA, 880 bp, Homo Sapiens
gctcattgctctgcagagcgctggaagccccttcatgtatcgagagagaagctggagcacagagctctgatgcacagttggctgtttcagctctgactcagggaggaaagaaggatgccaaggctctgtcacagcggagaagtctaataccagagtggcacagagaaggattccagggatcagtcagggtgtcctgtacctatctgagtagagatgattcaaggatggggacatattccaggaaattgcacaatcttcccctggcagcttcagaggacgagtgaaaatagtgcagtatagtcaaagaagcaatgaatttaggatgaggaacctgaagtttctggaccagtttggtcactgcttagttacatgtccttaggaatgcttgtcacttaacctaaactttctgggttttatcctcattgctcaaactaagcaacaacaccgaagcttctctaatttgccttctgatgccaaatcggtcaaaactgaggtcagcagctaccatgacgaaagtaaaatggtatattgggtgaatgtttgaaaatttcagattttatattctgtaaagttatttacttactctatttcaacaccacaaaatcttgaaatttggaaggtaaccaaggaagctttgaaatttgttggcaaacccggagtagtatggtttcaaataccactccaacccagcacctgaggtcgggcaaactcacaaaatagagtttctaggtagcaggtgtttgctttggttttgcaatagcatttctcataacagaactgaaactgtatagattacaacacttccaagttaattttttttaacctaaagaaaccctacttctagcacctcctctgaaagatattttgctccaataccacg

SEQ ID NO: 18035 - DNA, 270 bp, Homo Sapiens
ccaaggtgggaaaattttatgggaaaataagaacagcctatggatccggggggcaggcggaacaggaattgggggctttaataaacaaaaaattgggcttcggccgcaaaattatataaacgggttaaaaaaaccccttccaccacctagaacaaccaaaatttaccaagaatgtgttttaaaaagtggctcaataccttttatggcaaataagaaggggggagagggaaaataatttgtgtgctaacccggttttaacaaccggtaatt

SEQ ID NO: 18036 - DNA, 860 bp, Homo Sapiens
gcacgaggaaagaatgtagggtattataaatgttcaccagccatttaagggacttgttcgcgtccttattcgtttcctcccaactttgtctagctcctgcagtgtgatagtcctcggacagaatcacaaagcctccttcagcagagttcctcccccttcagaggacatcctacacagtctccaggatacagttatcgaactactgcactgagacctggaaaccccccctctcacggttcttcagaatcatccctctcttccacgtcctattccagccccgcccaccctgtgtccacagactcgttggccccatttacggggacaccagggtattttagcagccagccacattctggaaacagcactggcagcaatcttccaaggaggagctgcccttctagtgctgctagccctaccctgcagggaccctcagactcgccaacctcagattcagtttctcagtccagcacaggaactctgagttccacctcctttcctcagaactctaggtcgtcattgccatcagacttacggactatcagtctgcccagtgctgggcagtcagctgtctaccaggcctccagggtatctgcggtttccaattcacagcactactcacaccgtgggagtgggggtgtgcaccagtaccgactccagccactgcaagggtcaggagtcaagactcagacgggactttcctagggcttctggattgggcaaacagaactgaatgagcccatagctgcttccttccagctgcctctggaacctaggccgagtatattgctgaggaacggggggtacaaggtgcccaagattgggtctggtggacaagaaacaagacttgtggttcacattgg

SEQ ID NO: 18037 - DNA, 830 bp, Homo Sapiens
  misc_feature (162)..(245): n is a, c, g, or t
  misc_feature (713)..(724): n is a, c, g, or t
gcacgagggttttgaaacattttattgtcttcttatgtaactgtatttctaattgctgccagagctgcattttagtactgagaatccaaatgctttagaattaatgatgataaattctgctgagttagttgtttaagtttaagtattttattagtttgggannnnnnnnnnnnnnnnnnnnnnnnnnnnnnnnnnnnnnnnnnnnnnnnnnnnnnnnnnnnnnnnnnnnnnnnnnnnnnnnnnnnttcagggttcttataaagcaaatacctagtagtagagacatggtattttatttctcttaaatgagtacactcattactgttgaataattagatttattctttattgaagcaggcttagaaaagattacccttttaaaaaagacatgactatttcatattgttgtagatgatttttaaactttatttgtattcagtggtttcaaataagaaagcaaccctgagtttttgtttttaatgtcatttagggagcatctactgtattatacttgttttatcttatatctttggtatcatcacatgtcatatctcatccctcatatcttcccactagtctgaccgatagatattactatccccattttacaaatgagaaaactgaggctagagcttaagtgagttccctttatccagatagggtcagaatttgaattcaggtcaatttgactataaaaccaccataattactannnnnnnnnnnngctttcactccctccttctgtgtctttcagaggattatattcgttatgcccctgggtctgatatctgactacatccctaaagaattaagtgatgactatctaaata

SEQ ID NO: 18038 - DNA, 876 bp, Homo Sapiens
gcacgaggaccatacttcgacatttcctctgccacaaaaaatgaacgcattttaagttaggagtcatgaatactgtattgaccatacaagtggattatggttgtctggatggcagataccaatagcaacattgtcatatgcagtttgcctcaaatcagaaacaagaagacatcggaatctgagatgctgccctagagaggacagttaaagaaggttcagtggtcctcagtttgcagtgctctagctcctggcagaagcaagagggaaacattcctaatttagttccaagattcctacagattattatcaagtagtagtattttatgactagagatcacaggcacaagttgaaacaaactaacatgacaagaaagctatagaaaaaataaacattgaactcagttcttcaaggtttcatcaccaacataaggaatgaagttggaaccacaggcagatctgaaaaagaaccaaatagagctcctaaaaatgagaaatatttattgaaataagaaaaaagccctcagacatgttgaatattttattagactcagctgaagagacaagtgaactaaactataagctggatctaaagaaattacccagtgagcagtgaggagaaacaaggagctagaaaacattggaaagttaagagagttcgagggaagaattataaagactaggagtcctagaaagagaaaatttagagaataaaaggagaggcagtacttgaaagataacacaatttttacaaatttgttggaaaaacatgaattcataaattcaggaagcacaatatatacccaacatatatttaaataaaatccaggcctagactcagggtattgtaaatgacagataccaaatacaagatttaaa

SEQ ID NO: 18039 - DNA, 901 bp, Homo Sapiens
  misc_feature (75)..(85): n is a, c, g, or t
  misc_feature (470)..(479): n is a, c, g, or t
atttcgacattttattgaacttttcatattacacaatttacccaaaacatttaaagtaacagtaagacaaacttnnnnnnnnnnngtcatacagacaaaacatctctaggtgaggcaatatgtaaatttcattgtcaaatcatgattttgttactctgctatacaacttggtaccatatcaatgctactaaatgactcaagagtaagacattatgcattccgtttatatgagaaaaagagattatttacaactacttgaaagagaaacagaaatgccaacaacagtatcattcaaattctagtgcaatgtcaattgttaccaagagatcttatttgcttatataaattttgcaaataattcaaacctggctatcttattagaagctgacaaagtatgcttttctgttgcaaaagatcagtggacaaaaatcctccacaacctcagctgataaaacaaatttaagcagcannnnnnnnnnccatttcctgaacagatgtactaatacttaggtagaaacactaaagcatttgtactcaatcaataaagtgaatgctttgtgcagttttaacaaagctgctgctaaaaagacagttgtgagtggtcaggtatatctgcaatagtaagcaagttcttacctttccagttctgtatgcttctgaaaacaccagctaaggtattaaataccccattttcagtgaccttggttttactatttcatatttatgacatctaggtgcgagattctgggggctttaatagataaccttattaacccagataattttttttggaagcccataaataaattgaaaatggcatttcgggaaggtctacatacatgtatttagtggttaattccgtaggtcgctttaagagcaaattaatatttaccagttttta

SEQ ID NO: 18040 - DNA, 676 bp, Homo Sapiens
  misc_feature (103)..(154): n is a, c, g, or t
  misc_feature (244)..(253): n is a, c, g, or t
ccgggctgcaggaattcggcacgagggttccccattataatctaagggaatgcaataaatgtagcatcgtgaataaatataacttttataatccgtaaagtgnnnnnnnnnnnnnnnnnnnnnnnnnnnnnnnnnnnnnnnnnnnnnnnnnnnnctttaggacacatttcccttaattggatatctttcccttaaatttctattagtagttgttttcatctgcccacatgtaattgaagatttnnnnnnnnnnttctgatacctgcagtattactaatactgcttaatttcttgaaatgtggaattgctgctgttaatgtcaagcaaaactcattatttatggcaaattgtaaagtaatttgaatttagtgctacctcaaaattaactttttaaatactatgttagattcttaacagttaaaggtctaatacatgcatgaggaatggttacttatgaaaggaaaaagaatttgtaagagttatcacctcagtttggaagaaattgaaaaaatgtaaggctgaagaaaacttacggaggtcacaaaagtgatgttttcaagagtaagagaaactgggagggagatacacagtggaaatgcaaaatgaatcaagtatagtggtagccctgagagcttagggactcaaatggaaactgtgtgaaagggaaactcacttg

SEQ ID NO: 18041 - DNA, 280 bp, Homo Sapiens
tttcagctgaaggcttgaaatatatttttttctaggtttaaattttgttcaagcgccgggaatttttggttgagcaaacgcgtctggtcttgctttcatctttgttgatgaatttgggatctggttaccattatcttcccacatgctttcattatgcttattcgtctgtgacggtcccattaaaaaggaaattaatatttgccatactctttacatgtgattcattttccgatacaacatttgtataatacaacaaaaggtcaacaatttgaactaaaca

SEQ ID NO: 18042 - DNA, 805 bp, Homo Sapiens
  misc_feature (41)..(176): n is a, c, g, or t
gcacgaggattacaggcttgcaccaccatgttcagctaatnnnnnnnnnnnnnnnnnnnnnnnnnnnnnnnnnnnnnnnnnnnnnnnnnnnnnnnnnnnnnnnnnnnnnnnnnnnnnnnnnnnnnnnnnnnnnnnnnnnnnnnnnnnnnnnnnnnnnnnnnnnnnnnnnnnnnnnncaagagcctcactcctgtctttagtgattgcactgaagcaggcctcatttttttgcagtcatgctaaccacaagttagtcaacattcactaattgacattcattagaataggtctccaaggtgaggcataacgttggggtgtaatctggatttcgcagtcatctttttggggaaactgaaagtaccatctcatttgcatgaagtgactccacactggccctgtatatggactctggtaaaatgtgagtgtggtacagaggaaataggtaagacccccttatctagccctctcggcagcagcgggggggtgttacaaaggactagctgttcaaatatcttttgtattgtattgattcccctattgaatataaatatttaaagtataataactatactgtaggtgggcttatgagtgttctaaatatctaatagctaaattgaaataagtagaaatataaacaatttagcagctttctgtaatacatttacactcaaattataagcagctaattctaaaaaagatgtcactgtaaactattgagaactatagtattttatatataattatatgttcatgtatttgaacccaaaataattttaactgaaatgctttgaataaagtatactgt

SEQ ID NO: 18043 - DNA, 827 bp, Homo Sapiens
gcacgaggcaaagactggtgcttttcatttcatcctttagagggatgaaacagttatttccgtctgatgagcattcggtagaatttttgaagtgagattttatgaagtcaaaggggactttacacagatctcgacctgctttgaaacctagaggtggccctttgatttgtgcgtgtccttgccctctggacaacttaatatttcaagtaatcgaataccaacttccctgccagcccacctgccttccgccccgcttgtgtaacagtcctgttttgttgagttgctgctattgcactgccagtgcagcccacaccaaatcacaacccaagatactcagataggaagactccttcctctcccagtactttaccaaaggaacccccgccaggacccacatggggccacgtgttggcagtggaatcagcctgtgcaggctggggatctcaggctgatcagtaggggccagctttggagccagccaagctgaatcccacactccaggtctgtgctcaagagaccagatggtgtatttccaaatgggcctctctggtatgggcaataggcaagctcctggggtctggttatgtggaagattcttagtggatgttccgcctggttagctggttctcttcagagaatataaagtgaatgcctttaggggtagctctgaaagagaaacccaacaacttcattcctagccatgaaagtagcacgatcatattgtactgtattgttattgtaaaatgactatttgccatgtcatgagtaggtagatgttttgccacaaatatgaatgtgtttgttgtttcctgactttaagcaatgaa

SEQ ID NO: 18044 - DNA, 446 bp, Homo Sapiens
gggcccggtaccccgttcccccaagcctggggctaatgatccttcctttttgtgaaaggttagaaacgttttgacttgggaaaaccgcggcgttacccaacttattcgccttgcagcgcatcccgcattctccatttggatgagtatataataggcccctttggatcgcccgtaccgggaatgggccagtctgaatggcaaatgggacgcgccctgtaccttcgcattgtctgtcgcgggtgtggtggctacgcgccgcgggatcactaccttgcctgtgggttccgcccactcctttccctttctgttctttttttctggcaaatgtcgccggctttcggctaccagctctagagggcggatgctttttagggtacctatttcttgctttcttgtttctctaccccaagtgacttgattagggagatggttctttaaatgcgttt

SEQ ID NO: 18045 - DNA, 693 bp, Homo Sapiens
ggttaactgaccaaaaagctgatagggaaatcatctttggaacacataagaaacaggctgtactctcatctggggagcaataaagggagatgtccctgaaaatgttttacttggaaaattattaattgctctttactgtcagccatttatgccttccattcaagaacgaacgtgaaggaaatgtcataaaccttaaatgtcagcaaggattcacttgaggcctactaataaagattaaatttgaacactttaatgctaatatactttatcacagagtatcttattttactcaatggcaataaaaaaaataacagaacccttaaagggcatccacattgatttcccagtgtgtgattcattttgattactgatataactatacttaaaatttagcttctattacagaaagcaaaattacaaaagaagaaaaggactattaattcaacaaatatttagggtgcccgaaaaacaaggaagataattctgcttgagaggtgctcactggctagaggagaaacaaacatgtaaataaacgctacagcacaattaaacaagtgctgtaacagagtgtgcagattagtcttttggagcgagagagagagaggaacagatcgtaacggcaaagtagtgacacaggagttgattcctgaaaggaaggaatttctctatgtggggtaagggaaatgaccgccc

SEQ ID NO: 18046 - DNA, 903 bp, Homo Sapiens
  misc_feature (570)..(626): n is a, c, g, or t
gcacgaggaataggtaggtctagcttttactaccaaatatttctttaaaaaaacttgactctttaaactgaaatgtaggataagactttatacttcgttctattatccagtaggtttcatttgttttctttgtgttctgtaaaagcaaatgaacactgaaggtggacagacttataggcggcaacattggctcacctactacccagctaccttcagtcttacaacttggatagtttttacatgataaaattaatccagctacctttagtcttacaacttgaataccttttacatgataaaattaatctcaaattgaaatttttttccaattcagaaggttctgtttggtaggagtcatgggtgtatctatgttctgtccttgagattcaggaatgccaaaaatattctgagatttaataacttaaaatttctgcataatgcataatgaaatgtatcacgtataatctttcattctttgggttacatgttttatttacctttgcgtgctctgcatgtctcatatattcaacttatattttagttaaagtgataacttgttactctagacannnnnnnnnnnnnnnnnnnnnnnnnnnnnnnnnnnnnnnnnnnnnnnnnnnnnnnnncttatatttattactggcctgtgtaaaaaggtatttacaaattgatcctgatttaatggacttggtgtcattgtcaggtgcccattggtattcttttaagagtatgcacatgtgcctattcatctgtagacctttagtgcatcttgattctttctttttaacacttctcaagtaggattggctacaaagaaaccctgtaagtagtggcagaaaacactcccttggtaaagaatattatgcgcccgcactcttccaccctggtgtgtctggtttcttg

SEQ ID NO: 18047 - DNA, 918 bp, Homo Sapiens
gcacgagggataattggacggggaatcctgagatcagagtcctagtttggctttgtctcttgtagcaggattttttaaatcaggggcagctctcttctcccatcccagccatgaatctttcaaccttagtggtcaccaacttgactccattccttatatcaagacttgtcctgtcaattctcccttaaatgttagttgcatccatttctaaatatatccatggccatcaccctagtaaaaagactattacctcacaccccgcacttgatcttcccccaactttaagtgactcagttccttatatcactgccacaagaattaacaaccatgtccatctttcatttttctgctgaaagattttcagtggttcccactgaataccaaataaagttcgaatcccttagattggcattcacagccttctacgttctggccccagctttatctcttgaaactcactactcaccatctgacaatgccactaaaaatccacaagagtgattttaaggtttttctatggtgaaggttcaaactggtaataaaccatgtttacatttttctggtctaaaataatttctatattactttataatagtcagctgggggttatttaagctcttggacgagcctaaaacttgtatcctgaagaaaatatttttttccaccagaagaaattgctttcaatttcttaaccttcaaaacaatgtcagtgttgtcacctgtgcatttgatagccacagcacaaagtattcttcggagcataaatcctccagccttgaatggaccattgtccagctcctgtgaaaacttaatattttgagaaagacattcaatggtacatgtttttctgtacacttcatgagtagttgagattttcttgtattaggttaatcactaaaaaggtgtttacctggggtt

SEQ ID NO: 18048 - DNA, 881 bp, Homo Sapiens
gcacgagggcaatgaatgtttttatttgttaatccacattagcagcaacaccagaaaaatcattaaccaccccacctagcattgaaactgactccacttatcgcttcttctttttaaattataatgtaaaaatgaattgcaaaatatattttatttgaacttactgaagtcaaaatcataggaaccagatatttaaataaagtttaaatctaaagtttatattttaaacataaaatttaaatcgtttgttttgaaaagtatatccttgaaaagtattttgatatagatgggaagattttcatagactggcatctatttttccacctactgtttaatgaagtaaactgttgaatgatgtaaactgttaaatgaagtaaacagttaaaactgatgacataaaagacaagcaaagcgaaggaaacatgttataaaagataagtattacagcattcttaagtatggtactttataaaatgaaaaccgggatgctgtcttctgagatatcaacatatttataaggagcacatgctatgtgacatacttcaggatgccaagaattttaattaaaactcaacttctataaagtgaatataaagctaataagaggaatatttttaaaggttgggatatgtaaaactacaatagcagcagtttgaaaacagaagagcaagaaataaagggaaattacattacattagtatgaatgtattcagtaacttctgttggagattatgtgttatatatgcacaattctagttatttttcaatcaatgctttataggcataaattgaaatacctgatattaaaagtttctgaaattcactatagaaataccctgagcataaacaaatgaggatattctctctctcctgtgaaaaaa

SEQ ID NO: 18049 - DNA, 604 bp, Homo Sapiens
cagatgcttagtctcaccctgactaattgaattaggaggtgagggccatgcctcttatttattttgttttttattgctgttactaattccccaagtgatttttatgcatggcaagttttgagaactaaccacatttagagccctgtttaatttgagcacattataagcactttcctgcttaaaaccttgcaaaagaaagcagtcttagctataaatcagaaaactactaaataatttatcatccaaacagaacccttttgggagggaaaagaggcactattaataattaagcagagactataggcacacaaagggcctggccccagcagactaggctatctggtcaccctgctagagaccatctaatgccgtattcagcaactgcaggccagtgtgtccccacccactgccctgtgagctaagaatgatattacagaagaacctttataaccaatttgattatagaaaacactaacttgaaaccaaatgaagcaaaattggtttcttcccccagaaattccatttctctcattagtagacctatattctacagtattgtactcagtttttatattttgaattgaatcaataaaacattggtagg

SEQ ID NO: 18050 - DNA, 881 bp, Homo Sapiens
  misc_feature (330)..(379): n is a, c, g, or t
  misc_feature (532)..(572): n is a, c, g, or t
gcacgaggggaagaaataactttttatagaatacctacttattgtaataaatttctaggcacacaaccatcttagtgtacagtacagttatggcttctaaattttcactattccaatcctactcacatccaaatatgtattccattgccagtttaatcttcctaacaatgcttttataacattttgctgatcaaaaacctcctatgatctcccaaaggcataatgacaaatatacgaaatgatatatgcacaaggctatttgttgaagcactaattcaggtagcaaaagactgataacatttcacatatcctactatacagaaatgattnnnnnnnnnnnnnnnnnnnnnnnnnnnnnnnnnnnnnnnnnnnnnnnnnntgacaaagatctttacatattgctataaggtgaccaccaggatatattaagtttaaaaggaaaaagcaagatataaataagcacgcacagtttgctacttttttataaagaaaaaaaaggggtacaaatacctatactgtttgcttacatttnnnnnnnnnnnnnnnnnnnnnnnnnnnnnnnnnnnnnnnnntttgtacctatagggaaaacatcagaacacaggagagagggcagagatggaagcttaacctctctaaatatatctaatataaatatagtagaatttttatatccaatataaagttaatttatatagagaaaatattttaagcagtgtagttcaaagaaataaacaggagtaaaatagaaagagccaatacagaaataaagtatatgtaagaattaaagataatatgaaggtggtatttcagtcagtgaaccaaacatagatttgttttccaatgatgccatgggcaactgattaactattagaagaaaa

SEQ ID NO: 18051 - DNA, 900 bp, Homo Sapiens
  misc_feature (483)..(544): n is a, c, g, or t
gcacgaggtaatggttatgttttatatgtttacttaagaagatttctcaaatgtctttagtaatgatatccttagggtttgctaagctaaattaaatgatggatatacattgaatgtctagatcattttcagataagatgtaatgctgagacatttactgctgaatattatgggtttaggttcatatacttttggcttcttatttctgagaaacgtaagtggatcttctagtaaaaatatcctgttccatattaaagagtcggttctgttagaaagcatgtgttcctggaaattgtaaaatgtatattcttggattgttggtacatgattgatagttaaaagctgcttgctttctaggtttttaccgaaaattagggtcaccaagagttaacattgtaattaatgtatgtgattaaaccactattgatgagaaagactattctgtgtgcaagcgtataaggagggtaagatgtatatttggtnnnnnnnnnnnnnnnnnnnnnnnnnnnnnnnnnnnnnnnnnnnnnnnnnnnnnnnnnnnnnntaatttatgtgagaaaaaatcttgggtggtaaatttccattctagattaaatgactgattattcatgaaagaggaagtatgggacaaaccagaaagtccaagcatgttgttaatgatctaagtgaatcatgataatgttgtgaaaagacaatttataaaaggaattttctgtgtgatcaagtgagttacaattggaagaacttgtgtatgagcctttctagagatcgaactttgatgttaaaaacacactaatacagaacttaaaatgttggtcccctatgttagaacaatgaggtgtttcataaaatgttgatttgcttttaataaattgtaagaagttttgatttttggttctg

SEQ ID NO: 18052 - DNA, 855 bp, Homo Sapiens
gcacgaggatttgattgtttggttgtgatttctttatggagtctcctgcttcagacatttccttccacctgtaatacaactttctggaagaaaattcatagatgtagttagttaacatattaaaggagacatagctcacataaacagggcctaccttctgttacagaaggaaaaaaatggagttcaattgctccacaatgtggcaaaagctaggcttggtgagttattgagtatgatgtgagaacttggctgtttgcacttaaatttctctgagctttggttttctaagtaaaatgatggtaatagcaatctcagagatctgtgggaagggtagaaaagctttaaaggatgaagttatgttcctgtacgtgaataaagcataaaatgttctgcatggctggaacattgtggacatctgtatatactttagtttttgtcctagcctcagcacaatatgcaaatcttctgtttctgcatagctacctttccaaatacctaacaaactgtttttctgtctttctgccttttttgttcttcctacttaccataaaaggaaaaatatttaccattttactatccagagatgataatcactctgctaacatgtttttgattatatccttccagatggatttttcttttctctactctttctctgtctctcagcctctgcttttaaagtggtttaaaatatgtaattttcagtttttaatgattctgctagggcgaaaaattggcagctacataggaaagttgctgaagcggaggcaaggaatcaaagatttatccttctctgatataaaaacttacccattttttcaagtgtaaggcatattgcagccactaataatttca

SEQ ID NO: 18053 - DNA, 522 bp, Homo Sapiens
gcacgaggagaagagggagctgattaattagttatatctcagccgagaggatgttatgagaaacacagatttgggtttaatagaaaaacttagaacccttcaagaaggaatgggcggacttgagagtgtcctccgctcctgaaaatgatcaagaaaaatggtaagaatgtacacctcaagggtggatggtaaaggtcagcctttaagcctcaatggcggtgtggttgtaggtggggtgggggtggaggccccgaagacaggcagactaccacagtagccccgatggaagcagtgagaatgaactggaaggagcggctgtgggagcgacaacgtgatgagaataaacccggcttggctctgccctgtgcacacacaggtgagctgtgtgctcccggatgtgtcagctggtatatgcgtctgtcagaaggcagctggggagcactgttagctcagagactaagaggcagacccaggaagcccttctttgcattggtcagggtttgctgcattttcccaagccca

SEQ ID NO: 18054 - DNA, 949 bp, Homo Sapiens
  misc_feature (335)..(356): n is a, c, g, or t
  misc_feature (366)..(607): n is a, c, g, or t
gcacgagggttttatggtaactatttagagtagaggacttaaataaatataagtacagaataagcagtatagttgaagttatttgtcatatgatggttttatttgatatttaaagaaattggaagtaatcgtatctttctgtatattattttattatccttaaagctcaatgtgtcatctcatgtatgtagaagttttacctaattttaagttattagttccattttaaatacagcagcaacagcacagcattgtatagtgtaactcatttttaaaagaatcagctctaggaaaaccaagattaacatctatcatctttctatatctacttcttnnnnnnnnnnnnnnnnnnnnnnagagattgannnnnnnnnnnnnnnnnnnnnnnnnnnnnnnnnnnnnnnnnnnnnnnnnnnnnnnnnnnnnnnnnnnnnnnnnnnnnnnnnnnnnnnnnnnnnnnnnnnnnnnnnnnnnnnnnnnnnnnnnnnnnnnnnnnnnnnnnnnnnnnnnnnnnnnnnnnnnnnnnnnnnnnnnnnnnnnnnnnnnnnnnnnnnnnnnnnnnnnnnnnnnnnnnnnnnnnnnnnnnnnnnnnnnnnnnnnnnnnnnngcatgaggtacatgcctagctctatgtctactttttagatgaactcatcagatatgttcatgctatctggcagattcttagcactgagatggtgaagggaacttatattggacacaatcctagtaaaagtagcgtaagctattgttacatacagataactccattagtaatgaaaacaaagagatactcgaaattaagttaaaataacacgggtgtttagcttcctcaagtaatgaactacaaagactatttttattccaaaacagttttcctaaagcagaaaaggaatacctgaaacattatcttctgtatttagtatattgcatattttgcaaatttttc

SEQ ID NO: 18055 - DNA, 825 bp, Homo Sapiens
  misc_feature (226)..(244): n is a, c, g, or t
gcacgaggatgaacatcttgggacagaaatctttgacagcaactcttattatgttttaaagatgcatttcctgaggttgaattactgaatgaaatagagtggccaatttcatggctcttcattcatattgccaatttgcttttcccacagggttgaacacatttatagtatcctgaacaacgcaggaggctatgaatttaattacatccttgccagcattgtgtgnnnnnnnnnnnnnnnnnnngttaaatttattagggaaatatggtagactgtgtgaattttaatttgcatctttttacttattattgggattgatcattttctctcacatgaggtccctctttcatgatttaaaaaactttttggtgagtgtaattttttcaaaacaaacatttgcatgttaggataaatgaagtacataacggggcaaagagggggtaaacttgcagaccaggagatttttgagcctagaaaactggaagaaaggccacccccagcctaaacaaacagaggggaggcaggagtcattggtagaatacttggaacctgtttcagtgctgtccagaaagtggtgagacttgccatcctctggttaatatcttctttttcctttttattacacaaatatagtatgttcattgcagaaaagaataaaaaataaggacaaagaaataaaaatcagccatatttccaccattcagacaatcccttgacattttcattgtatactctctccctcttggtatagaaaatataacacacatacacctctatataatactgtctccgttcgagctttctctcttaaccatgaaggggccc

SEQ ID NO: 18056 - DNA, 250 bp, Homo Sapiens
gcacgaggactttttagacatgtgaaaactgaaagaactcaccagcagccttgcctgacaaatgttaaacgaagtcctcaaggcagaaggaaatacaggtctgtacaaagaagagcatcagaaatggtgctacatgagtaaacagataagatttcttattgtttaagtcattttaaaagccagttgttttaaataaaaataataaaacatatggggtttgagtggaaaaatggaagcataccattgtaac

SEQ ID NO: 18057 - DNA, 236 bp, Homo Sapiens
gcacgaggatttaccctctcaattctaggaatactattatatcgctcacacgacatgtcctccctactatgcctagaaggaataatgctatcgctgttcattatagctactctcataaccctctggaccactccctcttagccaatattgtgcctattgccatactattctttgccgcctgcgaagcatcggtgggatgaaccctaatagtctcgttctccctgatctatggccta

SEQ ID NO: 18058 - DNA, 480 bp, Homo Sapiens
  misc_feature (99)..(160): n is a, c, g, or t
  misc_feature (176)..(339): n is a, c, g, or t
tttgaaaggaaagaaataataaagatcaaataactaaataattagaagtaaaaaatggaatagattaacaaaatgaaaagttgttttatttgcagacannnnnnnnnnnnnnnnnnnnnnnnnnnnnnnnnnnnnnnnnnnnnnnnnnnnnnnnnnnnnnttggatttgaagaagnnnnnnnnnnnnnnnnnnnnnnnnnnnnnnnnnnnnnnnnnnnnnnnnnnnnnnnnnnnnnnnnnnnnnnnnnnnnnnnnnnnnnnnnnnnnnnnnnnnnnnnnnnnnnnnnnnnnnnnnnnnnnnnnnnnnnnnnnnnnnnnnnnnnnnnnnnnnnnnnnnnntgaaaagtaatgagattgaatcagtaacagaaagtcgttcaacaaaagaaagcccacgactgatggctttactactgaattttaccaatctttttaaaaaagaagtaacaaaaattattctcaagcaattttcaaaaattg

SEQ ID NO: 18059 - DNA, 375 bp, Homo Sapiens
gcacgaggctccccttacaacatgacgcccgcgtatgatctcttccccccctcccttgttaaccagaagagtgggtctcttgtaaacacccgaaatttcttgcgtgatcataatatccggatgggacgtgtgagacatgctgttgcttgttccgtatctttagccatgcaaaatgaattaattcttgtgttggctgatcttgtgtctgtttccaatttaccggctttgattcaggcttacacaacagatgttccttcgggaataaggaaatttttggatggtatcaatgtcttgaatgggaaactgttcaataagctgattttggatatctaaaagttacctggctacagaaagaagatgccaaatgacacttaa

SEQ ID NO: 18060 - DNA, 417 bp, Homo Sapiens
  misc_feature (233)..(251): n is a, c, g, or t
gacgcggagcccagccttgggaggcagatgcgaaccgtgtccacagtgccccctactggagattccccacaagccgaggttttggaggtgggaaagctttggagagtcataccagtctcatccttgtctagatagtaattcacttcacagacattcactgagcacctactatgaggtatcacagtgctggctctgcaaacagagctgcaatgaagacagacaccgttccctgnnnnnnnnnnnnnnnnnnnatgtagctgatccctattctagttggtcctgtagaaactccacttggtttccagttggtctgagttatttggtgaactcaacaaaacttcccccgccttccaaaaactccacgataattcgatcacctggcaggggggaccccgacctttgcaaaccttcccagag

SEQ ID NO: 18061 - DNA, 331 bp, Homo Sapiens
aggcccctttgagtattttgttttcaattcgggagaaagttggaattaaaattaagattgttgtgaaatataataaggatgcctcttgtccaaagatggtaaaagggtaacttactggttgtcctccaattccagttaaaatgaagaggtctgcggctaggaatcaataaagtggttgggttaaggggcaaaatattatgattttgtgtttggatatatggaggaaggggattaatggtaggatgaggaaggaaaataatagggcaagggggcctcccaatttgttagggaaggatcggaaaattgtgaaggcgaaaaggaaaaaacattc

SEQ ID NO: 18062 - DNA, 624 bp, Homo Sapiens
gcacgaggctctcaggtaaaggttgtggccagaaagcacgggcagcctgggactcctgttgccatagcaacccagctaccgccgaggacttctgcggcttttccagcccagcagcagccgctccaggtactttctgatggctccacagtgcagctccccagactttcctcactcggatttgaggactcgatgtgctgaggcaggacccagaggggtcccaagagcctgtcctcttttgttcaaaatacatcttgaaacgtctttgtgaaggctcttagttttaatgcatggatgctgttatttttccctactgttactgaaattaaaaagtgtttgtctctgatcattagttctgttaacttttctgctggaatgtttttcatttgcatttgcttttctgatatatttgcagttttcattgcttctgtacgattgtggcctctttggatgtttctcttttttttccccctttgtctgcttttaaacaaacagattttctaaattgttttcttgctatagggagttgattttgttctttaaacatattctaggggatgagtagcaaaaaacaatgatttcagatttcagaatacaaggaagttcctggaaactgcaactcagtta

SEQ ID NO: 18063 - DNA, 851 bp, Homo Sapiens
gcacgaggattaattttttactttaaaaactataagtgctagattttactactatattacattagctgtctaaagaaattggttattttaataatacatgtcagaacaattttgctggtttcttggactttcttatttggattttagatgtaccataacatactttggccttttaccctcttgattaacatgagaatcacatactatttaaaaaagtgcaatctttgtcctaagcagaatatatagtttgttttttccagtaaccaaaattagcatctgtgttagtctgttttgtgttgctctaaaggaatacctgagtctgggtaatttataaagaagtttatttggctcacagttctgcagactatacaagaagcaaagcaccagcatctgcttctggtgaggcctcagaaagcttatagtcatggtggaaggcaaagggggagcaggtgtgtcacatggcaagagagggcatgagagagatggctaggcgcttttaaacaagcagctcttgtgttaactaacgagcaagaattcactgattgccacagggagtgattgataagggatccaccaccacccccatccccaccccatgacacaaacacctcactaggctccatctctaacactgggaaattacgtttcagcatgagatttggaggggacaaatattcaaactgtatcagcatcctcactgaattactactttattatacagattaagttacccttttttggttttatttcagcgtgctcttgctaaactggagctgaatctatcagtttgcttgagttatgtcgaaatacgaacagaaaacaagctgccgcaaagttctacagcttcttgg

SEQ ID NO: 18064 - DNA, 710 bp, Homo Sapiens
aactctcctaaactcttgtataatgacatcggcatgaaaatgaactcacctgaaactgaccttcccaggacattaagtcactagttggctgcttatggcacttgccagtgtccagcagtttcctggctgctcctggaggttgccagacacccggttcccccattctcaatgttggaggcccacagtctctgcacttaggggaccagctgtaacctccccacctgaccagatgaaccgcggggaaacaaagcgagaagctcccacctacaggatgcaaggacccaagctgggatttgtgagagtctcagcagaggctgtgaggaactccacagaaaatgaggcaggaaagcaaaagttccttgttagggcttggaggaggagagggttgtcaagcatgttttctttattattcccacacataagggagctggctttaagagctttctgtgacaaacctgaggagaaaaagccctgagacttagaaggcatttaagaatacagctcaagggggaaatcggtggagactgtatctgcggtggttttctccacctgtagccagaggctctctcatagggttctgtggctttccttggggtgccttttaaaggcatcccagtccagcccaggactgactggatttcaggagatctcagaggctggtctgacaccaaagaaggctgtaaagagagagaccatttggatgactgttt

SEQ ID NO: 18065 - DNA, 905 bp, Homo Sapiens
gcacgaggaaattgtgtaaaccattccttgatctgtttttgtacaagttaaagaacttcattgttcagattccctgacccctgtgtaacttagactgatgtaggagttctgtgctgtcctggaccatgttaattaccttacgacgtatttaagttccggtgggtatgtgattgtccccggtgaacctttaatactttcttggcgcttttcttgggcctgttgttgttgcagttccccttagcattgtattgcttagagcttggggtgtttgctcctatcttgcctgggctacgaataaaatatattttgatattatcccttctgttgggggcactgggagggctgatgtctatgtcttgtacctggtatttttggacatcccgcaccaacagagggaaggcatttcccgtttacagattgtttacgttttaagtgcttttacttgtccgtgttgggaggcgcaaaaagcctttttttcgatttagggattgaacctatgactccttatctctctgttccctggtgttactgattgatgtctgccatcacaatgaccaccacagtctgtcagaagagtatggctacctcagagatacactgcaagccattaatggcattccaaattttgatatcttgatcacctctcgcgtgctgctctatcttgttcactgactcgtctagttacgatttgtactgatgtccagacagcctcgaatccgctaacgcattgtatcttcaagtactattgcaaaataaagagtgtctataaaagacgttatttcccactagatgaaaagagagacctttcatatctttgtttggctgcccccaccgttgacacaaattgtggtgtacattggtggagaatagggaaggaggctcaacttctcggtgactcttttttt

SEQ ID NO: 18066 - DNA, 865 bp, Homo Sapiens
gcacgagggccggttcctgggcgtcttagagccaaggcgcgaggctcggagtgagaggtagagctggaggggaccctaagcgccctccgcccgggacgtgagccgctgcgcccaccgggctagacccggcgccatcatgctgcttctgccaagcgccgcggacggccggggcaccgccatcacccacgctctgacctctgcctctacactctgtcaagttgaacctgtgggaagatggtttgaagcttttgttaagaggagaaacagaaatgcttctgcctcttttcaggaactggaggataagaaagagttatccgaggaatcagaagatgaagaattgcagttggaagagtttcccatgctgaaaacacttgatcccaaagactggaagaaccaagatcattatgcagttcttggacttggccatgtgagatacaaggctacacagagacagatcaaagcagctcataaagcaatggttttaaaacatcacccagacaaacggaaagcagctggtgaaccaataaaagaaggagataatgactacttcacttgcataactaaaggatccccaggtgattcttatcagaagctcatcctacagttaattcatcttatgaaatgttatctgatccagtgaaaagacgagcatttaacagtgtagatcctacttttgataactcagttccttctaaaagtgaagcaaaggataatttcttcgaagtgtttactccagtgtttgaaaggaattccagatggtcaaataaaaaaaatgttcctaaacttggtgatatgaattcatcatttgaagatgtagatatattttattctttctggtataattttgattcctggagagaatttt

SEQ ID NO: 18067 - DNA, 320 bp, Homo Sapiens
gggtaccttttttttaatctttatccaaaggggatattgaaacaaacccctttcaaaaaacaccagtttaaaaaaccaagggaaatcaaggcttttgtttgctggggaattaaaaattttttatttagggattttggctcgggaaacaaaacttaaaattttaaagggaaaacctttaccttggaaatttttcttttttccggattctggcaggttccccagggccattaaatttttttccttctatttcttcttaaaaaactaggtttcaaaaaaggatcatctccctctcccccccttgattaaaaatcacccccttt

SEQ ID NO: 18068 - DNA, 391 bp, Homo Sapiens
ccccgggctgcaggaattcggcacgagggctgagcaaggtgtttgccaacacaaattgaaagacaaacccagcttacttttaaaattttctgtgctaactatggatgtgtatctgccaagtacatatttttcatattctatgcatcttaggagattttcttcccctttggcaaaaatgatttcaacaaacattttaataattgttctgctctcatgacttacttgttccttctttaaaagtcctatcaatacttgttcactgctctgggataacatgcaaatagcacttttattctgttcttttgtatgggtgtttgtatattgggtcatgtcttaagtgctgacttatgttcatatccttttgaacttgccaggcttttcttttcaagat

SEQ ID NO: 18069 - DNA, 964 bp, Homo Sapiens
gcacgaggcttattctttagttttcttattgtgttgcctaaagtattgcatcatttaagaaggtgtaaaagaagtctaaaggcacaatctttaggtttgtttgttacagctttcattgaacaaaaatgagaattcagaatttttcactttctactataatggcaaagagaataattgacagagaagacttttcacaattattagacaaatcagaagatcagtgcaaagagccaaatagaagcactgtaggccgtaatgatgtgggtgaaattaataatataagtgaaatctcaagactgagtctttggatgatgatactctagatcttctcaaacaccttaattttgatgagtgagcaatctgtttttaaggacaaaaaagaaacaggtattctcttccagttaatcattctgcagcaaggactctatcatgtagtagttttcagcaagaatctggaccatctcttttagctaaacgaatgcatgaccctatttcattcatcttttatgatgcttgtttatcagcattgacttcatactgcttttaagtggagaaatgctgaaggctggtatgaatataaaagtgattaaaaggaaatagattatgcagaagtagaaaaattcattggattcatcattgtaattggtgtttataaatctaaaattgaaaatgttttgcagtcatggaccaaagaagataactgttctcttttcacacaattgggagccatcagtggttttagaagtgttgcaatttgacagaacaaatgcaagaaagaagaactagattaataagctagcgcctgttagaaatattttttgaaatctgaaatcaatatttataagataaatatgttccaagtttcaccaaagcagtaaatgagcagttagttgcatccaaaagatgttacccatttcaggtatagatgccttcagtccaggaatagttttgggttatcattaaa

SEQ ID NO: 18070 - DNA, 782 bp, Homo Sapiens
gcacgaggcccatgcctgcgtgccctgcccactttccatcattttattaataaattgattataaaacattatactacaagtcaagtacttatgaatagccaatactagctaacttctctaattctcccagagacagcccttaacatcaaccaaataattctagagaatagtgcttctccccttataaggctgatttgagtgaagatattttcctcccccaaaaagctattatgtttaataagtatgaagtttaaaatattttaaaatatgaatgaaacccacttctaaactctctataaggatctattccagaatttatacaaattgttcattttttcttattgaacttgtattaagccaagggtcagcaactatgccttcaagcccaatccaacccccacctccatttttataaatgaagttttactggaagacagccactattcatttatgtattatctatggttatttgtaggccacaatagcagaggtgagtagctgtgacagaccacatggccttcaaagcctaaaagactatctggatcttcatagaaaaagcttgccaactactatttttaagcactttcataaaaacaaaacaaataaactatttaaatttgtttcaattacaaggatgtaaatatttttctatgttcttctcatcacaaagacccacacttgggcctatacatgagttgatcagaaattttatggactagcctgaatatctaaaccactacttacatttgtttcctttcattatttaaaaaaactgagttgac

SEQ ID NO: 18071 - DNA, 626 bp, Homo Sapiens
  misc_feature (220)..(300): n is a, c, g, or t
  misc_feature (484)..(564): n is a, c, g, or t
gcacgaggcttgtttactatgtcaattgttctccaaaaagtagaaatgtcattgttttggggccatagaacatttcagaagctttccagtatctatgcagtaacagtccaaacccctcaacataacacatttacacctgcaagtatggccccaaatcttcaagtggcttctgtcactactccatagtacataccctttgttacagctgtttcacaaatannnnnnnnnnnnnnnnnnnnnnnnnnnnnnnnnnnnnnnnnnnnnnnnnnnnnnnnnnnnnnnnnnnnnnnnnnnnnnnnncatgtataatgagatactcttagagttgggacccaagtctaaacaaaattcatttatgtttcatatataccttatacacataacctgaaggtaatttatttttcccttgggaacactgaatagactatatgttgtgcacctacattttgactgtgacctatcacatgaagtcaggtgtggaatnnnnnnnnnnnnnnnnnnnnnnnnnnnnnnnnnnnnnnnnnnnnnnnnnnnnnnnnnnnnnnnnnnnnnnnnnnnnnnnnnaatagcaaatgttcccatgttatacacctcaacctcccattcccattggctggaacatctct

SEQ ID NO: 18072 - DNA, 562 bp, Homo Sapiens
  misc_feature (202)..(270): n is a, c, g, or t
cccacgaggacttccccgaaaaatactcaagtattaaaaagtatcttttgcagaagagtaactacaacaaaaaggctgatgggtgttctggtatcttataggtcctgttgggaaatgtactaccaacttggtgatttgggctaagttacattacaaagggatgattttattagtaaaataacaaaatttgagctttggaagnnnnnnnnnnnnnnnnnnnnnnnnnnnnnnnnnnnnnnnnnnnnnnnnnnnnnnnnnnnnnnnnnnnnnaaaataaatgataggtgctgttatttttttaagcacccatttttgtaagccagagagcacaactgaaacccaaatgtacattttccaatgcccagccaagtgcctttctctcctgattacacaaatctatacttaccaagactcctatatctacagtatcattatttacagaaaggcttcgatggagcttattaggaagactctgacctgtgtgtgtttgttttgtttttgtttcatccttgtgaaaaaaggggtgctggaaacattctacggaacagaaaccatcaagatt

SEQ ID NO: 18073 - DNA, 863 bp, Homo Sapiens
  misc_feature (128)..(173): n is a, c, g, or t
gcacgaggactttgtatagctgtataaaaagcaactaattttttaaagaataaacattttaaagtcagcaaacatactgtgtccttgcagaagttgatgtgctgagcagcagccttatgggtgggtcnnnnnnnnnnnnnnnnnnnnnnnnnnnnnnnnnnnnnnnnnnnnnnaatgtttggaacataaatgaagatttgatacattatttcattatctaaaaaggattaattattcatgctcattgtaagaacttcattttgtagcaaatggcatatcacaggatctgtccagataatcgatattttcagtatacaaatgtaaataatcacagatgagaatgtacttagctgtattttcaaataagtaatcttccccccttttgtaggactttaaaactaggcatcaatgaacctgtttttcctattatgcctggaatttagtcatgataccttgactcattccatcatatttcaagaggattcagagtgctagaaattattttggtagcctgtaacacacggcaacactggtccttgggcctatgacccacagatgactcagtatagagttcattgctaattataaattactagtgaatctttttgatattttaagctctagtgggaaaaatctggccacttttgtgtttttatgaaggccatggaataaaaggatccaaagatttaaatatttttatctaatattttgattgttttctttaactttctccttaaaacattcagtagtgataaagatatagaaactgcactgtaggagaattgggaatatttaaaggctggttgacattttttatttcattttatatcttttgtatagctctacaaggcagtgttttgtaa

SEQ ID NO: 18074 - DNA, 551 bp, Homo Sapiens
  misc_feature (47)..(371): n is a, c, g, or t
gcacgaggcaggaatggcacacaaggtgcattttgaaaattgccacnnnnnnnnnnnnnnnnnnnnnnnnnnnnnnnnnnnnnnnnnnnnnnnnnnnnnnnnnnnnnnnnnnnnnnnnnnnnnnnnnnnnnnnnnnnnnnnnnnnnnnnnnnnnnnnnnnnnnnnnnnnnnnnnnnnnnnnnnnnnnnnnnnnnnnnnnnnnnnnnnnnnnnnnnnnnnnnnnnnnnnnnnnnnnnnnnnnnnnnnnnnnnnnnnnnnnnnnnnnnnnnnnnnnnnnnnnnnnnnnnnnnnnnnnnnnnnnnnnnnnnnnnnnnnnnnnnnnnnnnnnnnnnnnnnnnnnnnnnnnnnnnnnnnnnnnnnnnnnnnnnnnngatttatgatcaagtaactaattacctggacatcctctcctggcataagaaacagaacctatgaagccaccctagactgttgcccaatcctatccaccaaaaggaacctctatcttgagtcttgtatttactagtcctttgcactgtctctaaagatttttacaataaatatatataccc

SEQ ID NO: 18075 - DNA, 1054 bp, Homo Sapiens
gcacgaggcgatcaactgctgtgaaaatgaggtgtaatcctactaaatctggagcaggagtgatttcagtccccagcaagtgcccagcaggtacctgtgatgggtgtacgttctatttcctgtgggagagtgctgaagcttgccctctgtgtacggagcatgacttccatgagattgagggagcctgcaagagaggatttcaggaaaccttgtatgtgtggaatgaacctaaatggtgcattaaaggaatttctttgcctgagaaaaagttggcaacctgtgaaacggttgacttttggctgaaggtgggagccggtgtgggagcttttactgccgttttgctggtggctctgacctgctacttctggaaaaagaatcaaaaactggaatacaaatattccaagttagtaatgacgactaactcaaaagagtgtgaactcccggctgcagacagttgtgctatcatggaaggagaagataatgaagaggaagttgtatattccaataaacagtcactactaggaaaactcaaatctttggcaaccaaggaaaaagaagaccattttgaatctgttcaactgaaaacctcaagatccccaaatatatgaagagacagtgctgtagccttgagactaatgaacaaagaaaccttgctctagttttacaggaccatattttagggtctgtcctcatacctgtcacatttggtgatctcacagaggagggcccatgcccgctgaaaagggaagagattgaaacatttgattgcccttatcacatggtcaagtacccttggcaaataaaggaaagcaaatgatttgggtctcaactgaagatgaacctccactcacgaagagatttatctgtatatacacattactgaaaacctaatttaagcccaccatgcactgctgatgcatgccataaattaatgggtaacttttatccttatgatgtccacctatcaagtgtgatttggaggcccatgtgagcctatgcattatgatccattaggtttttccttggtttaatttgggggaaaattaaatttttt

SEQ ID NO: 18076 - DNA, 901 bp, Homo Sapiens
  misc_feature (289)..(605): n is a, c, g, or t
gcacgaggctctttggctcaaactgttctggtttgtggaagacacgcctgttttcttccctgggctaactgtgaagctcagaagaggaagaagggcccggatggcagatgaaccgcacagggctgtgtggcctcagccccgcagctggggagctcagtggcctcctggaggagaagctgactttggaggacctggaacaccatggctgctgggagttggggctgtgcgggaggcttctgtctctgtgtggtgtttggtcataaccactggactttggaacatcctgctnnnnnnnnnnnnnnnnnnnnnnnnnnnnnnnnnnnnnnnnnnnnnnnnnnnnnnnnnnnnnnnnnnnnnnnnnnnnnnnnnnnnnnnnnnnnnnnnnnnnnnnnnnnnnnnnnnnnnnnnnnnnnnnnnnnnnnnnnnnnnnnnnnnnnnnnnnnnnnnnnnnnnnnnnnnnnnnnnnnnnnnnnnnnnnnnnnnnnnnnnnnnnnnnnnnnnnnnnnnnnnnnnnnnnnnnnnnnnnnnnnnnnnnnnnnnnnnnnnnnnnnnnnnnnnnnnnnnnnnnnnnnnnnnnnnnnnnnnnnnnnnnnnnnnnnnnnnnnccccacaactttacctagactcatctgtgaaaacttcagtgaatccggcctcaaactgtcgctatgggggagccactggcagctgagtttgtttagattcctccttcctgggtgagacctggggttggaaacaccattgaaattccctctagtaatgggctctgtcgtccagaggaagggcaagactcccccaaccccacttctcaccccttgcccggggtctctctcccttcctgaccaggagcctaaggaaggctcaagtagaaatagagaagcatcttcctcctcctggggcc

SEQ ID NO: 18077 - DNA, 650 bp, Homo Sapiens
  misc_feature (365)..(405): n is a, c, g, or t
gaggggaaaagaggggagaaaaacaggagtgatgtcatttctttttcatgtattccaattaaagaaacaagggcaggtcgtataatggcatattaatacattagacttaagctagaacccctgtagctttttgatgtgttttatttcttatctctttgaattcctgtttggttacttggcttccaatggaggtgaacttaacaaccatacttgaatattccgtcttgactttgtaaactgtggctacttgaaatgaagtttatctggggttgatggatgaatggtagatttttgcaatgtctcaagggaataggatgtgtattaaagtgtagatattcttagtacagtaaatttatgctgataannnnnnnnnnnnnnnnnnnnnnnnnnnnnnnnnnnnnnnnnccttccactttattggtttgcctcctgagctacccctccttaccctccccttctccctcagtgtttcagtaaatttaatttagggtgcctagaaattggcaagtatgtatcctttttgatttgtattttattataatttacacaaacaactgggtttgtgaactgtattactcctgggtatctttaaaatattgtgggtgttttaataaattttatatttatttttttgcctcagaaaggggggg

SEQ ID NO: 18078 - DNA, 571 bp, Homo Sapiens
aaagcatttggtaaatatgtcttcctgatgaaaaatcaagaactaatctcttttaatgtggtgtcttcatatatctctaaagtatatctgtgcaactctttgtcacgtgtctctctatatccttcttttactgtattgctaccagtgtaagacaatattccagtcatgtctgggaacatctactgcctccattttctctgtgggagctcaagttttcccttcaaaataagaaaaactcccaagacctggaagtttgaaggaaaataagccaaacgcccctccctcacatttgaaaactgacaattatttttatttgtgcaggcttaagatggaaataagaacttctaaaagaatttgaaaaataccctacttaccaaaaaagcttaaatcatttcctctgaaagtttccttccatctaaggtttgcttcggttccacagaccagctcctccctgtcctcaatctgagggggaggaacgtgaccttcagtttccgctgatactgattttagggtcccacaagggtctctgtacttgccctccctcttagagacacagactggcacatcctgg

SEQ ID NO: 18079 - DNA, 480 bp, Homo Sapiens
tggcggcccgctctagacctcattggatccccccggctgccggaattccgcacgaggcacatgtccaggtccccgtcacatcctgacaggggctgcccacacgcagtgggcaggggcccccgagcaggcaggcaccccaacgtggctccctcccaactcacgacccctctccctaggtgcccagcaggcgtacaccaccacatgcctactaggaagccacggggaggaggacctagtgccgaacccacagccctggcctccgtggacatgcctcccccctaccccagcagggaacagatgacccctagagagcgccccactgtctaccccgaggtccaagcttgcaaaggccactctgaagttggctgtccatcggcctcttaactgggctctttttcgtccaacttctctactgcacttaaaatgatttgccaaaaacccctccaccaccatattagctggaacatttggggttgaagt

SEQ ID NO: 18080 - DNA, 641 bp, Homo Sapiens
  misc_feature (108)..(133): n is a, c, g, or t
taaaaaatcccccgggctgcaggaattcggcacgaggttcctttaatttttaaaatatggtacttaagtggaccacgtgatgagttttgacaaatgcgtatcattacnnnnnnnnnnnnnnnnnnnnnnnnnnaaaagcaacaagtcaaggaatatactcctcatgttttaaattgcatttgcaattggaactgcataaaaaggcattttaatttacataatctttttctgctgttttcacttcctgttaaaacggaataacctggggatttttattttctggtagaaaatgcacagtttcaagaaagtcaagagtaaaggttaagtttacagattttttttgacagagatgaaagggaactacgtaactctggaaaataaaagttcagagttgccttgcttacaactttttcatttgttaagttctaggagcaagtttgaatggggaatcaagaagcctgaattaaataaccagtgctgccagtaatgcactgtgtggctgctggcccatcactttacctttttgggctaaaactctttttgtgcttttggaataacttgtgtccactttctccttctttatgtcttttgtttataggtgtgcgttttatgcactgttaaccaatcagtcctgattcctc

SEQ ID NO: 18081 - DNA, 748 bp, Homo Sapiens
gcacgagggtaccttctcttgctagcaggtggacattctggtattttagactgactgaacgaaacccagaggctggttccagagctctgtccctgagaacacatccctgtggaaaatacttgagtttgtaattttttttcccccttctgggagtggaggtctcaggctcaatccggaaccatgtacgtacagttttgcttattatttgatgtgacatgaactcaaaatcctgcatttttagattccttttagttctaattgaggcctcactagatgctcttcagttctgtgtattttgaggctgggtggagaagtatatgattctgctgttgattctttcagtcttccccccttctccttttatcaatcattccagagttattttctattagtcaaacttttttgtagaaccttctttcccttaccctggcaaattgcttctttacttgctggtttccttacgtttggggcacatgttgtaagaaactgattggaaggggaaatgtgcagctctccactggaaaggaactctccacccctcccatcctgataaaacaaacaaggtttacatttacaactaaaaggattcagatgcaattttcaactattctgaaaccagcaggacacacctgactttaatagttttagctgaaattgtagatgttttgcttcatttttaacttatgataaaaagattatctgactgattttgtgttgattccccttttagtggtttattttgtctttt

SEQ ID NO: 18082 - DNA, 897 bp, Homo Sapiens
  misc_feature (195)..(209): n is a, c, g, or t
  misc_feature (663)..(695): n is a, c, g, or t
gcacgaggctgatctcaaactcctgagctcaagcaatactcccacctcagactcccaaagtggaggctggtattacaggctgagccactgcacccggcagagaatccatgtgttgtttggaaaatatcacttctttgttcttgattttggtttttgatattcagtttagaacttaccctagctttcagtatattnnnnnnnnnnnnnnnacacatgtgctttatagaaagacacacacagagggagacagagattatgcagactaatgactgacttcacatattagttttaacttagaatgctgaatcatactttaaactataagaaatgctacaaacccacacaaattgtgtttgtaaaacgttaatatacaaaacataagaaatgacactatacacacgctagctgacttacacaaaataatcttagaaacaattaaagtagattaatatagctataatagccatatattatatataatgtaaatagtgaccctattttattcttaaaaagatcaggtttctagtcaccatgtatgaaagtccttccaaattacctcaaaatataacaaatctttctctaaccctaagacacaagcagaattctatgcttctctggcaacaacaataactattagaaaatcttaacctcacccagaagttnnnnnnnnnnnnnnnnnnnnnnnnnnnnnnnnncagcttacttaaataattgtgctaaatagcttatcttcacaatttaaaagtaaaaacctttgaaaaagaaggacttcaccaaaaacaaacacactctccctatagccctgaagatctggccagaaaagctccattaagaaattattactcacaatttttgggggtatcaaataataacattctactttaaatattttaatcc

SEQ ID NO: 18083 - DNA, 856 bp, Homo Sapiens
  misc_feature (547)..(695): n is a, c, g, or t
gcacgaggactgaatctattccagtgtctctgtgtccagtgatacttacttactgctgttgccaagttaaacaaaactgggtttgcagagctgtttattcaccttcagcatcttttcattgaaaaggggggagatagaagaaatgtccctcttttagcatttgtacctcagtaataagatgcttcccaagctcaaagactccacacccttaaatatgtaagtcagtgttaagatatttaaagagaacatgaatatcagctacattgtgcatgttgcaggatttttatattattttgtatcttctgcttagaagtcataagccagcccatgaaccatgccaacaaacataccttcttccatgtgattattgcagccagatttttcagtgcaggacaagcaaagttttctctgaaagcatgagataataattctcagccaggtcttcgccatttgcaagggatcagacataagagtttttagctctgttgatgttaatagctagagcccctgttagcagatggcatgttagtggcctgttgctgctggnnnnnnnnnnnnnnnnnnnnnnnnnnnnnnnnnnnnnnnnnnnnnnnnnnnnnnnnnnnnnnnnnnnnnnnnnnnnnnnnnnnnnnnnnnnnnnnnnnnnnnnnnnnnnnnnnnnnnnnnnnnnnnnnnnnnnnnnnnnnnnnnnnnnngaaaagaaagcaacttcatagtgtgccaagctttttgttcagaaggagcaactcagtgttgagcaagaatttatgaagatagtggaggtggagtttttagtctacaccatgaattgagaacagagatttccaattattttttcacgggatcaggtttcttt

SEQ ID NO: 18084 - DNA, 373 bp, Homo Sapiens
  misc_feature (45)..(55): n is a, c, g, or t
  misc_feature (114)..(123): n is a, c, g, or t
  misc_feature (196)..(205): n is a, c, g, or t
  misc_feature (228)..(236): n is a, c, g, or t
cctccccatttttaaaaaaatttccagtattttaaaaaccttttnnnnnnnnnnnccccctctacttcctttcaaaaagcccagtagtgcccggcaatcaaaaaggactcttcnnnnnnnnnntcactccaaacgggccccctctaaatacaaatggaatttctgggggcgggtttttcttgttttgaaagctttnnnnnnnnnnggttatcatttgatgaagttcannnnnnnnncccggaacccatttcccccaaaggggggctaaaataacccgccccacgggccgcctttttaaaacgtctttacggggaaaacccggggttttccaaacttaatccccttgggcaaatccccctttccccactggggt

SEQ ID NO: 18085 - DNA, 930 bp, Homo Sapiens
gcacgaggagataatggtcttcagttccatccatgttgctgcaagacatgatttcattccttttttcatggctgaatagtattcaatggtatatatttaccacattttctttatccagtcatccattgatggacacttaggttgattccatacatatctttgctattgtgaatagtgctgtgataaacatacgagtgccagtatcttttcaatataatttctttctttctttgggtatatgcccagtagtggggttgctggatcaaatggtagttctatttttagttctttgagaaatctctatactgttttccgtaaaggttgtactaatttacattcccaccaacggtgtaagtgctccctttactctgtagcctccccaacatctgtttcttgactttttaataatggccattctgattggtgtaagatgatatctcattgtggttttaatttgcatttctctgattagtgatgttgaactttttttcatgtttatcatccacttgtatgttttcttttgaaaaatctctgttttttgctcactttttatcttcttacttagacgccagaggtatttcttttacaaccaaatgccctcttaaaacttttaatcaagcttgttgttccaatcttcctttctttcctaatttcccctgaaagttttgtttgcaatctcccactatgatgatagatttaacattgtagaaattggttctttaagatttaagtaacccttatccctaagggttttttcttaagtctgtttttaaaaatataactgtatccatgttcttttggaaaaaatatggccagtgtatattccttctccctttcactttcaaatttttatgtccttatgtttagagtatggttcttttaacacataatgctggaatttttccatttaataaaatggtttcaatttcc

SEQ ID NO: 18086 - DNA, 883 bp, Homo Sapiens
aaaaaactgaggtctttatttcaatttctataaacagaaaaagtgcgcgtgaaaatctggcccgcacaaacaaaaaataattttaaatctctctcaacaattaacaccttaaaatctatcaactacggtgttaacgttccaccaagtgagtttttatctctacaccctttgataaaacacacagtctataagtcaatccctactgaagatatcacctacatacacgacatacagacagcaatgttaactcttagagccacattcaaaatcccaggtttcatttgtttgggtttaaaaccataattttgcctgtgtcaaattacaaaatgtttggtttggttttaatgcatattttccaagactgagagcagctctcatgggaacctctcaaaactcacattttcatctgactgtacctcgaggacatgaaatcaaaaacaaacctaatcattaaatggcccttacccatctcccttatattgagatctatacgcgcgctcactggctgtcgtttacacgtgctagactgggaaaacgtggcgtacccacttaatcggcgctgcacgacacatctccttcgccaagctgacgtaaagacgaggaggccggcaccgattccctttcacacatttgccacctaagaggcagattgaacgcgcccgtgaacgggcaattagcgcgcggggttgtgtataccgcagagttgacgttaaatttgacagccccttaacgcccgtcttttgcttttatcattctttaccggcaagttgcggggttaagcggaaggttatattgcggggctccctttgggttcacaattatgctgtagcgactcccccccaaaaaactagtatagggaagtgggtccatgatgcgccccccc

SEQ ID NO: 18087 - DNA, 832 bp, Homo Sapiens
  misc_feature (262)..(283): n is a, c, g, or t
  misc_feature (299)..(453): n is a, c, g, or t
  misc_feature (505)..(541): n is a, c, g, or t
gcacgagggtacatgctaaagtacccccagcggtgccataacgccccacatgccgctggatctcctaggtgtttttcgttgcatgtatatctctaggagctaataagatttcagcttgtcaagtcttacgtttccttatcagactctggtttcccttttgctctgaaaccatggttaaaaaaaatgtgaatcaggtcatttattcccaaaaagggtcactcgggagataggtactacgcatgttaagttgcaagcaaattcnnnnnnnnnnnnnnnnnnnnnncttgagacggagtcannnnnnnnnnnnnnnnnnnnnnnnnnnnnnnnnnnnnnnnnnnnnnnnnnnnnnnnnnnnnnnnnnnnnnnnnnnnnnnnnnnnnnnnnnnnnnnnnnnnnnnnnnnnnnnnnnnnnnnnnnnnnnnnnnnnnnnnnnnnnnnnnnnnnnnnnnnagtttcaccatgttagccaggatggtctcgatctcctgacctcgtgatcccnnnnnnnnnnnnnnnnnnnnnnnnnnnnnnnnnnnnntgagccaccgctcccggcccgcaagcaaattctttcagtaaattcttgcattaaacctatggtttgatggacatttgggtttagcggacttcattgacacagtaggtactgtgtgttgggatataaaagactaataaagaggttcctggtcatggagcttgcactggctattttccattgtacaggttacttaatctctgtcaagtgaagctaatagcatctaactccagggttgtgacctctaaagagttttggaagattgaaaacattgtacctatgtcttatttaaca

SEQ ID NO: 18088 - DNA, 918 bp, Homo Sapiens
  misc_feature (525)..(534): n is a, c, g, or t
  misc_feature (606)..(622): n is a, c, g, or t
gcacgaggcttaggtcagaagtacagtatatgactttgccctatgttggtgatattaattaaggttgctcatgtagttatggtttttctctattgtaaaggtatttttctccccctctaatctgtggggtgatatttaggccctgtgtgaatgtcctattctccaacagtgttttacccaatcgttttaaacatatgttgatgattcttttctgaatcaatttttactctgctcattctattcagtgtagtttttatttctctgaagagtgaaacttaaccttcagtgtgtttgagttgtctttttaatgtgtctgtttgtgaccattgttcacttttgttgagtcttaaaaagttgttttgggatctttttttaatgttaagaaatcagccctttgtgatatgtgttgcaagtatttctccccagtttgttgtactattctggttgtttctaccagatagaaatataaatacctatttgtttatccattttcttacttattttttgtagtatgatttaaagaannnnnnnnnnaatagtttctaggtttgtgttatagttaggccaaactgagattaatttaagaaaaaaagattccttcatgannnnnnnnnnnnnnnnnaaaactggcatattttaatatttaatcttgactgtaaaaatctggattttggagattgggagcagatcactagagcagatcaccagagaatacaaatgtcatttttaaaaaattgttcttttgtccagtggaatagaaactttttaagagtttgttactatttgtatttgaagtttatgatttgatgataaataaaatatcttcttgacctttggcattgggcgtttattctaaaataagaaatttggcaggaagtatctcctatctgtgaagtctgttgttttattccaacattt

SEQ ID NO: 18089 - DNA, 637 bp, Homo Sapiens
tgaaattaaaaatacacaatttacaatagactaaaagaaacataaaatatttacaaatcaaacttaagataagcaagaccacaatggacaaaaatataaaatcctattggtaaaccttaaagaagacccaaatggaaagagaggtaaaccatgttcatgaatcaaaaaactcaatattgtaaagacgtcaattttcccaaaactgattgatagctataataaattcccaaactatcaagtgcatcattgttgttggaattgacaagctgattttaaaacttatatgggagaaaaaccttacatgaaaatacaaagagccagaatagtcaagacactctcaaagaagaaaaataaggtggaaaagacttactttatcagatctcaatacataattgataataatgaagacagcttgatattggcacaagaacagacagactaatggaacagaggaaagaatcccacaacagatctacatatgtcatatgtggacatatgacagaggtggcattgcagatgggcgcagaaagttagattacaaacaatgataggacaggtgtgtaaccctatggagagaaaaaatgaaagtgaatctttacctcacaccatatgcaaaaaccaaatctaggtgaataaa

SEQ ID NO: 18090 - DNA, 420 bp, Homo Sapiens
  misc_feature (76)..(120): n is a, c, g, or t
  misc_feature (122)..(146): n is a, c, g, or t
gcacgaggcccaggtcggaaacggagcaggtcaaaactcccgtgctgatcagtagtgggatcgcgcctgtgaatannnnnnnnnnnnnnnnnnnnnnnnnnnnnnnnnnnnnnnnnnnnntnnnnnnnnnnnnnnnnnnnnnnnnnctgctaacacttacagagctattcttatgtgccacccactgttcaagcccttttcatatatcaattcatttaaccctaacagcaaacatatgaggtgggctcttaccatcaccattatacagacgaaaaaaacgaaggcactgataagttgtgtaagttgtccgaagccacacagctagtaagggatggagctcagcttcaaatccaagaggtctacttccaaagtcatactcttaacctgccaggcaacaattacacatggtcctggtttttc

SEQ ID NO: 18091 - DNA, 522 bp, Homo Sapiens
  misc_feature (258)..(266): n is a, c, g, or t
  misc_feature (414)..(422): n is a, c, g, or t
tgattttttgattttgtgattcacctgccttagccttccggaagtggtgggattacggggtgagcaccggcccctgggccgagttaattttttgtatatgatgaaagatagggattctatttttatttctttctataaaaggatagccattgttccagacaccatttattgaatagggaatccttggccctgttggcttgtttttgtcaccttagttgaagatgagatagttgtaggtatgtggctttatttctgggnnnnnnnnnctgttccttggtttatctgtctgttgttctctatcttacatgctgttttggctactgtagccttgtagtgtactgtgaagtcaggttgtttttgcttaggattgctttggccattcggcttttttggttcctgtgaattttagaatannnnnnnnnaattgtgtgaagaatgatgttggtagtttgataggaatatagttgaatctgtaggttgctttgagcaggtggccttttaacatactgattattccaattc

SEQ ID NO: 18092 - DNA, 556 bp, Homo Sapiens
  misc_feature (223)..(238): n is a, c, g, or t
  misc_feature (248)..(304): n is a, c, g, or t
gcacgaggattttgtagctaaacaattggtgttcctacactgtaagatcatcatcttggtaagtgacattttcataagtatgggttattcttttattccataatatcttatgacccagattagggctttgggttttagttcatccttagatatttatgttttatgttctcctatgatggttaatttatcttaagcatattttagtcccaaaaaaatggttaannnnnnnnnnnnnnnnaaatgactgnnnnnnnnnnnnnnnnnnnnnnnnnnnnnnnnnnnnnnnnnnnnnnnnnnnnnnnnngggaatttagattaaaaaattttggagggaattaaatttttagttaagtgagaggacattagaaaatggaagtatctatttaccttcatgggggaaataattttttgatacttgagaaaataccacagctgactaaaagaataaataaaactgttacatctcaagaggtaatatgatattaaaaattgattatgtgtactgcacccattaaaattcacattaataaataattactagtttttaacatcgcag

SEQ ID NO: 18093 - DNA, 839 bp, Homo Sapiens
  misc_feature (116)..(415): n is a, c, g, or t
cgcacgagggtcaaagccatttaactctgtataaccactgcagaatctttatcttcttttttacctgacttccaattggcgggtgttactaaaactttatcaccaaagttatttcnnnnnnnnnnnnnnnnnnnnnnnnnnnnnnnnnnnnnnnnnnnnnnnnnnnnnnnnnnnnnnnnnnnnnnnnnnnnnnnnnnnnnnnnnnnnnnnnnnnnnnnnnnnnnnnnnnnnnnnnnnnnnnnnnnnnnnnnnnnnnnnnnnnnnnnnnnnnnnnnnnnnnnnnnnnnnnnnnnnnnnnnnnnnnnnnnnnnnnnnnnnnnnnnnnnnnnnnnnnnnnnnnnnnnnnnnnnnnnnnnnnnnnnnnnnnnnnnnnnnnnnnnnnnnnnnnnnnnnnnnnnnnnnnnnnnnnnnnnnngttatttcactagcaacatataattaccataaaacaaaggagggttttaaatgaactacacatgcaaaatacactagaaaagctagatatttttaaaaacgtggtgaattatttggtaaagccaaaatattttaattcataagttactattcccccaatgcatctattttgtaaatgctgtttcacatatgaggtttgtaaaaaagcaaaatatatgtataaaatgggcgtacataaagatgttccaccaatatagccagaagttatggttttactgtatgccaagagtgatgggcattttttaattccaatgtttttaaatatttcgaactgaaactaaatcctacccatgtaaaatttgccaccaaagacggctggaaaagagaaaagttattaaaaggctgccttattataaaataccatt

SEQ ID NO: 18094 - DNA, 696 bp, Homo Sapiens
tgcctatttgacctatgtccagagaaggcagagtgtcagtcacactgggtttctatccagccccagtcctgtccagtgggtaactctcagccccactcctcatcccccaaaggccccagtgacctctatgctgcagaggtgcactgggtgggccctagagctgggctgcagagcaagcaactggctgcatgcctgggcctccctgcgcagttcctcacatgcatgctgtggtcccagcctgacctctccatctggagggggccgcctcgctgggctgttccaaagctggagtcctggtggcagctgctttgccaagtcgcgcagtagccagggcttgcctgcagcccagaacactcagacagggtcaggccttccagggttcacagcacgtcccatgcccctatgtcctggcatctggggaaaagctgtcactggccagacgtggagtggcttcctgccctaagctggcaggctgtcctgcctcacatgccaaagccaagactggcaaaccccagctgtcagggcagggaagtgggcaagggggcagcaagctgctggtgtctatgccttgactccgagataaatagatgacctaacagtggccaacttttgcctctcacctttctgacggtgaaatggaatcgagctccatacctgaccagggtacagtaaaaggtcttcttttaaacaaaaaag

SEQ ID NO: 18095 - DNA, 368 bp, Homo Sapiens
  misc_feature (90)..(107): n is a, c, g, or t
  misc_feature (144)..(158): n is a, c, g, or t
acatcaaaacccatactttattttatgtaaagcaatacaatttacatattaaataacactataataaaatgatttgatatagtttaaacnnnnnnnnnnnnnnnnnntttcaggttacaaaacccctccccctgaacaaatttnnnnnnnnnnnnnnngcacactttttccaaatgggtcaatgtgacaaatgttttcagtgactaattatgtctaattcctattgcacaaatggtcaatggaattaaaaagaaaacccaactttcacaatcactgcctcaaaaaaataacacatgttggattcttttggaatgtaaagatggtttttgctacttcaaagttgaattcccatatcccccacaaaaagg

SEQ ID NO: 18096 - DNA, 765 bp, Homo Sapiens
  misc_feature (314)..(582): n is a, c, g, or t
gcacgagggttttgaagatggttataatttcacaaaaggttttcttagtaaaaacataaatttaaaagcccctgagttctaggagagggcttattgaattgctataagaaagctggagttactttgataagtaataaattataaatagcactgatctataatgctttatttctatcggaaggtactttttcttctttcatcatcagttttagccagttagtaaatgggaatactcagttttagggatttgatttttgtttggtttaattttctttcaaaaattaaaagtatatttctaaaagttttccccagannnnnnnnnnnnnnnnnnnnnnnnnnnnnnnnnnnnnnnnnnnnnnnnnnnnnnnnnnnnnnnnnnnnnnnnnnnnnnnnnnnnnnnnnnnnnnnnnnnnnnnnnnnnnnnnnnnnnnnnnnnnnnnnnnnnnnnnnnnnnnnnnnnnnnnnnnnnnnnnnnnnnnnnnnnnnnnnnnnnnnnnnnnnnnnnnnnnnnnnnnnnnnnnnnnnnnnnnnnnnnnnnnnnnnnnnnnnnnnnnnnnnnnnnnnnnnnnnnnnnnnnnnnnnaattccccagaagaagaattctaattttatcaagctgaattaaagtttgagagtctttttttaaaatcttactgtgtcaaaagaggcattatgttgcttgtgtgatatagtgaatagtgtccctccaaatttcatgtatacctggaatgtcacaatgtgacttaacagtagccacccctcacc

SEQ ID NO: 18097 - DNA, 318 bp, Homo Sapiens
ttactaataaactatgggaacttttttgtaaagtcaagtgggggctaaaccccgggggggccggttaagctttttttgtttggtaaaaaacgggagggtctggatttttttcaaaaccccctaacttaggtcttggaaaagaaaaaatccccctccttttttccccgggcaaaattttgtttggggaatttttaaaaaaattccagctggccgggccgaagggggatgtatgacggaatttggggaagggtttttaaagccccctcgggaccccttttggggacctgaatcggggaggcgggccccaaaaggggcctc

SEQ ID NO: 18098 - DNA, 763 bp, Homo Sapiens
gcagataataccaactccgtggtactttaaaaggaagtataacaatctagtagttgttcaaaaagtattgcgaataagacttcattttcttgtctatataaactgttgagtagagttggcatgatgtaaatagtaacgatagtttttctaactttgagagcaaaacgtgagaaattgaccttgaaacgagtcctaaagacatcagcaacttgaaagatgttttttaagtacttgggaaattttgaagacttgtgaggtgattgtcctgatcttatagcagtagtttttccagcagttctagcaaaaagttttgggtattgaaaatgtaaagatatattccttttctcatttataaatagacaagagggaaacctgatttccctgtatcctattatattttaggcttctcatgcaagcacagatgccatggttattttaggtgtcatttttaaaaattatatagctcatttataaacctttattttttaaaccttttttatattactgctgtccttatcagatcattctagcaatgccaaaattatgatagtggcttctgaaaatatttgaaaaatctaaaaagatgatactacctatttttttgatactattttaaattaatgattaacatattggagactttagatatgtctacgtggtaaaagtaatccaatgaatgtgtttcagaaatacttggctgtggagttacaatcccatcatcttttggttgtcataacgatataggagacctacagagttgaaa

SEQ ID NO: 18099 - DNA, 551 bp, Homo Sapiens
  misc_feature (161)..(174): n is a, c, g, or t
aaacaaatcaatttaatttatattcttatatttaagaagcagatattcatagatgatcgggtttttctgttaatatcgcagattttttggaatgttattttcccagtggaatattcacctgatatcaggttgtcagataaataatatttagggaaaaaaannnnnnnnnnnnnnttgcattttgactgaagtggattaaaccagggtaatcaatgtagtaagatacatttaaatcaatttttcaaataaaattttagaagccattcttctttaaattaaactcacaatcagattttttcttaatttttttgttaaagaatatccattcttaccgcctaaacacctgctagcaaacaaaacaaattctgaatagaattagttccaataagttttatattttttaaaccatttatatggaagaatgggagcttttctatttaaaatatttccttcatgattttaaacttccaaatttaaaagctaactttgtgggtgctctgggggatcaccaagcaagtgaaacagtttttccagagtatttaactaaaatt

SEQ ID NO: 18100 - DNA, 915 bp, Homo Sapiens
gcacgaggcttaaacccggattgtaaaatcagaagcctggtatgattacaggtacatgaaaagagttggttatttatatcatttgttaatgctgggagtgaattttgagaatgaagatttagtgtcatgttagagttccagcacagtaaatttattgttgctggtcagtgagtgaatgtgccattttgctaagacatggaaacttaaggtaactgctggaaatccagatattgaaactcttctagcatatccacccttgaaagcaggttagtatgaagagccaactgtaatgacatggagtttagccagagtagtacacatgaaccttttgaggattaaaaaacttgctacactgctacaaaaagcttttattctaacacatataacacattctagtgttaatagtattatatttatgtagtatggttttatattagtctgaaaatttctacaagtgacaggtttgtacttgtaggtttggtgaatttttatgtttatttttttaaaatatgacgatacaagttaattcccggtcttaaaaaaatttgagggttagttttaaacttttgcattgcccctaacaaatcttgtgctggaactcaaatgatattttgattaagtgattgaatactgtgatacaaacactaagttaatatgttttacatcaagaacagtcaacatagagttactggaaatttctaaaaagttacattcaattcgttttaaaatttttgtcctgtctgagccacaaacatttgtgttaggcgagagtttgttgcttcctgttggcatattgggcaggctaacagtgccaagcttaaaagaatagatatccttttctttttgatttagatagccactaccacagatctgtgtattggtttggaagttttgttaatagcaaatctaaaaatc

SEQ ID NO: 18101 - DNA, 913 bp, Homo Sapiens
  misc_feature (463)..(471): n is a, c, g, or t
  misc_feature (701)..(717): n is a, c, g, or t
gcacgaggctcatatttacaagttagtggattcttttcccatctaaatacaaatactgtattttaaaaatcagaagattgaagcttccaaagcagaactagagagtagaaaaaaggcaatgagttttgatcctttaaattttcatttttaacctatttttctatgaagagtaaaagtctgttggcattaaccaaatcttttgaaaatgaaacatttatgacattgctgtgtttgtgtaccaggaatataaagtggcttaaaatttacctttttctatgcattttgagatatgagaaacactataaaaaacaggattttctatctttcataattaaaccaaagcatctcctcagtaagaaagatagcactatataaatcattttatctattgtgcacaaaccttcacagaacactataccttatttgacataaaccagagtcaaagcatagaaatcaatctagnnnnnnnnngattacatttttcctagtaattcactttgtaaaataaaatgtaatttttcctacataaccacaaaaaacaagtaggaagaaaaatgtggaaggggatctttattctcatgaatataaacaacaatatagattgaagtctcagctgaagcgtgatcatgactggtactgatgaatgactccgaaaaataagatagctcataccaagtggtttgttgtcttggctgtaatcnnnnnnnnnnnnnnnnngttaactgccatatacagagttttaaatgcacacttttccatttttttgagttctttttatcctgaatcatcaaatgaagaaactcttgcatgttagccaactttttataacttgttatatcagaaattaccatgctatggacttccaaatacaaattactctattgaaatatttaaacactactttgaacttttt

SEQ ID NO: 18102 - DNA, 742 bp, Homo Sapiens
gcacgagggaaatttggtatggcagggcctaacctaaaaggttatttataaaatcaatagcactgaatgataatttttttaatgacagtcatgtattttattaatgatatctgaaagctgcttaaccattaggaattacaattctttatggttggagtatgatgatttcatcaaatgtttgaatatttacataatttttatgtaaccataattaaaccaaattagtctttttttcttcatacttttcttcggtaaatagtgaagaaataatgggcatatctaattaaccagttctagtgggtgttgtgatatctttatatctagttcagtctcagatgtatgaatatgattatatagtcatgattgaagttcaaaatgaggaagcatacaaaatcctcagccactgaaaaattcagttaacttgtttatactcctgtaagctctagttagtcacaagacaaagtatatagtaacactttgtaatgaagtaacattttctgcccacattaattttactaaagacctaaattgttaaaattaattgccaatctctggatatattatgcttagtaagtgttttgaaattaaagaccttaaacatttcagcaagtaaattttggattctagctctgttttaaattgaatcctaattttcaaaccactgctaccccagattcatacctgttttttgaatcttgtttatggaatggaaatttgacagtatggtaaatagtttattgac

SEQ ID NO: 18103 - DNA, 695 bp, Homo Sapiens
cgcaccaggcaaaaaagaaccagacgttgccacaaatcctgggcttgagctgaatgcagggactggggggtttctctattgtgtcccttggagagggagtgaagacttcttatgcagtgcctcgggggatattctaaccttcctggctgctaggcttggcatgtgttgtgttccagacagtaaaatttaagcagaagttctgactttcttactgctgggctaaggtagttacgtactagtgtactagtgtgtctcccacaatgaacttcccaccttcttccacaaagccgagggataaaattcaggggaaattaaaatccaaaagaaggagccacaaagtggaagaaacctggatgcctgagtcactatggggggaaaacaccaactaaaaaggtttatgtgatccacatttgatatgagtgagaaataaatttttgattgttttagggcattgatattttgagattgcaacaacagctagtataagttagcccaatggtttacgaaaacgtctatttgtttatctaatctatgaagatcactgactcattactctgttttgttttcttaatgaacaccatataccatgtgggtaagagataaggggaagggggtgcgagggggggatttggagcccaaagacaagaagttctctctttgcctattcctgcgtatttactaaaattaacatttcc

SEQ ID NO: 18104 - DNA, 822 bp, Homo Sapiens
gcacgagggtttttgtaagaataccattgggaaaatgagaagttttactgggctagttcttccatgatttgaggatgatattcagattataagataccctttgtctttcttacagtaatgaagtataagctccatatctgttccagagactttaacttgactttgcttcattcacaaagaacagagttcaagaagcagtgcatcctgtgagaagtgtgaagtgtttgtacatcactttaaatatattacttaatatattctaagttgctgtgtggagcagtatactgttgttttaaaaatgcaagattcagacaaattttaatattgtctcattaaaataatttaaataatggtataaaatatctatatcattaaaataattttccatagtgtttagaaaccatgaaaaagaaaacatagcaggagaaaatatgacaggaaaagaaaacctaacaaagcccagaacccacagttaaccaaactagactgactttgttattacccattctttgttagtattggatagggaattaggataatgagccattaggcagttctgaaatggaaagccctgaaatttagtgcaatgtaactttaaaactgaaattatataaagagtagaagtttaatcatgtttaattacaaccaaaagcctgttgcctttttgtacagaaatctccttaatttcaggacatgtagatagcttatagaaacatcccttttaaatagtttgtgagctcttcctcttcagtgggattgaggaatacagaatgctttatttcatcatcccctgacacgtgacttaggctttgcacagcagat

SEQ ID NO: 18105 - DNA, 295 bp, Homo Sapiens
gggccggggggccccttcaccctattctgcctataatgagtcgtactccccgcccttcctgttcgtcgtttttgactgggaaaactgtgaaattaccgaacttacccaccttgcaccacttgccccttttcccccttggcctaatagggaaaaggcccaaaacgatcgcccttatcaccctttgcaaaacttgaacggcgaaagggacgaatggtacacgccctcaatcagcgcgttaggcgcggtgggtacggggattatgagcaccacgattgctagcgttctaagcccccca

SEQ ID NO: 18106 - DNA, 655 bp, Homo Sapiens
ccggcacgaggctttagggatgtatataggctgcgtttgctaccttaatctactgtattatctctaaaacaggttagccaatgtatttttcttaaattcattgttcatttttaagctaacctatacaaatggatattaaacaccagaaattaaagccattaaaattgaattgtactttaaaaccataaaaaatgctaattaagtttagaacaggagttgaaatgactctcagttttatctatagctccaattaggacaaaattactttacaaaaagcattaaaaataaaagtaactgtatggtacttcaggaatttgaccagttccttacaacttattcttggcaatattttgtcagtaatatactttcatacagatgctagagaaccatggtgtctgctatttacatgttatttgttcccagtgagctttatcaacatcaaccctgtttatataatatgttattttgctcttcttgatctgtgccttttgttttagctttatacaaaatgctaggtttgttatattctttatgtatcataatatataattcaacttttcctgatgaatgtatgctgaataattaaactaaaccatgtgcttagaaaagacaaagacaggttgtatatgcagttatgtgtaaatatttgacaaag

SEQ ID NO: 18107 - DNA, 436 bp, Homo Sapiens
  misc_feature (103)..(239): n is a, c, g, or t
  misc_feature (271)..(340): n is a, c, g, or t
catcatcaaaaagaatcaaagtaaaacaaagaatggaatataacagactcattgaagggaatcaaatggaataatcattgaaaggactcaaatatagttatcnnnnnnnnnnnnnnnnnnnnnnnnnnnnnnnnnnnnnnnnnnnnnnnnnnnnnnnnnnnnnnnnnnnnnnnnnnnnnnnnnnnnnnnnnnnnnnnnnnnnnnnnnnnnnnnnnnnnnnnnnnnnnnnnnnnnnnnnncaacttccagtggaatccaaaggaaacattcnnnnnnnnnnnnnnnnnnnnnnnnnnnnnnnnnnnnnnnnnnnnnnnnnnnnnnnnnnnnnnnnnnnnnncatcatggaatataatccaatggaaacatccatggaatggaatggaatcatcatggaaaggaatcgacgggaatcatcaaatggatcaacggaatc

SEQ ID NO: 18108 - DNA, 774 bp, Homo Sapiens
  misc_feature (141)..(149): n is a, c, g, or t
gcacgaggaagtaacactcagtttacttaataaatggccacaaattacaagagtagtgatgctggcaattcagatatgccaaagagaagccataaaatgctgcctttaagtgaaaaggtgaaagttctcaatttaataagnnnnnnnnngttacatcccaaggttgctaagatctatgataagaatgtagacattgtgaaatttctgtgaaattatgaaggaaaaatttgtgctagttttgctgtcacacctccaaacacaaaacgtatggcacagagtgcatgataagtgtgtagtgaaaatggaaaaggcattaaacttgtggattgaagacatgaagagaaacatgttccaatggacagcaatcaggttcagtactacctacggtttcagtcacccactgagggtcttggaatgtataccctttgtatgaaaggagactactgtattctgcataccaaagatttaaggaaaggaatgaggaacatgaagagaaatataaagttaaaggggaggaagaactggtgaaatgaagtgagtgcctttgagaattgaatgaatttaatatatgtgaaaatgatctgtacattgtaaaacaccattcaagtgtcagaatcattattttccaccacttatcatggtgcttgacaagtcttcccaataaatactgaatgaacaaatgaatggcagaaacattaaaatgaacactatgggggaaaggggaagagaggcagaatcagaaattatcctgaataaatatttattccatttgtc

SEQ ID NO: 18109 - DNA, 843 bp, Homo Sapiens
cgcacgagggtttttctttcttattttgaggtggattggtcttctctttttttgggtttccagctcactgggactctcagaccttacctttccagctcaaacaccattagttaaattccttcattctcattagaatgcagcctgctgagtatgtgggtttcactgccggagtccatcatttagccagtatacatagaggaactgcttcgaatcaaggcaactggtgaagggcttagcatgttggcagcaatatcccagagattgaatctgtttgcattttcctcatctaggataacagctgcttgaagccagggctcttagccctttgcattccccttgagcgaggaagccacactgcctttctgtgtctggttcagagctcttccttcttggcatgttttctggactacatgcacatgggcagctatagattaatctgcaaaacctagtcacttacctacccataatatctgggaaggtgtggtatttgttttaaagaaacattgtttctttgggagggcagtttctgtctggactttgaggtggacttagttatccctacagttctttaactctcagcttttaataaaagatgaaatcagatattgatgcagttggggtcacaattccttagaatgcttctaccccaggggccgcttcctgttcctagtcatggttttccagtttagtagtggagtttcttgaggctaacttacagaaatttctaactgaaaactttaagagttattgatacttgttttttcattagtcacttactcacctagcctactctctggaattaaatttatttctctaggctggtctggaagttgataacctttt

SEQ ID NO: 18110 - DNA, 847 bp, Homo Sapiens
  misc_feature (543)..(563): n is a, c, g, or t
gcacgagggtttactgttgctcaggctgagcactgcagcagcccattttcctgaccaagggcatgctgtgtacagtggtgtggccccaaatttgatcacacactccatcaattaagaaaaatgttttctgcatgcatccccagcatatgagtattcattttaaaagtatacatgtgcactgcattaccactatataagttatgaaacatatacaaaatgaatggtaagatatttgataaagatgaaatcagcagtattttaaatgtcttgctatttctagtgacttggtactatcattagctcatctcaaggtccagatacccttgagatgggatttctcgttaatgattcaggatgtaaatctaaatttctaatgggcttccaggcaatttcaggttttgttggggagagctgcttcttgtcacatgtgactaggttgttggtatttgtaacatggagaccaatgacgacaggcaggagcgcttccctttgcttatgttcacttgtgcttgtattgagattaacttcggcctccagaggttnnnnnnnnnnnnnnnnnnnnnaagctacttgtccattttgtaaaagttagcttaaattcactctaaattcatcatctgagcacagtttgaggcacttgggatatattgaggatgatactagagaattgaactcattaccccgttaaccagatgggagtcatgggtatgtgcaagacactgaaagcagatgaagggcatggaggcctttgggtggcggccccacggcttcccttggaactctccgaccaggaggcggtgagggacagtctgctgggggccactagaaatagtggccaagcttaatt

SEQ ID NO: 18111 - DNA, 495 bp, Homo Sapiens
  misc_feature (221)..(240): n is a, c, g, or t
  misc_feature (258)..(306): n is a, c, g, or t
  misc_feature (324)..(449): n is a, c, g, or t
gcacgaggtggcatcatgtcaattaacctctttctttactgcagtgccatggtctccatgaactgatttttttgtgcagtgggcaggaagaacccatcgggcagctacacatcttgaaagagaagctcttcctgtgaggtacatcaactgtggttaagaatcttacatacttatcattttttgttgttgtgagaacatttaaaatctacccttttctttcnnnnnnnnnnnnnnnnnnnngaggtggcgtctcactcnnnnnnnnnnnnnnnnnnnnnnnnnnnnnnnnnnnnnnnnnnnnnnnnngctgggttcaagtgattnnnnnnnnnnnnnnnnnnnnnnnnnnnnnnnnnnnnnnnnnnnnnnnnnnnnnnnnnnnnnnnnnnnnnnnnnnnnnnnnnnnnnnnnnnnnnnnnnnnnnnnnnnnnnnnnnnnnnnnnnnnnnntacaatgcattattatttaatacagtcattattctatgcaataaat

SEQ ID NO: 18112 - DNA, 816 bp, Homo Sapiens
  misc_feature (379)..(391): n is a, c, g, or t
acaataaaaatcccccgggctgcaggaattcggcacgaggtcttactggaatctatggattatatttttcctataagacagctgtgtttagaattttgagtgtctttcctccccccaataaatttccttactactctttcttcataaagcagttgttttgtcactttgactatattaagacacatcagtgtagcacatgctcttaactggctgtggcattttaattttataaaagaatggtttttatctgaagaactagatagaaaccccagtttttgtgccgttcagtcacccagatccttaaacttaactatggtacataatatccacacttagaactaacaggtgtttagtcactttaggacttaaaatggaaagnnnnnnnnnnnnncctgctgtatctctgctttcaactgaagttaaagaattctagatagtttaaaatgtgttagggataagcacacttcaaaagatgttttctagccctaaattttatgacattgggtacttaaatttggagtacactagctattgagaacaatattttgggttgaggagagatggttgaggccattatttagtgggagcattggcattttgaacactgtaaacaaaagaacacttccgcctgctgtttgtaaaagctctttggggaagatcttttacgaaagaccaactttttaaaatgtaaattacctacctaatataagtgtccttaagacatgtatgtaaacttccggaactgttttgtctgtgttattaagaaatacacaagaatctttattcaaacctaaaaatataaaccttgtgagcact

SEQ ID NO: 18113 - DNA, 607 bp, Homo Sapiens
gcacgagggcgaatccctcagaccacactgctggatgaggaggaagacattctgaaccagttgatgctattgattgaggagcaagatctcttcttcgaacggtttctccaagacaaggaagagctgcagcaggagatggcacagcaaagccgctccctgcagcaggcccagcagcatctggaggaggtgcggcataaccggcacagggctgaccaggatgtggaggctgcccacagaaaactgcgccaggccagcaccaacgtgaaacactggaatgtcccgatgaaccggctgatgcatccaattgagcctggagataagcgtccggtcaccataagctccttctcaggcttccagccccctctgcttgcccaccgtgattccaccctatagcgcctgacccgctggggatcccagggcgacacgaccccctccccctacatcaatgatcaacttaagtcactcaatggtggggatgaggctcctgcctcggcttccactcctcaggaagatttgctggatcaaccaccagaaaattaccctctcttagccccttgttcttcactatgtcttatccaccacgacctgtgcacagctggcttgtggg

SEQ ID NO: 18114 - DNA, 444 bp, Homo Sapiens
gcacgaggatcttgctatcccataaaaatcccacgcttggtaaactctgtagccaaaacccctctccctttttctcatgcgatgtcatgcctgctaagtgcatttgaagaagggaagccgtgaaggtgatgcatagcaatttttactcattattgctgttggtgtcagcaacaatgaaacagaaactggggttacagctcagtctgcatatcacggccagtgaagtggaggaacaggcatttctttcgaagacctttctgcaggtgagttagttctccaagtcagcacaggacacagaatctggggctggagggatttggagggcgtcgtgtgcttctccaccttcttgtaccttctcttatcagctgcacatctcacccacctagaagattttgtgaagctgtctgttatataatttgtgttattaaaataataaaaacactg

SEQ ID NO: 18115 - DNA, 897 bp, Homo Sapiens
  misc_feature (117)..(164): n is a, c, g, or t
gcacgaggatcaactaattgatttttttggcttattctcaacaaataacctcatcctacttaaccccctactaccttacagagtcatagcttgggctccagagtaatagcagatatnnnnnnnnnnnnnnnnnnnnnnnnnnnnnnnnnnnnnnnnnnnnnnnnttgaggcagggaaaccagttaaaagacttttactgatatttcctgtgagaattgataagggtctaaactgaaacaagtgagagtgcagtggaaagagtgcatgtgagggggtaaggaaggtaaggaggtagaattgtcaggacttaaatattgattgggtgtggtgtggccagggaatggtggagtttggattaaactataaggtttcctgcttgggttgataatagaatatattcatttaatgtctcccttctctagcattctgttagcagtcatctgctggtgcaaccagtcatagccctgagtgataaaacgtgagagatttagtactcaggctctgaggtgttgttttgaccactaccatctacagattcccaactctactggatagtcaggttcctgaaacatgtaaatccagataatcagagttttattgtatatggaacatatctttcatttcctaatggatccagggacatcatttacgaatatcagatattggctgaattcagctgtgttatgatcaacccttaaagactactgggactatgaggagcccctcacggtgtttttctactgcccttatgtaactgggtctgccagctttttagaactgtgtgtgcctgccaacttagaaaaaaaatcccacagttaaatttggttaaacaactgtcaactttccttgcttttttgctgcagtttgggtaaggtaaccttgcagcccttgctgatt

SEQ ID NO: 18116 - DNA, 745 bp, Homo Sapiens
  misc_feature (372)..(430): n is a, c, g, or t
caaacctgatgttacaaagaaacctccgttctgtagacagaatttcttttatttttcttcttttactcctcacaatcactttcccagtgccatcaccatctataaggtctcagagcagaggattattcatggtaataagtgggggtgtggtgcagccattccagtaacacccacaagaggacagctgttctgaatgtccccacccacccctctttcagtacaggtgagacattttcagttcatgagctccagaccaaatcccaggccagcccttgcaccaaaagccttttttagaaggcttatcagtctattaggaatgtctcaggaaagatgagccatttctttggggagaaatatatttacagatggaannnnnnnnnnnnnnnnnnnnnnnnnnnnnnnnnnnnnnnnnnnnnnnnnnnnnnnnnnntcatctatgtgcatttcacttccataaagacccagcccaagctgctgggaaccatgtgttcctgagtattctcagaggttaaacaagtgacaagtgagcttctggaattagtgtctcagcaagctggctttaggaatgagccccattttatcaaggcagagaaaaaaataactgcagaaaagataaagataaaccaaatatatatacccctccaatggaaaataatgttgattcagcaattcccataggatgtattacatggctcgaatttaatatattattagttatctgtctttgatcctttgcccattgtac

SEQ ID NO: 18117 - DNA, 950 bp, Homo Sapiens
  misc_feature (387)..(401): n is a, c, g, or t
gaataaaacccccgggctgcaggaattcggcacgaggatactcctttttgtaaacagatgtgatagagataaagttatctaacaaattggttatattctaagatctgctttggaaattattgcctctgatacatacctaagtaaacataacattaatacctaagtaaacataacattacttggagggttgcagtttctaagtgaaactgtatttgaaacttttaagtatacttttgggaaacaagcatgaacggcagtctagaataccagaaacatctacttgggtagcttggtgccattatcctgtggaatctgatatgtctggtagcatgtcattgatgggacatgaagacatctttggaaatgatgagattatttcctgtgttnnnnnnnnnnnnnnntcttaaattcctacaatgtgaaactgaaactaataatttgatcctgatgtatgggacagcgtatctgtaccagtgctctaaataacaaaagctagggtgacaagtacatgttccttttggaaagaagcaaggcaatgtatattaattattctaaaagggctttgttcctttccattttctttaacttctctgagatactgatttgtaaattttgaaaattagttaaaatatgcagttttttgagcccacgaatagttgtcatttcctttatgtgcctgttagtaaaaagtagtattgtgtatttgctcagtatctgaactataagcccatttatactgttccatacaaaagctatttttcaaaaattaatttgaaccaaaactactactataggggaaaagatgccaaacatgtcccctcacccaggcttaactttgatactgtattattttgtcaatgtaaattgaagaaatctgtagtaagtaaacctaagtgtgaactaaacatgttctttgttcaatatgggaaatatctactcatattttaaag

SEQ ID NO: 18118 - DNA, 643 bp, Homo Sapiens
ggctgcaggaattcggcacgaggcgggccgtttagagggagggaggccagcgggccggcggggtccgccccgaccccatccacgaccccgactcctatccgatcctatccccggccccgctcgggcctttccccttgcgccctggctcggctggctcgacgagcagtaagttcgtagccgccctccgaagccgggcgtgcatgggatggcagagttggcgtgcgtgcgtgagtccaccagtgtggcatgggcatgtaaggtgcgcggagggactgcaccttctccatcaggtgcagaaggccacgtcatgctgaacaagagccgagaagtataatcgccagtgtcaagccgtccacgttgtgggatgcccactgttcccccaggatcactcaagaccctgtgacttgtggtcactgatgagtggaccaagtgaagtccacaagatggctgctgtggctccaggcatcacgtccacatgcaaatccatccagaggcaggaactgggaataggcttggaggtggccaggacagcaagtgggctgtctgtataaacctcccctccacttgggaaggaaaaatcacccctcaagtcgattttctgtccatcttattgatcagagagcgttataaattcacccattaa

SEQ ID NO: 18119 - DNA, 743 bp, Homo Sapiens
  misc_feature (46)..(62): n is a, c, g, or t
  misc_feature (321)..(329): n is a, c, g, or t
acaataaaaacccccgggctgcaggaattcggcacgaggagtttcnnnnnnnnnnnnnnnnnggctattgagttgacttcttcatatactctggatattaaccctttgtcaaatatatagtttgcaaatattttctcccattctgcaggctgtcttttcactccgttgattatacatattatgtatttacttatctttcattgtccacctaccccactatatagagtttaacttggatattttcccaaagtgttaaaaagaaagatggaaaatgggagccagaaatagaaagcccactgagtactacagttatcactgagnnnnnnnnntgaaagttattactgataaataaaactgaagaaacctctcaaatgggcctggtgcctgggtccatggggacaaaagtggaacatcagtctagcagtctagtctggtgctggggaagacctaaagcctgattcttcagaggccatcatggaggctgggtttgtgggtggtagcctgtaagctaggccctctggggtagttctggtgccagggtctactggggtagacctggaccttgggtttgttggagcaggcctggaacctgggttcactggaacctggggctgtagggaccagcagtcagtggacctaaagcctatatccactggtgccaaccctggatactggggctgtgggcccaacctggtgttggagcctggtgcctgaaactatggggaccaacatgggggaatgga

SEQ ID NO: 18120 - DNA, 816 bp, Homo Sapiens
  misc_feature (173)..(212): n is a, c, g, or t
  misc_feature (474)..(728): n is a, c, g, or t
caataaaaacccccgggctgcaggaattcggcacgagggtggactatttagaagtcttggaacacccatcaggaagcacttctggagatgtaagggtgatgtgctaaaggtttcacctggagaaatactggctaaaatgaagagaaaggagtaggtataagcagtattaaatnnnnnnnnnnnnnnnnnnnnnnnnnnnnnnnnnnnnnnnnctcagtgactcatactcttgaataatcccctttccttgagtgttggcaagtcctgtgaatataataggatgtcaatcccataggtcacttagctggctttgaggtgacagcaaaggagattacaccaggcaagcctgacctaatcaggcaaaccttcaaaaagtgtgacatcattgagattcccactgtaggcctcaaggaagaaagcaagccgctctgtcctggactgccaatagagaggggtggcctctaggagttgaannnnnnnnnnnnnnnnnnnnnnnnnnnnnnnnnnnnnnnnnnnnnnnnnnnnnnnnnnnnnnnnnnnnnnnnnnnnnnnnnnnnnnnnnnnnnnnnnnnnnnnnnnnnnnnnnnnnnnnnnnnnnnnnnnnnnnnnnnnnnnnnnnnnnnnnnnnnnnnnnnnnnnnnnnnnnnnnnnnnnnnnnnnnnnnnnnnnnnnnnnnnnnnnnnnnnnnnnnnnnnnnnnnnnnnnnnnnnnnnnnnnnnnnnnnnnnncagttccctaccccactaggaggtaaatcagcctaaaaagactcattctaaaattataaaatcttacttttaaaaatgcaattatatt

SEQ ID NO: 18121 - DNA, 882 bp, Homo Sapiens
  misc_feature (83)..(94): n is a, c, g, or t
gcacgagggtgaactgacaaagatttggtgttcaaagcaaaaattaaactttggaaaagtgagcaagtacttaatcagaaacnnnnnnnnnnnngaaaggaaaagttaggtgaaaatggtttccaggtgttgttgctgttatagtttgaatcataaaagttgttaaaagtctgctgtaacaaaccatcatagactgggtgacttataaagaacaaaaatgtatttctcacagttccagaggctgggaagtctaagatcaaggcatcagcagattcagtgtctggtgagggcccactttctggttcatagatggcaccttctcactgtctccccacgtgatggaaggggcaagaggtctctcttggtactcttttattaagggcactaatcccatccatggggctccaccttcatgacctattcatctcccagaggccctacctgcagataccatcgtatgggggatttgatttcagcctgtgaatttgggggaagcgggacaaacattcgttttgtagcaaaaggagtagagtaatatctgccaataactggaggaaagaattgttcttttaaaactattaaattgtttaatgggatttaaatgatttcaggaatgaaatggaaatcctggtaatgggtagaaacataggtaaattctccttttcacttaccaccacctgtgtgaacaacaatcatttctcattaatagtcaagaatttgaagagatcatgagtaaaaagtcttgatcagaaattgtgtatagctgtttccagcataaaaccttatataaattgcatattcatagaagatgctcaagtatgtcatgaaaaatatgaagtttatttaaaatattaatacaaattaaagattactgtattctct

SEQ ID NO: 18122 - DNA, 621 bp, Homo Sapiens
  misc_feature (107)..(159): n is a, c, g, or t
  misc_feature (193)..(256): n is a, c, g, or t
aatccactttggtacttgatacaaattgtttttggagttttttatgaactgaaataaaaatgtttaaataaaccaatttctccctgggcaaaaatattctggaaggnnnnnnnnnnnnnnnnnnnnnnnnnnnnnnnnnnnnnnnnnnnnnnnnnnnnnttggaaaagttttctaaatactttctggtttttnnnnnnnnnnnnnnnnnnnnnnnnnnnnnnnnnnnnnnnnnnnnnnnnnnnnnnnnnnnnnnnngggggggaagttctgtggcaaaaccccctttgtaaacttccaaaacccaacaatttttttattaggctttgtgttaaaacaggcccaaaatttacaaaaccttcaaatttttattttttcccaaattttgccaaatttgttaacatgaatgggggtcagggaattctaccccaggtaaatgaaaattacttcagtatacctattttttgccccctgggaaggaaggaaattctcccaattttcgaaatatccccaccccaccccaaaaaaactaaaagccgtggccccataatcctttttggggaggcccccaaaatattcctaaggggaacaaaaaaggtggggggaaaccccacctcttcccc

SEQ ID NO: 18123 - DNA, 521 bp, Homo Sapiens
gcacgaggggaccccgtgtcaaaaactggagccattacttcaatatcatctttatgactattggctcagatcttcgatttactgtgtgacaatgcccgcatcgttctttttgtgattatgcccgtcttgctgctgatgactttgtagtcatgactgattcagagctggccatgcgccaatctgtggataacttgttccatgggctccgcagggtcattgatgagctttatatcacactcctgtttttggatttagagttcgaggctctcaaggaggagctgctcttcaagaccaagaaccggcaagaggaactaaaaggcctacatacccggattgcccactttgggttgagcgagtaggtagatgccttcaaatctcttgacctcgccaagatcatggcaaacatccgggcccattatgacaatctggctcgtttgaaccgagaggagcctagacaagtactgttctcatcgattgacgttagatccacataggtcactgctgcttctgctgaggttgga

SEQ ID NO: 18124 - DNA, 853 bp, Homo Sapiens
gcacgaggcatgccatttctgtaaaaccaacatttgataaatattggcttataagtatcattcaactggatcaagattcctctaagtggtagggaacacacctttttattttcctttgttctccacagcatttaatacaatgccttacacatattatgtgactgacaaattttttttgatgatcagatagataaatcagggttggaatcatcttaagagttaaatgggcttgaagcctgctacatataattggtggttacaacaagaccccccaccccaatagtgggctgagccctgatcaagatttaaattagaaaagtgaggtattcacttatttatccaactagaagcatatccgcaaagaatgtatgctatattgtgtcataacatatatacaatttgctatatatattcattaaatcaatatcatcaactcatgatgagctactaagtgacagcaaaattatacccgccataagacccagtttcctccctaaaggaattcactttgttagcctgttgaatgaaccacatataaaagtacttggttcttaagttagagctgaagtgaatacaatggctgtaggacagaattgtgggcatggcaagctacgaagctctcctttgtgttttaccaaagctcaagaacagtaatgagaaattagaaatataataatctcaaagacagctaggattgtgccttttcattatctaaaaaatgaaatcaagaccttaaacttaacatataatgtcactgacagccaagatgaagagaggggaaaaccaactgggatatggtaactgtcattggcagacatgctgctactttggggattatctttatatctctgat

SEQ ID NO: 18125 - DNA, 867 bp, Homo Sapiens
gcacgaggtgaatctatagatcaccttgggaagtgttgacaccctaacattattaagtggccaatcaatgaacctgactagtccttgcacccccttcgtcttgttttacctttctgggctgttacataggatttctgtcttttcattttatccaaaaatacttggttttaaattgtctaatattcagtttataacacaagtagtacaggctcactgtaaaagatataaaacagttttagacatataagatattataactttataatgaagaacaggaatatgcagtaaaaatctgggcgtaagtcaggagtaaaagcattatataatttaaaattcatggtaagagcgttaacatttataaaaaatatattttgttgtctaaaattcctaggttattaaaaatcaaaaaatctacatttaaaatgaaaatcactataacttataataaaaaagacatttttaaaagatctaccattcttatgtactgcatttgtcctttttaaatatttatctttaaaactaatcacaagccccaatttaaagggaaaattagtctgggaaagattaaataatatatacgaggttctatgattatgaaatgtagatctgaaatttcaatgtaattctgattcaaagatcacactcattttactataacaagcaatagtaaaatgagcataaaattaagaaacggatgtatgtttttgtactctctctcaaacactaactggtaaatcatttcatatcccttgatctcaatttttacttttgtgaaatgagataaataatacttcacaactgaatatatatttaagaaatgtaatgttgggttaaactttcaaaattaataaaacagttattcacttt

SEQ ID NO: 18126 - DNA, 498 bp, Homo Sapiens
  misc_feature (92)..(105): n is a, c, g, or t
  misc_feature (143)..(153): n is a, c, g, or t
  misc_feature (338)..(350): n is a, c, g, or t
  misc_feature (397)..(421): n is a, c, g, or t
ttggggtttgttcccaaaatttaaaaaatttgacgtattaaacccccgggccgggaaaggggaaaaggggttggtttaaaaatcccggaaannnnnnnnnnnnnnaccggggccccatttcccccaaaatggggcctaattannnnnnnnnnnggccgttttttttaaaacgcctgaaggggaaaaacctggggtttaccaaatttaatccctttgaaaaattccccctttttccaacggggggaataacgaaaaaggccccccccatttccccttccaaaaatttgtcccccttaatggggaaagggaacccccccttatcggggccattaaccccnnnnnnnnnnnnnttaaccccccgggagccctaaaattttcaagcccgtaacgcccgggnnnnnnnnnnnnnnnnnnnnnnnnncccccaagttgccgcgtttttcccctcaagttaaaatggggggtctcttttgggtcccatattaggtcttaccgccg

SEQ ID NO: 18127 - DNA, 769 bp, Homo Sapiens
gcacgagggttgctttgtgtcccatggtcaagcattctatcttatcagggcctacagtaacatgccaaaagttgcttccaacatatttctctgctttggatggggcatatttctgtgctgtggatgacatggccttactccagaatcccaggccctccactgtgactctcctactggtgcttggttcagctccaccccaaatcttaccccaccactggcactttcagcaccagggggtctgaaggatggtgactgcgccatggcctggatctgctgcagtgtcctttcctgtggaggctccactcaaagctggcatcctcctatgtcacctagagtgtgggtcaaagcaatacacctacatgtagaatgtgatgtcagaactcaaacaggctcaccaggcagtgtgcttccttccttgcatgaggatgcaagatgcaacagtttgtctttcacattggaagggacacccctggatgcccctaaccactagacctgtaaaacttcactgcagtggccacttctgaatctctgtaaggtttatttatcttcaccctctggagagaagatgttttaccaaagcctctagtgtaccttcctcctcttactcatccatcccagtcaacatgatgttgtcaatgaaataaaggaatttaatattctatagtatatccaggttctccagatctcttaagactgtactatagaggcctggggaattataatagccctgaggcaaactatgaaattaaagtgttgtgggatccacatg

SEQ ID NO: 18128 - DNA, 510 bp, Homo Sapiens
gcacgagggaagtatttatggtaagctttcttaaaaattattatggcaaatacttctgaaatccggcgtacttttctttaagctttgtcatttctgttatgatttttcatggtgaaattttggtactgagatgggcattctctgtacctttatagtaccactccaaaggcaaggaaccatgattgacaacagtcaagctgtggatgaaatgaccaggaacggagaatgaagtatgtaaatcccagcttcataggaactcttctcatactgcttttcagattaaaattgctgtttacctggtctccgaatgtaatgcctgactgtgtcattgcccggatcagttttccccctgccccatcaatatgttctcttgcatatattggcgtgctgccatataaagtaaaaatactggagatattctatattttatatataggtttatgtgttgttggggatgttttcattgtgctcttttggacataataaataattctctattgagaaaaaaaa

SEQ ID NO: 18129 - DNA, 698 bp, Homo Sapiens
  misc_feature (72)..(324): n is a, c, g, or t
  misc_feature (344)..(363): n is a, c, g, or t
gaattcggcacgaggaagccctgtaaaccattacactatgagacctaaaagagagtattaaatgtgaacttnnnnnnnnnnnnnnnnnnnnnnnnnnnnnnnnnnnnnnnnnnnnnnnnnnnnnnnnnnnnnnnnnnnnnnnnnnnnnnnnnnnnnnnnnnnnnnnnnnnnnnnnnnnnnnnnnnnnnnnnnnnnnnnnnnnnnnnnnnnnnnnnnnnnnnnnnnnnnnnnnnnnnnnnnnnnnnnnnnnnnnnnnnnnnnnnnnnnnnnnnnnnnnnnnnnnnnnnnnnnnnnnnnnnnnnnnnnnnnnnnnnnnnnnnnnnngtttcttggaacctatacgnnnnnnnnnnnnnnnnnnnngaaaagccagaccttgtgcccttgttttgaacaccgactgggaagatggggcttaggtaacagccaaacctggctgtcagctgtgtgggagccaccaccctctctgggaagagttcctgcttctgtatggcaagcataaatcaagctcagtctgggttatggagaagttgaaaattgttttgttcctcattagtttataattgtatgaaatacgattttaatgaaaacttttcagaattcacgtttgtgtagatatttcagagaacatttttactttacatcctaaaactgccttttcctatggttttgtcaataaacactatgatgttaaaaaa

SEQ ID NO: 18130 - DNA, 426 bp, Homo Sapiens
gcacgaggattactttgaaatccctcttttacctggggattattacaattgcaataaatcgttaatgttttcttcacacagcttcttaaaccaagtttctctgcggctctttcggttctgcttacagtgtgtgggaaatctgatttttttcccctactaatattttgataaaaaatttaatgtattgactgcctcattgacacaatttatctttaaaggtgtggaagctggtggggaccaaatgttacctgtgtttttgctgttgattgctattttcagaagcaaaccatgtttttcacttacgtgaggagtcgacaaatttgggattttaaaatggggaggagggagctatttgtgtaagactgctgtcatatttgactacatattaaaaacagtaaatgacacaattaaacaaaattgtggctg

SEQ ID NO: 18131 - DNA, 381 bp, Homo Sapiens
aaaaaaatcccccgggctgcaggaattcggcacgagggttacctgttttgtcatgtgcgtgaggtggaaggaatcaaaggccgaggaatctgggagaaagcagttccgatggtgtccgtggggctaacgcatgagggaaagacccaggtaggaggagtgggtaacaggtaggaggagtgggtgacagatgggagggggtgagagggctcggggccctaaaagggcaagtggctggtgttggtagcaaggggtggtctttcctgcctgagtgataattcctgagtgataatatgtttcccttgaaatttcgcttcgatgtgttcttagagtgtttcttttcttctcctgtgttattatgtgaataaatagtaagagtggctg

SEQ ID NO: 18132 - DNA, 548 bp, Homo Sapiens
  misc_feature (52)..(62): n is a, c, g, or t
  misc_feature (189)..(197): n is a, c, g, or t
acccttccctgaaaaaaatattttattaatcttcaatttcccccgcatattnnnnnnnnnnntttgatattttttatcaaaaattcggaatgttttgcccaaaaaaaatccaaattattttaaggggggtttgcttttttttcatcggattcctcatccaaaacctgttctaccccttctacccccggnnnnnnnnncgggagcatgttctaaattccttttttcaaaaaaaatattgaacaaggggagctgggaaaaaaacccgggagtttcccctgtacaaggccttcttcaaagcttttggaaattacctcccctccctcttccggcaaatttggccgaattctaatatctaaaaattccttaatcattgccacaattttatcatttttttcaaatcctggtttcccggagagtgtttcctccaaaaccgggggtaaaccaaaagcaaaaaaacccatgatggttgcataaatatctggtttcaataaattccagtctaattctctttttctccttgggacagggaagaaatctggcccaaaaaa

SEQ ID NO: 18133 - DNA, 858 bp, Homo Sapiens
  misc_feature (264)..(308): n is a, c, g, or t
  misc_feature (542)..(657): n is a, c, g, or t
cagccccgacaattattttgattcttccttccttaaagcatttgcaatcagctaccatccaaaattgcttcttcattgaggatatttacagaaaatactccgacatgtactcttgaatacaagtttctgataacattaaaatcataccattagactatttaagaatttccaaaattttaacaaactgatagcttcatgaaactgccaaccaagagcaagcagagaattcatttcatgagactaaaagataataatgaaaataannnnnnnnnnnnnnnnnnnnnnnnnnnnnnnnnnnnnnnnnnnnngtttcccagatttcaggaaacattttttcttttaagctatctagagcttcaacaattttgcgaacaaaaattgaaacatctatattttctccctacctgactgctccagaattcggaaattattcatgaatatttatatgtttataataatatcgttatttgcacaaaaaatatagttattaatattaattgttataaaataattattattgataaacaattatttgatgatcnnnnnnnnnnnnnnnnnnnnnnnnnnnnnnnnnnnnnnnnnnnnnnnnnnnnnnnnnnnnnnnnnnnnnnnnnnnnnnnnnnnnnnnnnnnnnnnnnnnnnnnnnnnnnnnnnnnntgctcaataaaatctgctccctttataacaggatacattttgaaacactggttatataaccaggctttgattgggatgttatatttgggattatacttagatgaacccatcgcactgctggcaagtctggagtcggccttggtttggcttcctctgtcaggaggttctaagtttaatctgaaattccttataaaacttctg

SEQ ID NO: 18134 - DNA, 831 bp, Homo Sapiens
gcacgaggctgcctttaaaagggtctgttgtagtcagctctgatgggtggaggttttgcagtgggatgggaagtgatgtactactttatatccttttgttgatggtatattctatatgatttttactctattttttgcatatcattatttgctgtagaaatgtaaaatcctgagcgaataagaaacaattcacataattttgtttcagaatggaccaccaaatttggcagtgtaaaatgctgttacttattgctgtagacaaaatgaacactttcaaagttaattctgcatagctgaaattctttgacaacaaaataaattctggatactagtagaaaatttatggatttcaattagagtttgtagtgtgtcataattccagttttatattccatgcagttcagttttgggtttttaatggggccagtgcagtaataataaaaatgattcaaaatgcacccagtaattacagagatttgctgttgcgtttgcattaaaaatgatgatgatttatgctcggtgaaattgtggtctgtggctctatttagggcattcttgctattaagctgcttattagttatggtcagtgatttaaagcttaagacctacattagaggactgtaaaattatttattctttatagataatagtaaatttgaagcagacattagattaattataatcttgtacattaacgaatacggattagtcctttgtctctttttaggtctttttgaattcaagtaaatggaaaatgagttgattgagttagaagagttcactgaacttacttttgccttcctggtttgtaaatagttaacaccttttcca

SEQ ID NO: 18135 - DNA, 271 bp, Homo Sapiens
aaaattgacattgctttattacaattggacggcggggccggcaagaggtggttattgtgctcaggggatgggtgggctgcgtacaccattacccaactggtggaaggaaaaagaggtgggtttgaatgccccgtcccaggggtcccccagcccgcttcgggaaagggacacccttggggaaggagtcagggccgcggcgggtgtggtggttatcaaattaataacttctaagaattccagctgaccatcgctgttgctgttcactttcttc

SEQ ID NO: 18136 - DNA, 766 bp, Homo Sapiens
gcacgagggcgagcaggagagaaggcagctgagggtgggaggcctaccgggccctgaacggagagtgcgtgctgcccagcttcatgaagagccggtgctgcaggtccagaggtgcctctttaaagaaagatgccggcttgtcgtagacggtcacagccctgcaatgaaatcatggcagggctattgcattagtccagcatggaggctactttctgctcaaaccactcatttgggttccatgcccaacgtcacccatcctcagcaaaacaacctttatttccttcttcctggtttccagaaatttcccctaaagacctgaggaatcaccgaatgaaaggggctttttacaaactggaaacttaagtggagtgccaatacacaacatggattgcaccaggctaggtctaagataaaaccagactgtggacaacaggacagataagacacacatggctctgcactgcctggaagaagattagtgtcctcttgccttctctagcccctttcccaagaaccctcccagaatttcgtcctatgaagggccaggggtgcaaggagtcacccacacaatgacaggacccaccagcaataccagaagttggccagccctactcatccaaattcccttctgccagctggacatcacaaggatttcagactgccatcctgtgacaactccattttggggtctggggatgtaagggttactgtattagtccattctcactctgctaataaagacatacctgagactggggtaatttat

SEQ ID NO: 18137 - DNA, 860 bp, Homo Sapiens
gcacgaggctctttgacttcatgcagaacctattctttttcatctcctggaccaaatgtgaaagaaagaagtggacatgtggaggattctttctctgtgaataatattgaaaaagctccattttctggggaaatacccatggttcattgtctgatgccaagaaagaattcaggacacagacacacatgaggagtgggtttaggagtggaaagtttaatagataaagaagagagtgagaaagcttcctcatgttgagaaagacagttgctcaagagagggttttctgggtttggggcaagatttgattgatttcatacagaggcttgaggaggcggtgattgatatacatagggcccggggattggtttaaccaggtatactacttacatagccggtgaaaagactggccctcccaccctaaccttttattatgcaaatgcatcttctacctggctgtcaccatgacatttgcacacgtggcttcacttcaccagtgccatgtcacccacacacctggtgacaaggaaaagggagcaggaatcaccatattgaatgtgcctggcttccaggtacagctgctagctttacatatgggagcctctagcttgcatatctatacttgcaacttgacttttcaggctgctttttgttagaaaataagtggcttgggggctgctttttattaaaggaaaaatccaccgagaactattttacccttttctaatggcctaaaataaatttttaatgactccctgtattaatattacccaaccccttgatcccctccaacctttaatcaaagctagcagattgctcatcttgaacagaaataaaaagttaaaaagttggagtccttttaa

SEQ ID NO: 18138 - DNA, 925 bp, Homo Sapiens
gtcatttgtgcttatgaacacagatgcaaaaatacaaaaattcagcaataataaatattagaaatagatcgtgatgtgattcaagagtacgtttatggaagtttagttgcatttgatcctaagtataaatttaattggacaatctctcaattccatctagactccagaacttacagactgaaaaaccttactgaaagggtctcttttcattggaaaaacattaacttttaatatgaatgatttgactgactgttgcagtgttttcttcctgtgagaccaatgtttaatgtttttagaaatactctgattaaaagtttccttaaatcctttttgaactgaaatgcaatggcaaaaaccattaaataaatgatgtcagttcaatataatcaggttataaatgaaatagccaccatttaataaatgctcacccttagcaaggccttgtgccaagcattttacacacatcatttcctttaatccttctagaacccctaaaaaggacaccttttctcattccttcacagatgaggaaattgcaggccacagatacaagtaaccagcttaaccactggattgtgctctctctttccttctgtaatctactttgaacaaataatacaaacgtgaataatccatttgctattggtatctcaagttttgttgtcttgatttccctggtctctaccttttattctgtaattaagacctatttaacgatgagttgaatttagattaatttcttttaacagggtatctgacacatatatatggcacttattagtgtcaaacactgatctgagcacttatattacttatacacacacaccctattaactcattatatccccattttattgataagaaactgaggccaaatgattattgacttgtcaaaccccccagaagttatggacaaatactttca

SEQ ID NO: 18139 - DNA, 402 bp, Homo Sapiens
  misc_feature (116)..(150): n is a, c, g, or t
  misc_feature (163)..(293): n is a, c, g, or t
cgcagtaggcctctctgagtcacctgccggctagcgtgggcccttcctccccctgtctttccacaacacccgctgagcatcggcttgtaacaaaaggtccagacctaatgggaaannnnnnnnnnnnnnnnnnnnnnnnnnnnnnnnnnnaagccagaatttnnnnnnnnnnnnnnnnnnnnnnnnnnnnnnnnnnnnnnnnnnnnnnnnnnnnnnnnnnnnnnnnnnnnnnnnnnnnnnnnnnnnnnnnnnnnnnnnnnnnnnnnnnnnnnnnnnnnnnnnnnnnnnnnnnncttgtaatttttttgttcctttctagaaacggtgattcactatgttgtccaggttaatctcgagctcttgacctcgggatccgaccacctccgcctccccaactgctgg

SEQ ID NO: 18140 - DNA, 463 bp, Homo Sapiens
cccgggctgcaggaattcggcacgaggcctccttaataaaatgtgcgtggagaaggggatgaaggcgctcacagtgtcattgtaacggcagaatactggaaaagccagtgaccatccacaggagaacggactaaaaaatcagaatattggtgcgatggagcacggctttggagccacgcaaaggaacgcacattcacacacgtcagcccgcatacgtttcagacattatgctgagtgggaaaaaaacaagttgcagaaaactatgtgtaatttgatagcagttaatgttttaaaatgtaagacaagcttatgagctgttcgtgaatatatatatattttttcagctaatgggcaggtaacgagattaaaatgctgcccttctatgtgacaaaacaggagtttataattgtaatatttaaaatgttttgttcttaaataaatctgctttctatatttggacatt

SEQ ID NO: 18141 - DNA, 598 bp, Homo Sapiens
cccgggctgcaggaattcggcacgagggagcctctaaaatgtgacatttagagtgaggagggtcagcagtgggtgggttagcctggcaggtgccaaggttctgtactccctctaggtgaagaattagcacaggcatagtttctagcccccttttcctctcctacatgcaaaataagatgatgaatgttctccaaatgacagaggaggggaaggcctcaatgctgtgaactctgtagggtttcagctcagattggaccttccagactggcctggaaagccatgggggccagggtgtctcagcattggcccgcttttggcctggtatttgttttttttctatcagtgggtctttttcttgtgtctgtcttacagcatttctctcatctacccctagtttagaaatgttttcttacataacttaaaattcatgtaaaataagaggtgatggatatataagttttggaacatactaataaatgcctgggagccaacctcctatctggagaactaaaccactgtgcaccacagggaaactcctagtgggtgctccctgccaaggggtaaaggcgttctagaatagtttcatcattcctgcacc

SEQ ID NO: 18142 - DNA, 493 bp, Homo Sapiens
  misc_feature (49)..(101): n is a, c, g, or t
ttccataaaagaggcccccgggctgcaggaattcggcacgagggtttcnnnnnnnnnnnnnnnnnnnnnnnnnnnnnnnnnnnnnnnnnnnnnnnnnnnnnaaaggaagagattataaaaagacatttcacattaaagatttgcagtcctgggacacagtttggaaaacactatttataaggttgcacatattacaaacagctcccaaatggtgaaactggtattctaagatgaaagcttaatgaacataatgaagtgaataaacgcgtgtgaactaatgtttaaaaagttagagcttgtctcaagtcagtacagctcttaaaataataaatacagtaacactactttttatttctttgctcttttatcccttttaggttcgatttgctgctttgattactgtgttagcactggctgaaaaactaaaggagaattatattgtcttgctaccagaatccattcctttcttagcagagttgatggaaggtaattc

SEQ ID NO: 18143 - DNA, 871 bp, Homo Sapiens
  misc_feature (54)..(108): n is a, c, g, or t
  misc_feature (142)..(273): n is a, c, g, or t
  misc_feature (411)..(421): n is a, c, g, or t
gcacgagggcccctccacagtcttcttttttttgagacagggtctctctgtcannnnnnnnnnnnnnnnnnnnnnnnnnnnnnnnnnnnnnnnnnnnnnnnnnnnnnnactcaagcaatccatattcagataatttttaacnnnnnnnnnnnnnnnnnnnnnnnnnnnnnnnnnnnnnnnnnnnnnnnnnnnnnnnnnnnnnnnnnnnnnnnnnnnnnnnnnnnnnnnnnnnnnnnnnnnnnnnnnnnnnnnnnnnnnnnnnnnnnnnnnnnngatcttaccttatacattagaaggctctgcacccccttcaagccactcttggcctataaaggagtggacagagaattacccaagggtggtgggatcctgggcatttgagagctcagccttctgtcccctaagatagcnnnnnnnnnnngccatctgcatgtctcaaatacgttcaccaccccccatacaccacctaagaagtcaatgcaaactttcacccctttgactaatataaaatgagtattcctggaggcagtcatccccaaagaaaatggggagtggcaaagcaacagggcaaggtgttcctgtttcaaagcggtgaagaacaaaatcgcacggacaattttgagctgcaaaaattggccccaggaaacttctgagcttgggagataaaaggcagaacctggaattgtagcatccaaggacaaaaagaatgtttgccagcaaatcttggctgtcaattttaaaggggtcgtgggcggggcggatggggcggggtaggattccaacaaaaatgagtataataaataaaaaataaaaggggaagagttgttaatggtttaactgctggttcagttctgattaatcatttgtgttt

SEQ ID NO: 18144 - DNA, 864 bp, Homo Sapiens
  misc_feature (644)..(670): n is a, c, g, or t
gcacgaggcccttccattttcaggagagacttcttgttttaattatgtccaatactataacattggaagtaaaagtaaatataaaatgaataagcctttttcagatggaaatttatagaattgattttaacagaattgttcatatagattgtgattatacttgtcattggtttttagcaaacatggaaataacattaatttttcttcaacatgagtagacttactgtgttgtagtattttacattttgtaaatttcttcataaaccttccttcttttgcacttataacctctaatttgctttcaagagtgttttgtttagggtcagtcatttgctgttgccttagctcagacctcggatctttttttaaaagaccattgtcaattcaatagaaatgagcttgaatttcctaccatgcagcaatgaaagaataggcttttaaacattcccagaaggagaccttctatacattaatgacaaaatatatgggaagggatattttgcttattttcccttctttctatttctacatgtggtactgctttgtcttttcttttctttcccacatagtcccatttagaatatgatcaggaaatagagcatcaatctttatcacattagcctgagatgttatagagttgaggnnnnnnnnnnnnnnnnnnnnnnnnnnngctctgtattttgtgacctctcaggcagagataagccggaaggagatagtagagggaaggtctttatttctttgtatctcagccatattcaagctctacatttagtgtgaaagcttacccttgggcatctatcaacttacaattttcattgttaactattcacaaggtaccttgatgtctctaatgtggtaatt

SEQ ID NO: 18145 - DNA, 782 bp, Homo Sapiens
gcacgagggggaaataaatgtaatgttttaagtctcaaaagtcaattgtataactgtgggacagagatttggcagtgtttcacatggaaaagagccatgggacatgtatttgatctcaaggcctgtaagattcaacagcataaaagctgctaaaaattttatgcagtcctaagctgcataaaggacacatagtatctttattaaagaccaaatattactgcaatcctctatttatttgttatgcattcattcaattaatatttatccagctgtactgagctaggcatttagatcttatctagaattttgtgtctgtttctggatcccagattttttatggatactgacaaaccaaatagtattcagaggaaattgaacaggatcatgaggtgtctggaaacaatgtcatatgagcaattattcattcaacaaaatttactgagtacttaatgtaagccagataatgcactagatactgaagaagataaccaaagaccttgctgttaggaatcttatattccactgtgagagacaatagtagataggtaattggtagtttaaaaatggccacagattcttcatagctcctccccatcaagaggtggtctgatttttcaccctttgtattcaggttggcctttgtcatttgttttgaccaatagaatatagcaaaaaatgacatgtgatttcctgaacctaggcctcaagaagcattgcagcttcagctcttacccttcttagatccttgagtccaccaaagtgaagaaagactaagctctcct

SEQ ID NO: 18146 - DNA, 315 bp, Homo Sapiens
  misc_feature (148)..(164): n is a, c, g, or t
gatatctcaacataattcacaggataatatcggacaacggaaccaaaaggcaggttggctaacccccaattggttttccctcctggagtgccgcacccactgtctgtgaatgcccctgaagggaaatcccccaatattcttccacctnnnnnnnnnnnnnnnnnagatggccccgaggagtgaagttcccctttccggcccccaggggaccctttgaaccatctcaaacaacaaccggaaacttttgatgtttagatttttgtccttgcaaaaactctgagtggatgtgtaatttcaaattatgccctgtcccaa

SEQ ID NO: 18147 - DNA, 827 bp, Homo Sapiens
gcacgaggctaagcttgtgttcggtgtccttggaagggaggtcccagagctttacaataggctggatttggtttgacatcttttggtggactgtcaaaggggaaaggaaatttttggattacttcaagatcccccaccgcccccgcccaactgacgtttgcgaattgcggctttggaaattggagtgttgactagagtgtggagagagagttgctgatttcattgctttgagtactagtaaaaccatttaagtatcagccggaagggagacagctattgacatttacatcggttctgtttggacctttggggtacataaaatgtcgggttctctgaattttttatcgaatttagaatgtctgctacatttatttaacttctgcaaatgcttaaaatgaaaacattttggaaatgcgaggatttttgtcaagtggattgttctcttcatatattaaatgtttacttcatatctttaatccgaaacattaaaatagcattgaagaggcatgattttcaagattaagtgagctatggaaaaggaatacgctttttaagaacgatctgggaaatgctgttactattagtcattgttgttgttaaatgttaagatttatttgagagtttctcaatttttttggtagacagtcatgagaagaaatggctaattcctccactttgaacatttacagtacaacatccccagttagttttaatgatttgggtattgaagatagttgtctggtttaagactggtatttaatctaagtatcacttgaaaacacaagctctaatgttctttattttggaaatttgtgattttgtaaata

SEQ ID NO: 18148 - DNA, 797 bp, Homo Sapiens
  misc_feature (152)..(164): n is a, c, g, or t
gcacgaggcttgttctctactatcaaggttcttgagtctctttatgggaacctggggctcttgaaagtgaattgcaagacgttatgtttgtgtgtgcttttctagagagagggtttgtagctttcaccagattcctaaagaggtctgcgagnnnnnnnnnnnnngtataagtacttctgatgaagagaaaggtgagttcccaggtaaccaatatgcaaaacagacaatggtgctgatgtttagacggtgtatgccagggatcagaggccagccaggaaatacccagtgccaggagggagcttgtgggggagccgaggggtgatttcctaggggaccagccctgggggttctcacatgggctggggaaggtttggacagggcaggaagggtcatcccgcaccctctgtctgcctcacaccttagccatcccagaagggtgacagaatgtcctactttaaacaccttccccaggcctactcagtgacctcctttagaaagaattgttctaagatttgaaaatcaatttggttaacaaagtgcagaatgaccttttgggaaccagagcactcaccggcctgtttagcattctgttctgccaggtgggaagtcagcttgttcctggtatttttgcactcagggttacagaggtgagactccacacagaaagtgctggtggtgcgagaacccgtcgtactgcctctctaagactctgaattcgctccttccccttcatcttctctcgtgcctgggaaaaagacagaacctgtgtgaagatgtgggtgcctgtatttcccccc

SEQ ID NO: 18149 - DNA, 901 bp, Homo Sapiens
  misc_feature (152)..(215): n is a, c, g, or t
gcacgaggggaacattaaaaaggaatataatgggaaaacaaatttattgttttaatacattttgtagttgcttctggatttttactgcagactttgctactgttacgccatctgcctcagattaatagaaatgtttaagttctaggaaagannnnnnnnnnnnnnnnnnnnnnnnnnnnnnnnnnnnnnnnnnnnnnnnnnnnnnnnnnnnnnnntttatgatcagatttgtattcacttctaaattcaatgttaaagttttgacactgatctaaattaattttcctgagcctaaggtttgtgtatatattagagatccagaaatagaatgcttttaaaggtatttttttaattacctaagtagtccaaagcttatgatttggagtttgttactaaatttgggcaagttatctgtagcattgattcagcttgaacataatactttggttaaaagcgaggtttagtgtctctgccttgtttggaacacaccacctgatgagcgtcctgttcttggagcgagctcaatgccttcttgcactcctcttgtattaactgtcccttttgccttattaagtgtagatatttgggcatatgtcttactctaaacatttagtgacaaatgtgacttcttcccctttattcctcccctagagcaggtgcccatgggagcttgaacacattagtttgtcaaatatttgtataaaattccattatcatgtgtgtggtagtcacagcatgacacccttttctgctgtcatctttgaaaacatgctattaaacagcaaactatcaaagtatgacaaatttctgtagaggaatttaatcatgcaccttagatacatttgcaactggaagtttgacttggtaattatttccaaatcatgagttgggaatggattta

SEQ ID NO: 18150 - DNA, 696 bp, Homo Sapiens
  misc_feature (270)..(299): n is a, c, g, or t
  misc_feature (456)..(468): n is a, c, g, or t
taaataaataaaccttaggtaaattaagtgaataaatcttttcaaggtacagatatgtcttattcatgtgtcacatcaggccattccgttacttgagagattgccccaccccaccatgcacacttaagtgctcaataaccctgtctcaggagactctgaactatgacccagagagtgcctcaggcacattttactctgcaagttcttacaccatctcattggagtcagctttttggggtttggtggttttcttgtctttggagtgctgannnnnnnnnnnnnnnnnnnnnnnnnnnnnncttgtactatttttctgtcccctaaaggaatccaggacacagaaattatttttctcctcaatactggtatctgattggctgaccagcaatgagtctccaagaaatgaaagttgggttggatgaagacaatattaatgtctcaaggggttaactttgnnnnnnnnnnnnngtacaccaggaaatgcctcttatcctgagggcatccatgtgtgcacttgagaagctacactcaatacctcaggttgccctatgagcaaataagccccagggctgatattcactagagactatagcagacatagttatggtaggtattgtggtttttcccatacaatactgaatcccggtccaagaaaaccggaagggtgactgaaacacattctcctataatggtttc

SEQ ID NO: 18151 - DNA, 798 bp, Homo Sapiens
  misc_feature (255)..(355): n is a, c, g, or t
  misc_feature (565)..(617): n is a, c, g, or t
gcacgagggaaagaacctatctagttctagccttaaattccttctgtcaccaaatctagagttacatggcatctgtacaagctaggtagctgaggcatgggatcagccctataaaggagcttttggagctttttttgtaggcctagcttcaacttggcactccagttccaatagctggactttctctcgtcgtgtgttctgatccttggattgggaacaaagtaaccactctgatcccacaaagcagtggttccnnnnnnnnnnnnnnnnnnnnnnnnnnnnnnnnnnnnnnnnnnnnnnnnnnnnnnnnnnnnnnnnnnnnnnnnnnnnnnnnnnnnnnnnnnnnnnnnnnnnngcggcagaatcctgttctgcccagaatgctaacagtgtcaaggttatggagccttcccacccaagggcttggtctattccttgcttttgccagctccctaacccttaaacacaacagttcaaatctatatgcataagcatctcctaggaacctgcacgtttccaatatcgactactgagacccatccgtagagatgcaggcttaagaggnnnnnnnnnnnnnnnnnnnnnnnnnnnnnnnnnnnnnnnnnnnnnnnnnnnnngcagtgatacaaaccacagaatgaggaacaccaccttcaagagactgaatcttgcttcacaacactagcttggtactgagaccatctgcctgctgactggctttcctggcacaaacattctgcatgtaggcacagtgtgtcttgggactcatgtcaacccgttcaccctcatgttcccttg

SEQ ID NO: 18152 - DNA, 725 bp, Homo Sapiens
catcactcatcactcacacacaaacacagtcaagacagccttctgttgcactagttttctcagttttactttttaatttcttggctaccatgttttcctttatggtttctctagaactggctttggtggtaggagacagcaacctgtgctgataccattgtggcaagtctctctcttaaatcaacttttagtgaggcttttgttctcttaattacactggaatcattcaattctcagtcctcgtcttaattgacttatctggctggagtttgacacaccttcctccttctaacactttttcatttgcctaatagtcaccctttatcttggtatttctcttcttagtagccactcttcattctgtctttctgatgtctggtgcctcctcatatctgtaacctctaaacattgaagtaatccagaactcactccttgtccattttctcctttttactattcactcccaaggtcactgtttcttaatgtgtagaagacgactctggtagatggtcaaataacttttctctggcgtaaaactttgggatcatcatcttacacatttcacattaatccctcagcaaattgtgtcagctcttgtgtcaggtatctattgatatgtgagaaaacacacagattaatggctaaaaacccactcatgtatttgtttacaattctgcacattggatagggcttggcaggaacaattgtctttgctgtactatgcc

SEQ ID NO: 18153 - DNA, 450 bp, Homo Sapiens
aatttcatataggtttattaattataaaatcaacaaaagtaaacaagcagcaatgccacccgaacttagtaacaagccggccatgtagtacaaatgtggtgtactgaaaaaccaactgctttcaaaaatagtaacactaagaagtgtagctttgatacctctatcttgtcggttaattcatattgtaaaaggactgccaggagaatgacggctatctaaatcaaaccacagtgtcaatatgttgggaacaagtaccctggctacaaggaaggaaaaggaatacagccctataagatgcatacagataagcaagtaagggggaggcactcttgtatttaatttacagctgaaaaattcaaagataacactggtagtaaaaacctacaaaatgactgtgagtcatagaaagtgctgggtttttttgaagagcctgagacggtgtgtatatgt

SEQ ID NO: 18154 - DNA, 706 bp, Homo Sapiens
  misc_feature (94)..(180): n is a, c, g, or t
gcacgagggccttggccacccaaaatgctgggtttataggcgtgagccacgtgcccagctcagttctatctttttaaaatataacctggctatnnnnnnnnnnnnnnnnnnnnnnnnnnnnnnnnnnnnnnnnnnnnnnnnnnnnnnnnnnnnnnnnnnnnnnnnnnnnnnnnnnnnnnncttattgggtggtttgttagggtcttacagcagggatacagtaggtgctcaatactgttacctgataaatgtcatcaaataagtgaagagaaagttccataacttatttgaattttctgcacctggcctcaacctcatgcccaaaaatcttttgtgccaagtcagaattgttcccaaagcacagacaacgacctcagagggtatagggtgccattttttaggcccacatgagcgtctgcaaaacctgtgaaaactcgcatgatcctgaaagcaaaggcctccataaatcctgcacaccgggtacccctcttgcctcccccagtcccaatgctgttggaggtctgaggagttgagaggaggccaccatggccaaagtgacagttcccttggtgggtggtggggacatcacatggggtctcctaaggaatgtaaaaggcctggcttttattccaagtgtggcatggagccattggagatctttgaacagggggaatgacgagatctcatttccattttaaagggctga

SEQ ID NO: 18155 - DNA, 668 bp, Homo Sapiens
  misc_feature (295)..(306): n is a, c, g, or t
atgcgtaatctttgtgatatgtgccaccaccaataagcaaaattgttctcttattcaaaaggttggacacagctgctctagatattttattattaaatatgcaggcaattactgtttaaatgaagatttcctcacagaatgagattaaaagtatatattagtggcttagcattcattttagacaaccattttagagattcaaatcacacacttgcttacagaaattttgttgtcttcaatgtccccattgtggtttctttaccaagcctctactgttcttcacatcaccaagttnnnnnnnnnnnnggggcgggggggcagaatgaaaattgcatggtaggccacaagttcagatcctcatcgacacaagaggtgcctgaagcagtggatgaggcttttctatggatcatgagcagccacataaatgcttaaaagggcctggcagggagcatcagtgggtgatgtggctgggaggctgaatggagagcatttgttcttcagttatctatagaagggcagctgtcactcagcaccagctaagggcttcccatgagggaactggggatcaggtttccaagatctttttatgtaacaggataaagacagagatccagctttttttgggtaattatttctattttaaatacgggtagttgattaaataaaaa

SEQ ID NO: 18156 - DNA, 814 bp, Homo Sapiens
  misc_feature (102)..(113): n is a, c, g, or t
  misc_feature (450)..(473): n is a, c, g, or t
  misc_feature (705)..(751): n is a, c, g, or t
gcacgaggatgaaaaatactgagtccttatactgttcagtagcatttgagacttaggttttgtcttggacggatgaattcatatatgttctgtttccagaannnnnnnnnnnnggtagggggaagggttagatggagggacgatgtcacataattatatatttgcagtttaaagggaaaacattttaagtggaaaaaaaacaaacccaaggtaagttttatccttgtacatgttttaaaattaaccatattgtagactgcataacagattgttgaagatagaaatcaaatttaatgtgctttataaaaactgaaaatacagttttcaatttcatagtgcataaatatgcaggtaccaagaggttctgactagaataattatagtagacagttgttaatgaagattgatgaggaagagaaaaaattagttgagtgaaactccagaatactnnnnnnnnnnnnnnnnnnnnnnnncacttgctatatcacagtgaatcatagaaaaatcttataatatttattatggtcttgtctactcaaaaatagtaaataatctgtgtgtcattctttaacagaaagttaagttataattaatatagctatttattaataattagtaataatgtctgtggcattagccaatagtaacacagaagagataagagagaacataacaaagagtagatacgatatacaaaggatagannnnnnnnnnnnnnnnnnnnnnnnnnnnnnnnnnnnnnnnnnnnnnngattttttaaaacccaagagtttattctttgaaaaagttaatagcctcttagaaggccaatct

SEQ ID NO: 18157 - DNA, 454 bp, Homo Sapiens
caataacctacacattaaagacatgcaacaaattcaaagtagaataaacataaggaggtccaaatggacagatattatatttaatctgtcggtgatgataaaaggaattttgaaagctataacagaaaaacagttcattgcgtaaaataaatcctcactaagattaacactgaacatttcatcagaaaccatggaggccagaagacagtgagatgacatattcaaagtgctgaaaaaataatatgtcaaccaagattcttatatctaagactaaaagctcttagatgagacattaaaagcacaattcagaaaggaaaaagaatgaccaattacaatatatcaaaataaatgtaataacctttgttctgtgtagcacaatgctaatagagtgaaaaacaaagacaccctgtgaaaatatatgcgattgacatttctgtaaaatgactgaaagtat

SEQ ID NO: 18158 - DNA, 659 bp, Homo Sapiens
  misc_feature (124)..(183): n is a, c, g, or t
  misc_feature (242)..(326): n is a, c, g, or t
  misc_feature (347)..(451): n is a, c, g, or t
  misc_feature (483)..(597): n is a, c, g, or t
ccaaaatcaccatcatcaattggtactgaatagaattgtcatcaaatggaattcaaaagaatcatcatcaaatggaaccgaatggaatcctcattgaatggaaatgaaaggagtcatcatctannnnnnnnnnnnnnnnnnnnnnnnnnnnnnnnnnnnnnnnnnnnnnnnnnnnnnnnnnnngattggaatcattgaacggaattgaatcggatcgtcatcgaatgaattgaatgcaatcnnnnnnnnnnnnnnnnnnnnnnnnnnnnnnnnnnnnnnnnnnnnnnnnnnnnnnnnnnnnnnnnnnnnnnnnnnnnnnnnnnnnnctcgtatggaatcaacatcannnnnnnnnnnnnnnnnnnnnnnnnnnnnnnnnnnnnnnnnnnnnnnnnnnnnnnnnnnnnnnnnnnnnnnnnnnnnnnnnnnnnnnnnnnnnnnnnnnnnnnnncaatcatcatcgaatagaatcgaatgcaatcnnnnnnnnnnnnnnnnnnnnnnnnnnnnnnnnnnnnnnnnnnnnnnnnnnnnnnnnnnnnnnnnnnnnnnnnnnnnnnnnnnnnnnnnnnnnnnnnnnnnnnnnnnnnnnnnnnnccctggatcatcatcaatggaatcaaatggaatcatctccaatggaatctatggaatcttga

SEQ ID NO: 18159 - DNA, 840 bp, Homo Sapiens
gcacgagggttacagcctaggtagtctcaaaataggaaattatcttgctggtttttccagctgggcaatttatatttatttagtcttccatttattccatttaaatgttaatttattttgccatttactgttcaaaggaaaaggagagctctattcagaagaccatatcagggatcctgtagcatttctcatatttctgtattttttgccactgtggttctttcttgtttctgtgccatgacccctttgaggaactgaagaatgctcattgtatatatgtttagaataggacaagtaataacaaacttccaaatctcaatggcttaacaaaacagaggtttatttcttgttgacatcacagactactgtgaatcaggtgatcttcctcaatcttacagctgtgcctgtcgaatatgaggttccaagattgtgatacaaagatacggcaggatgtctcaggggatgatttttaggatctaagcttagaagtagcttacatcacttctgctcaaattctgttagctaaaactcactgtcatcttcccaaatattatctgtgtgctctttgctatttcccagacccctgttcatggagtttctgctacattccatctttctagtcaccaaacagctcttggcttctttctttacccatgcataacacacttagtctctctccttagggagaaatcccaaagtcccattccatcattgcacccggccccaatccatgatctccagatgatgtaaaatagtatgtcagtttatatatgacttctgttgatctgaggatcagtgaactaagaagacagtaactgtatccttgttcccaaccacacc

SEQ ID NO: 18160 - DNA, 411 bp, Homo Sapiens
gggcacctttttctttccttgtgtgaatggttgtcctctcccaacttacgggggtgtgcacttggtccctggatcaaagataaaggagggccccgggaacccgaacagggtaccgggggccgcaaccccacccggcgctacggtcaaatttccccaaaagcttgccttttcccgtactgtcggtagggtgtggttgtgctttccatatttcgcgaagtcacattgatgctcttacatattgaacgtattggtcccctgattgctttcttcaatgacgttttttttctttacattcaagaaaaggttaaaaaggaactgcaaaaaatttgggaaaattatgagtgcggccaggatgtcagttttttgaagaaactgattgaaaattatttccacatggatggggctgttcct

SEQ ID NO: 18161 - DNA, 838 bp, Homo Sapiens
  misc_feature (288)..(297): n is a, c, g, or t
gcacgaggcagagctaagaccctgactcaaaataaataaataacattatctcttcaaaatgtatctgaagccctgatagttctactttcaattcttagaaacatataaaaatatatgcatgatagccgtcatatcaatggaagactttctcacctctgtggttgcagttagcttacaaaaacgagcaattttgcttatactgtgttgttcatcttccttgttaattctaaagctctgatagactgagtttgacatttctttctgtaaactggaaattgttttctatgnnnnnnnnnnctctatgatacacagttaaagattggttgaggttgagatgaacttcaatactaagaaaaattgtggtgttcctctgtgtggcctgcaatgaaaagaaggctcatgcttgtgtattgaggtttgacatctttccttctttgtttttagtcatgcaacgtcattcttagatggcctttgaatactatgctaatgactatctaaatagataaatatgtgattggaaaacaaagtcaccttttagttttctacttggaaatattaagagaatccttgtagactggaaacacaccaaaaggctgggtaaagcatgggaggttccagttaatagaaagtaattttaaaattggaaataaaattaaatcaagaccagataatgctatggagacttacttatttaaataactttctgagcatttttatgtgcttagcattacattttccaagtaagagatacacaacaagagtgctattttttcttctttttatcttcctacactcaaagaccagctagctttatcattctgaattttctctcctaaaa

SEQ ID NO: 18162 - DNA, 804 bp, Homo Sapiens
  misc_feature (59)..(72): n is a, c, g, or t
gcacgaggctgggttctcaaaattaggtttaattagattcacctggtaaaaatgcggannnnnnnnnnnnnngcagtcttaagcttcttcaatgaacccagacgtctgttttttattagctttctggtgattctgacacactgcagagtttaagaaccaccattctagaagatggctaaaaatagcctaggctcctaggcttaagtggtcgcgggccaagtcaagcactgttaaaacacctggcggcaggctcagtccgcccacagcaggagagatcctccaaaaaggttaagaggaagccgtcttcaggtcagaagcgctgaattctaatcctctggccaaatgactgtaaccctggcccagttctctagcctcggtttgtccatactatggaattaggaagtatacgatttcttttattcacgcacaactcacacggatgctgcaaggagattagctacgtcaaagcaatggaacgctgcagaaaaaaacgtaagtttactttcagatgcagagccctggtttcccaaccttgaaggcgtgcaagccaagagcaggtcctctgggcaatctgggagacctgggggaaccctgacaaatggaccggccctggagcgggactacctcgcccccttttccccggctttctcccccgcacctccaggccagtgtcagggcctgctccgggcgccacagtcttcagccagtgccgggcatccctgcggtccaggctgggcctgagagggtcagagctgctcgcgaaccggggacacacgtgggcccgggcccgggggcctccgcctg

SEQ ID NO: 18163 - DNA, 692 bp, Homo Sapiens
  misc_feature (61)..(116): n is a, c, g, or t
  misc_feature (138)..(147): n is a, c, g, or t
  misc_feature (454)..(463): n is a, c, g, or t
cggccgctctagaaccattaaagaaatcccccgggctgcaggaattcggcacgaggcgatnnnnnnnnnnnnnnnnnnnnnnnnnnnnnnnnnnnnnnnnnnnnnnnnnnnnnnnntgagccaccacgcccggcctcnnnnnnnnnnagctgccaatctttttgaaggaatattcttacctctactttgtcaccttctactggctccttaactaaaatctgccatttggctctctggttaacagtcccttcctgtaaagtctaaaatcttaattctaaatccacagtttaattcacaagctagtacttgactttttttctgtatttgacatttttgacaacccctactttaaagatttattcccttgacttcttacattttgctcactcctgaaccaccccccaccttttggcctcttcatttattccttaaatgttattcctcagacctccannnnnnnnnnctctcttaatcacaacaccacttctcacgcttgggtaattttaattcagcagttcctaaatccttatctttagccagactcctcaatccatctgcctgttgcacttttcttggttgtcccagagacacctgtgtgtgtcttaaaacattcattctctgcaaaacctactctaatgccctgtgtcccttacttttggtaattttaagaaccattatattctaagtttttc

SEQ ID NO: 18164 - DNA, 493 bp, Homo Sapiens
cattataaaaaataatgttattatttccccattatcatcgtttcttacatttaaatccatacaggatttcttacgtttttcttttacgttgttggggtattaccaaaaaaactgaaaactgcggtaaattactccctttgtttgaatctctctcttcagtacaatctacaccttgatcaaccaccgccggaaaattgtctctatagaagttagtttcaaaatcattcatccataaatctttttcttcaaactccagcaaatgcttctagttccgatttttttacattgaactttaatgtcattttagtgcttatttcatatgcagttgctttttggaaaccattttctccaaaaactttatgcaatattttaaatccttttggattctttaaaacgttttctaattgtaataacgggacagctcaaatacaaaattaactctattttctgccaaaaactcacaatttgctctttgaatgctgcctattatttc

SEQ ID NO: 18165 - DNA, 424 bp, Homo Sapiens
gcacgagggttcttttaataaacacacttgcatagttacattacaattttgtaaaaataaaaaccgattatctcatgccaagcgtgcccagcatttgcgcagtctcaatacctttaatactatagttttcaagacacacaaaattttaaggcaaaaacagcactttgcaacaatttaataagttattacattacagtaccatcaccgtagcagtgaataatgccattttaggcaacagtgtttccgtatttccattatacattctgtttacaggaattcatcagttggtaaaagtcattctaagaaaacttgtcaaataaagccttgcattggaattggcatttctctacttttccttcccccagtttctttcctttaaactacagtattcatattttaaaatgttttaacttattttaaaact

SEQ ID NO: 18166 - DNA, 837 bp, Homo Sapiens
  misc_feature (682)..(692): n is a, c, g, or t
gcacgaggctagtttcatccccacttttacatgcttcagtggctttcccagtgacttggcatggaacacgtcctcagttgccatacattccagctaactcttacccaacctttctttgttcacacagtttccttttccttcctcattgacccatccgcatctctgtttatccaagacttctctgtgatagctgacccttagtctttctctcccctattcctccagactagatcctgtctccttcctgcagccccaacacagccttcagttcatatcttttgcatgatgcttagcaccttctatccctaaggacaacttactcatttgagatttctggcagggtaccttgcatgcagtggacactcagtatttgctgaattaaattccttcctatggatcccttctgattttttttaagtgcctctaatacacatatcattctagggctcatgccacttttaatgtcattttctaaaggaaaatcttatctatgatattttcccttataagagatagttgttttgagtagggttttttaaaagataaaggtagtaggaaattttttaaagcctaaatatcaaattcctttccctttggagttgggggaaggaatgaagggggagcaacttgctctttcatatgagttggtcatagcatgtaagaaccaatcttgaaatatcgnnnnnnnnnnnaatggcttataatgtatttctagaaatactttgtacttaaaatgataacagtttgtatctttttgtccatataaagatactttataaataaaaaaattagcattgtaaataatgttaatatgtatttatacaaaataaatttact

SEQ ID NO: 18167 - DNA, 270 bp, Homo Sapiens
attaaagatcccccgggctgcaggtccttgggggaggacaaccatggaaacggggcccgccgcgggcgtgtgcgccgggtcgctgggcacggccgtcccagccaatgcgcgcgaggtgaggtccgctccttggcggcggaccaacagctctgggctggcgccgaccaagccgtcgcacaagtagacccagcactcgggataggacgccgcgagcgcgtccaccagagcgatcgggtcgaccgggtggtcgaagtcggcgtgttcactacg

SEQ ID NO: 18168 - DNA, 562 bp, Homo Sapiens
  misc_feature (75)..(92): n is a, c, g, or t
  misc_feature (128)..(257): n is a, c, g, or t
  misc_feature (297)..(310): n is a, c, g, or t
  misc_feature (341)..(385): n is a, c, g, or t
  misc_feature (395)..(403): n is a, c, g, or t
ccgaattaactcaaaagggaactcaaaaaaaagaaagaatttttaacggggggcccaaatttttaaacaaacccnnnnnnnnnnnnnnnnnnttggggtgggggcccccatttttttccctatatttnnnnnnnnnnnnnnnnnnnnnnnnnnnnnnnnnnnnnnnnnnnnnnnnnnnnnnnnnnnnnnnnnnnnnnnnnnnnnnnnnnnnnnnnnnnnnnnnnnnnnnnnnnnnnnnnnnnnnnnnnnnnnnnnnngggttttttcaaaggctccccaacaagggggttttttttnnnnnnnnnnnnnnaaatttaaaaaaattctgcgggttttttacnnnnnnnnnnnnnnnnnnnnnnnnnnnnnnnnnnnnnnnnnnnnngggggggccnnnnnnnnnagggattttgttttccccctcttcttgtgctacccacaaaaaaatatttttccaaaaataaggggggtaacgtctttcaaaaaacccgatactctttctaagggaaccctaacaggggttgtgttggaagaaaattgttgtcgaattttcttctaagag

SEQ ID NO: 18169 - DNA, 845 bp, Homo Sapiens
gcacgaggtggcctttggcagtttgaaccatgagctctttcttaatattggctgtaaatatatttgtcctactgcaagaaattgttagtcttaaataccagaatttttgtttagaaaaagaaactgagtagccactttaaaataaaatacaatgtgttctagtataccaaattgtatttttgtcttagaaatatccaaattgatacagatgtcaataacatctctgtgatgtgtatgtcaataaacatctcccagaatacacccattgccttagtgtaggttaatctctggaagtcactctgccatacttagaattaatcattctcaactgtaaagagcacattcagctcagtgactaacatctcattcctaagacctcaataactactaaggaattaagatatgtgcctctgttcttagaagtcaggttcagttcagtcccacaaacactagggcttcactggagtctgggttcagggtaggtagcaagaatcataatcataattgccccttagaattctcttgctctgcactgtgtgtgtaactcctaagaaagatgactactctttatttcaggctaattagaaaaggcaacatatctgaggtgtaaataataaataggattttatgtctactaagtagggtaataacagtccttttctaccattgatttatcagcgtatatatcttatgacttcagagtatatgcagagaaatggcagtagcggatgagagaattttagtatccccgttatgaaaaatacattgaaaaaatggagaaattgggaagaatcttagtgactaaggagagggagcagctagctacaaaaggatgcaagaaaagg

SEQ ID NO: 18170 - DNA, 778 bp, Homo Sapiens
gcacgaggatgccccaaagttgcacttaattttcatcactagggtcatagtaagcctctaaacaaacaaaaatgctggaagaagataaaaatatgaaattattgggctataattgtcattatacatgacacaatctttcaaatactatctcaggggaagtaactataagtaccctatcacaaggtagcacaaaaccacaagaattaggaagtcaagaaagaagagggcaaagtagatcagctcttgtaaaataaaaggaaccatatgaaggctaaaaaagaaaatcaagaatttatatagaaaaaatggaccagaagtcaagactcctggttctgatcacataaccttgggaaagctacctaactgttcagagtctatatatgctacagaatggagatgatacacatcctgcctgtctcataaggcttctctgcatatcaaatagggtcatatatgttaaggcactatgaaaattgtaaaacagcacaaatgtaaggtaatagtattattgcttacgttgtccctcaccttctaaagagattaagtatgtggtagtttaacgggaagcaaactttcctccctattagttaatgccaaagctattggtcattttgaactccaggggaggaaacaaaaacaaaaaacacctagcaaagacaagtcaaccctcaatctctggtctcagttttctaatgagaaattcctttatatctatttcatctttttctctaatattcaagagaccaaactaaaaggctcttttgtattcttacttttg

SEQ ID NO: 18171 - DNA, 281 bp, Homo Sapiens
gcacgagggttacaattgctagcctttcacaaagtttgcattgtcttaatgtagaaggatactgtgatctaagaattcacaattttaaaaagtggaacctaaatagggtttcctaattgccatgaagttatttgtatcttagatgaattatatttacaacattgtaaatgtcagtgggtgatccaaaataaattgttaaagttattaaaatgtacatttaagtaggtttcagtttgactagaaataattggcaagaaggcaagaactagtcttctagagca

SEQ ID NO: 18172 - DNA, 865 bp, Homo Sapiens
ggaattcggcacgagggtccctttaataaatccaggatcagggagagcctctctgaggaggggataatgaagacaaggtctgtagaatgaagaggagcctgatgcaccaagggcagtagaaagagacttctgagcaagaggaactgcaagtgcaaaggccctgatgctagagagagcttgaggggttgcaggaaaagagtttttatggttgtgaacaagaaatagaaggaagaacagagagtggcatgagataaaatttgaaggatcccagatcgttcaggaccttttcggccaggtaaggagttgggattttatcctaaatatgataggaatccattgaatggttttaataaattcattcaaagtttaaagaatcaatctggctcctatgggcagcagaaaaagcagaagtgagaagatcaatccatgggagagataatattggtttgggccaaggtgggtggtgatggagagggagtaaagtgggtgtgtattcgaaatattatagaagaagacttgctactgaaagtgagaggaaaagatgagggaaaattaaggatgactcttagtttcaataagtgaccagatgctagtgacatttatggaactaaggaagtactgtgatggagaaacttggaggggagagaataaagagttcagttatggacatacttatttcaagacatcctagtggagatgtcaaatagctaatatttgaactcacagaggagaggatggggctgctcttacaaatttgaggggtcatccgggaaatagatgatattgtagacaccagattgaatgaaatctaggaacacagtggaaatgagaattcccagaaaccagttctgaggactatgtaaaa

SEQ ID NO: 18173 - DNA, 353 bp, Homo Sapiens
aagcattagctagcccctaaaaaactacacttgtgagccattataaataccgaaatcatcaagaaaaatgtgaaaaacataaccttaaatatactgcataaaggacacttttttttacagtgtgagagctaaaggccttgtttaacctcacctaggaatgtcattgggtgactcaaattttttgccattctgtgaatttccatgaatgactatgaaagtgtcatgaatgttgattttggggttacaaataataagaaatgaaatctttaggataatgaccctgggctatgtaagtttaaagactaatctttctacttcctataggatcataaagaattatttttcaaatcttg

SEQ ID NO: 18174 - DNA, 791 bp, Homo Sapiens
  misc_feature (536)..(555): n is a, c, g, or t
gcacgagggcactgccctcctctgcttctctagcctaggagggtagcgacttcctgtgtttaaaagcctctgggttgcttcattgttccctactggcttccagatactcccaccatctgatgacacatcctgtttaaataagcagcatggatttttatatcctggttcatgactgatgctgctacctcaagatgtccctggtcatctctgaacctcctcagggctgccaccctgcacctgtccacaagcggccatgtgtgaactcccccctgtggccaccatgccggcctcctgtgctgctgtgttctctgtgactagagcatttgtcactcagctgggcatagctgtaccctgttgaggaagaccctgctgttagtcccagccctgaggggagggatgacgaatgcttcgctgctctgtttgagtgcaacatgggcctctcaatttcccactgcaaaaaaacagtgttggatgcaacctttcataaggatttagagatagtttgcagatcacagaaaataagaacagagcacagnnnnnnnnnnnnnnnnnnnnccccactgtgcctatgcttagaactcaatttcattcattccgcaaatatttattgagcactgaccacatactatggagcttttctaggtgtgggtgattagtgttggagaaatcagtcaataaatatgaaaacacaccacaaaatatgggaataattcatgcaattgctctggtcacaattgttctgaagaaactaaaactgaggataaaagggaaagaccagtggggactgggga

SEQ ID NO: 18175 - DNA, 384 bp, Homo Sapiens
ttgtgagccaccatgcctagccctgtgaacccagtcttttagactttctaccacggtatttgggtaagtccagagctctgtccccatcttctgcaagaacatcttgaaagctgaagttatcaaatggatttttctgggagttccattgctgagttcctctgattcatgtctcaggaagctggagtctagacgtggcggggcctgtgggaggtggccctccccttttcagagtggatctgtgcagccatctgccatcacccattcctgtgggggaaaacacagattttcctgtgttaaaaaatctctgagacaagactttggcaggatctgaacagactggcgaagtggctccaggatttcctggaaaaggatgagaagggggaa

SEQ ID NO: 18176 - DNA, 753 bp, Homo Sapiens
gcacgaggtttttctcccttttttttaatgggaatcagctttattttacaacagagcttcactttacccctccagcagttaatggattctgggtatttattaaaaactttacatttaactcaaagacagttaattaccaccagcccagctctggcaaagactgttggctttggttatctccagcatcattcaaatacactaccaccccaatcccagcccaatctttggccttggggaaaaaaacatgaactacgatgacaggacaagcagtaaaccttctccagtactatcaaagtaccctttctggggttgcatcccacaaaaacccatttggggcccaatatcaatgtacacagagctaaaattccaggtgccactttgtattaagaaaagccaaaattttggtcaggccctgggaaccttgaaaagtcatcagtgtaactacaccctagagattattaacccctcacatgattacataagctaggcagttacccagactgtgtcatttagaaaacctgtatggttttcatggaaaccatccctagataaggacacttcaaaggatacacagtctaagtactgccaaggtaagcccactaactatgatcatattttcccttgggaagactgcactattcctcagacatctaggtatcttttgggttccccagtacgaaacacctctgggatgcttgttggtatacactaaccctaattacctccaatgggaaacacaatggctgggggggg

SEQ ID NO: 18177 - DNA, 794 bp, Homo Sapiens
gcacgaggcctcaccttttaccacttgctgatcaagcccgggagactaccctttttgacctctctttggtgatcctgaccaccgtagaaatttgcagtcatgacatttcattgccctacatactgcaaaatgtcaaagtgctgagctgtggtaaattgctctggggtggaaggcgctgttactgacaacacgaagcagctagcgggtcaggaggggaaatggagcttgcagaaactaatttagccacatttaaaatttagcccctggtaaggttcccagtatgactgacgaaggtgcagggctcctgtctgtggaacctggctggttagtcttctctggttgcagccctagaatcaggatcaagggtgctgtttagagcggtttctgtagaatgtagcctttcagataagggaagtgatgcttggtcaatccacaaagttgtcttcagtttttccaactgcaaccattgttctttgagtatgttactgatgcttctaacaactggaaccactaatatgtaaaagaagaaaggcactagaaataagaaagtctaactagcttatttctcaaaggcttagtttagactactttgtttctcaagggtgggacctcatttctttcaggtccagagggccatggatatatatttatttctgtgggtgaaatttcaataatgttctgtcttagaacattacaaatatgtgccacttgttttaaaaaggggaaaggtgcaaatgcctcttgaggtcttaatgatgtcttaaactttgcactgagagactttgataatatta

SEQ ID NO: 18178 - DNA, 937 bp, Homo Sapiens
  misc_feature (765)..(785): n is a, c, g, or t
  misc_feature (791)..(849): n is a, c, g, or t
gcacgaggattgtgccaaaatatacaaaacattaaattgtcccttcacttatatctcaccccctgccttcatatctctgtctttttgttctaacatctgagaaatttccttgacttttccattcttctagtgtgttttttatgtcaataactaataatttctaatggtttcttctgttttctgattgctcctttttaatagaaatgtatccttggttatgaatatcatttgagtattttaattacaattgctttgtttcctaaattatttcagtgtttctgatgatttatcttggtctctcttgttggtggttctctcttgttgctggttctcttcattggaagagaacagtcctaatttatctattcacctgtaagaaggagagcctgagtagctaatgtggctttcttttgtcttccttttgttgtaaactcttcagattgagattctgcaaggggtaagcaggcagggctgtgggatgataggctttgctctcaggtgagcaaggtaagggttggctatcaggctaggtatccttccaagcaaatgaatgaaaaggactttattcagggacaccattgtccaccctagaaaccttagttttgccaattagttcatgtggagttggatggatgattcaaacagatcaagtttgaaaatacaatagatacctttggaatttttccagtgttgatgctttgttttaagttagtgagccacaaactatttgtattcttttaatggaattgaaaacattctctacannnnnnnnnnnnnnnnnnnnntgacannnnnnnnnnnnnnnnnnnnnnnnnnnnnnnnnnnnnnnnnnnnnnnnnnnnnnnnnnntgctatccggggtccagtgattcttctgctcagcctccccagtagctgggaattacaggctcccaccaccacacctggctaatttttg

SEQ ID NO: 18179 - DNA, 852 bp, Homo Sapiens
  misc_feature (552)..(567): n is a, c, g, or t
gcacgaggagaagtagtcagacaatatttgtatcctaagtgagatatggaaaattactctgtatactaaatgtcaggcaatgaaaatgtaagtttttgtgtagaaaacccattaagaagatgtgtttttctttctgaattagtttatttttccatcacataccaaaatataaaaatcagcctcacatttttcagcaagtttagcttatagccttgataaattcctctgtgcttctgagcagcatccttctgcctctgcttagcagctctgcatttggtggattgctgttgtgagtcattcatccagcactgggccttttaagctgaagattcacccagtgtctaaagttgtccttttcttatagctagctttcaagcatctttcctcctaaataaatatgtgacttgagaaaaaggtaataatgattttgtcagaattctttgaatttatatttactagctacttaaccataaactgctgtccagattgttaatttcatttatatttattttaattaatttgtcatgaatatggacaaagccttttctgggnnnnnnnnnnnnnnnnatgtttgttttttaagtcgtcattattcattcgtattctttttctgtgtaatgtaatcatataaagttactttggacagagacccagttaattttctcttttgataggatacatggtttagataaggtataaagtgtccctttttattctagaggcttttcctttaattcagagattagtggagataataacgtcagtcaaggctaatgtggtacctgggaacttgctatgggaggtgggacattctggtttcagtcttacatgatattgtttcattggtgttga

SEQ ID NO: 18180 - DNA, 809 bp, Homo Sapiens
  misc_feature (321)..(331): n is a, c, g, or t
ccgcaccagggcagcatgtacttgacaccttattacccagtccccttgtaaaatttggaatggagcgtttaagctgagtgttagcattaggttagcagggaaagtaaaccccccaaaaattgggtggccgtaaggtgggaggtgaccctggagagtttcttctggtcgaggagggacccgcccatgtcccccgcagcattctggatgtcgaggagggtgcgtgtgatggcgtcacatttatctgaagcacactgattgattttcacaaggtggcaagtttgatcaaattgaccgcttttcatgagacaaccagatgctgtnnnnnnnnnnncagcactgggatgtgttgaggagggggcagtttgctgtgctctgttttgtttgttgttttttctgggggtcgcataatgtccgcacacattagggaggggagaaagggatcagtaccaaacggaacaacctcttttttctacattgtccatacccggacatgtgaggctctattattaacaggtggtgagaaaaattctgtttttattcgctttctggtaacttctgtaggccctggctcaaggactagcatttcgtctcatgtacatctttttcttaagtgttctttgccatttctggaattgtcctggtttttccttagctcataggtcctagatgcgaaatatagtatttaaggcatccgctccagctcagatggctttgctccagaaaaacattgataactcagtttgaagcaccagcatgtgtaatatggctcatacaatataataaatggctaatgttaagctttaaaaaag

SEQ ID NO: 18181 - DNA, 679 bp, Homo Sapiens
  misc_feature (42)..(253): n is a, c, g, or t
gcacgaggaaaagacttgatataattcctattattcccagcnnnnnnnnnnnnnnnnnnnnnnnnnnnnnnnnnnnnnnnnnnnnnnnnnnnnnnnnnnnnnnnnnnnnnnnnnnnnnnnnnnnnnnnnnnnnnnnnnnnnnnnnnnnnnnnnnnnnnnnnnnnnnnnnnnnnnnnnnnnnnnnnnnnnnnnnnnnnnnnnnnnnnnnnnnnnnnnnnnnnnnnnnnnnnnnnnnnnnnnnnnnnnnnnnnnnactcttactgattttagagttgagtgacaactcaatagggacagttcaatagggaaaagaatcatcttcaccaacatccagatgtcctcctgtgaaagagtgaagttggaccccttccccataccataaacaaaaaattaactcgaatcaccatctaaatgtataaggtaaactataaaactcttagaagaaaatacttgagtcaagtgtgactttggattaggcagtggtttcttagatgttgacaccaaaagcacacgtggcaaaagaaaaagtaaagtcaacaccatcaaagatgaaagtgttcgtgcttcagggaacactatcaagaaagtgaaaagacaacccaagaatgggatagtattttgcaaatcacatatctgttaagaatcttgtatctattctagctataggactcttacacct

SEQ ID NO: 18182 - DNA, 931 bp, Homo Sapiens
ggcggccgctctagaacccattaaaaatgcccccgggctgcaggaattcggcacgaggaccaccccttcctttatgcaggtcctgccaactttttcctctctgtgactgctgtttttctaatcttcattattgacaaacatcccaccccctctgatgggcatatttttactcagatgtgttaaaatctttagtctttctctggcctaggagttggattatcttttaaaggtaactgtattttttttgttatgatccctgaatgtgaaaccttaataggtcaccagagatttgaaatgaatactatacttatctaatataaatcttggaagatacagttagtgggtagcttctctattatttaaataatttgaggcatctgtttttttagatttggtcgtttttccaaaaaagaaagactgattgaaaagagaaagggaaagaataccaacattgactagagatccatcaggcactatatgaggcaccttcgatacctcttaatttgcacctcatgaccactctgtgatatgttttggtattttcattttacagatgaggaaagacccagagaaggtaggagaaagttgctgaaggacacatatagctaaagtggtagaatcagaattcaagcccccatatgtctgcttccagggctcatattctacttcctttatttattaccatctttttaagaaagtgaaggaaatgaccccatggataaggcattcaagaggtgactacatctgctgatgttatacacataccagtcatttgtgccccgcagcaatggacactgtagtctgcggctcttgtcagtgcttctcagactgtctggggtgatgggaccagtttccctctagttcatcactagtaatacctttgtagataccctaaattattagaaaaatgaaataattctttgaaagaaaa

SEQ ID NO: 18183 - DNA, 312 bp, Homo Sapiens
  misc_feature (95)..(156): n is a, c, g, or t
  misc_feature (208)..(249): n is a, c, g, or t
agccggaagatttccgtttcgcttcccgcggtttcgtgtaaattcccccttccccctggggaaatgcctaccttgttttggggggtttaggggtnnnnnnnnnnnnnnnnnnnnnnnnnnnnnnnnnnnnnnnnnnnnnnnnnnnnnnnnnnnnnnatttggagggaatgggaggaagtgggaatagggaggtgggaggtggattttnnnnnnnnnnnnnnnnnnnnnnnnnnnnnnnnnnnnnnnnnnaatatgtgtctgaataaagttgtttttgaaaataaaaattgtttggccttttgggtgtaaaaa

SEQ ID NO: 18184 - DNA, 368 bp, Homo Sapiens
  misc_feature (114)..(132): n is a, c, g, or t
tgagccaccgcgcccagctgccttatttctttttcttgctgtaattcacctggctacaacttccagtaaaatattgaatagaagtagtaagggtatcaagttcttttgctctgnnnnnnnnnnnnnnnnnnntaagtagtagtgagggtggacatgtttgtcttgttcctcatcttaatcctcaaaaatcattttcttgtcaccattaagtatggtgttggctgtgggtttatcattagtgtctgtttaagagccaagcattttaattttgatgaagcccagtttgtcagttttttcttgtgtgattcatgcttttgtctcctcagaaatctgcctacccaaagattacaaagatttttcttctgttg

SEQ ID NO: 18185 - DNA, 430 bp, Homo Sapiens
gcacgaggcatggtttccccaagtaggtagctgctttagcagttaaagcccaaatgtctgttctgttgatcagaggtctctgaatttctgaagtggtgtttcgtttctggtgactgagttaatcctttacaatccctcttgtaaagtgtgctaatagaaagaatccacctttcaaagctgcagaaccagaccgtgccctaaattgaccaacgtaactgatgtgcctcaggaagtctcttgccagctgtccctgtgaagaccccctcctcccccccagctgctgccttgcacactgaagcatctcagactgtgcaaagccgtgtagtcatcaagacagtaaatcccagggcttggttaagtgctgtgtgataacttgtttggatgagacttaacttaaaaccacttacaataaacttgggaaactaccgtc

SEQ ID NO: 18186 - DNA, 809 bp, Homo Sapiens
  misc_feature (95)..(344): n is a, c, g, or t
gcacgaggggaagtgttccaaaatggagaatagcatttgtatttactaatggtggcaatataaattggtaccactttttgtgaggtagcaaattnnnnnnnnnnnnnnnnnnnnnnnnnnnnnnnnnnnnnnnnnnnnnnnnnnnnnnnnnnnnnnnnnnnnnnnnnnnnnnnnnnnnnnnnnnnnnnnnnnnnnnnnnnnnnnnnnnnnnnnnnnnnnnnnnnnnnnnnnnnnnnnnnnnnnnnnnnnnnnnnnnnnnnnnnnnnnnnnnnnnnnnnnnnnnnnnnnnnnnnnnnnnnnnnnnnnnnnnnnnnnnnnnnnnnnnnnnnnnnnnnnnnnnnnnnactggaaatcagtttggcaataagtaggaagaacttagataccattggtgtcacttctgggactctataccctaaaaattatgcacaaagtagtttcctaataacacaggatctacaagcacaggctttggaatgagtcaagtaaaggtaaacagcatgtttaaaatgtttctccaaagcaagtataacataaatccataaatttacagtccaaattaaatatgcatttgagtagacttgagggcagctgtaacacttccataagcccttagagatactttgagaaataggatacagggctgactgttccttagttctgatcctgtgtgatatccttactttctcatttataagtggacatccaaaggtgatacagctggaaaaggatcttcatccagacaaagagaaacaaagtcgataggaaagtgataaaaggcatccagcaaagtgaaagatgccaaatga

SEQ ID NO: 18187 - DNA, 413 bp, Homo Sapiens
gcacgaggctcttctgcccttgctctgcagcttctttcctgttgattgggcattcagggaaggagtttaaaaagtgacactcatggctcatgacaaatgagatactttgggagtgtggaaacatggcttgatatttgccttcagatatttttgcttatataagttctaaatggaagtgataagttcattcttagggtccaagttgaaaggcagtggttcttttgtgaacaccactaactacattcgaaaagcctctccaattccacattccaagtctataacagctttggaaatgagtaacaatgacctctcatgtagtagattaaagcagaggcctttgccatatgattgttttttggcttaaatgtttgcttgccctgtaactgtaatactttggttaccagaatcacttg

SEQ ID NO: 18188 - DNA, 251 bp, Homo Sapiens
gcacgaggcctaaatccaatgactgacatggtaaagattcaccacttctagcatactgggcactttttatttttgacttgattacattaactttttgaaaactattcagtgatttattcagccaatcttatgaggtacatctgagttgttctagatgctagaggatagtataacaggaaaaagcccctgctctcatggtgagacagataataagtatgtaatacaacttttcaaatagtagtatgaatggt

SEQ ID NO: 18189 - DNA, 925 bp, Homo Sapiens
gcacgaggcatttcctatttaaaaactctttatatggaatgtatcatgtgaagtacacaatcataggaaaagatggactgagaattaaagacctggaacaaagtacaaagcatcaaaatgaagatctccagtaactggacaaacagtgccaattatttttttcctaaactgtgctgggcacacaataagcatccaattccacttattataagatgatagctttaaagaggtgtatgtgaaaagaagacaactacttttttaaggattatcatacaaagaacagaactgaagagaaaaaaattatagatttgaacttaagacttagcttgaaaatttttgttctttccacatgtgcattaatgtaataggctgtttgaacctttcgcatggaccccccaatgcctctagcatcataatgaatttttatctctacatccaaaggatctaccaacaatttaaggtatggagataaaagtcagggatctccagggatatactgccctgcttctctgattatttagctggaagagaggcagtgggaagatgcttgaatggaaaatgagctagaatccttccttcaatttgatatgttaatgccataaatcagagttgcacaggcacctgcttagtggatagcttactggagcttgtgtgacatcatatatatttccttctttgcatatctctaaacaattttttactttaattatgtcaataaacatcttttgaaagaaagactcagatttgtagtttttcatttttgctagcagtgaagcctaatgctttcttagcagcaatgagcaacttcatttaaactgattctctgactaatgaaagaaaaacaacaatagtactctactcagtccttcagagtcaacctcacaacagttggagctagtacaccgggttagggaatatgggagaa

SEQ ID NO: 18190 - DNA, 793 bp, Homo Sapiens
  misc_feature (336)..(483): n is a, c, g, or t
gcacgaggctctccctttaaaagtagtgaggtgagagtgtctttgtcaggtgtcaccctcatgacaatgttcagagacatgtctgctgccccagacctgctcagtcacctctgtgtgcctcactctccactgcgtgctgttcatgtctgcattgggaggtgactggaatagaagatggccttttaatggatatggacagcctgcattccctgcaatgctgtttgacctgtatagaccctgctgtatccaggcaggcagggggcagtcatctagcagagtggacaagagcacagaccagccaaacttctctatcatttctaacgtggcccctcgtgnnnnnnnnnnnnnnnnnnnnnnnnnnnnnnnnnnnnnnnnnnnnnnnnnnnnnnnnnnnnnnnnnnnnnnnnnnnnnnnnnnnnnnnnnnnnnnnnnnnnnnnnnnnnnnnnnnnnnnnnnnnnnnnnnnnnnnnnnnnnnnnnnnnnacagttgcccatgaggacatctcaggcttttcctggatgtggcctcgcattggcttctggtctgggtagccccagactttgcacattagccctgagatgtgaaagttgtaatgtagcattcctgggccagtcattgtctcattggatctggagtggggaagcctccagggtggtcagagttaccctttgaactaggggtcactgggagatggctagagatttgtctgacacttcactgaatagaaaggggcctttgtctaagtgtcatgctgaagctgcatccctttttcctcctggggagccttcaaat

SEQ ID NO: 18191 - DNA, 405 bp, Homo Sapiens
taatctttataaacttggctgcaaattctaccatgctattaattatacatctcggaacaaaataaatctcaagcattctaaaattcagttacccaattttttaagtgaaaaagtaagagcacataattttttggacatattcatccttcattaatataaatatatgtcagtctgaaacataaaaatgtttaatttgaaaaggaaataattgcatttcctctaaatttacatctgcgaagaatgaatcaaaagccagggtatggcctggcagaaatgtatttaatattcagtttttaaaaaagtatcatggactacaggtaaagcaaatttgacagactaaatatcatagtttggaggattacagaaatgtaaaactgttggcatagactgtagcctgaaagaaag

SEQ ID NO: 18192 - DNA, 832 bp, Homo Sapiens
gcacgaggctcaagcatttatcctttgtgttacagataatccacttctactcttttacttattttaaagtgtacaattaaactatgattgactatagtctccttgttgtgctgtcacatactaggtcttattcattccttctatttttttgtacccattaactatccccacctccccactgcagttcccagcctctggtaaccatccttctactctgtttccatgagctcaattgttttgatttttagatcccacaaataagtgagaacacgtgatgtttgtgtttctgtgcctggcttatttcacttaatataatgacctccagtttgatccacgttgtttcaaatgacaaaatctcattctttttttatggctgaatggtgcgccattgtgtttaagtaccatgttttctttatccattcgtctgttgatggacacttagattgcttccaaaccttggctattgtgaacagtgctgcaccaaacataggagtgcaaatatctctttcataaactgatgtcctttcttttgggtatatactcagctgtgggattgctggatcacatggtagctctgtttttagtttttttgaggaacctacaaactgttctccatagtggttgtactaatttacactcatgagatatttttaatggttacattattttagtatacagattgtcatagttagaaataacttaaaatttgcatttctaaaagctatcttttaaaatgtattgaactggcttgagttggtttgaaatgaccattcccttcttactaataagcttgtgcagattcattcacctttcttttctctttctgtttttc

SEQ ID NO: 18193 - DNA, 560 bp, Homo Sapiens
  misc_feature (137)..(253): n is a, c, g, or t
gcacgaggccgagctgttcctgttcgtccatcttggctgtaatcccaggttcatcaaaataagatatgatcaaggtacaaaagagttaaagaagctatttattttaatgtttccttggagagcacacttgttattannnnnnnnnnnnnnnnnnnnnnnnnnnnnnnnnnnnnnnnnnnnnnnnnnnnnnnnnnnnnnnnnnnnnnnnnnnnnnnnnnnnnnnnnnnnnnnnnnnnnnnnnnnnnnnnnnnnnagtgagctcaagatgtctttgttgaaacagaacctcccgaagttacagtattggttttggggctccacacagagaacacatcacggaagctataattgagggagacaaagctgtcaggacgacaccaagagagttagaaagcccaagagtggagcattcttcaccatgattccacctgacacttggctgaaagcattttgcactaatttgctttgtgcccgttcagacaatctaaaaagaaaggatggggggacaacaagtgtctattacacagaataaacagcctctggcaaatgaacaatgaatc

SEQ ID NO: 18194 - DNA, 436 bp, Homo Sapiens
gcacgaggtttaaagacttgaattaaggtctctgacaatataatagtgctagaatgtatttagcaaattaaaaatacgagttgaaaattaactcaaaataataacagcaatttttgttaattctgttactaaacaaatgtgggctactgaatgtaactgaaaaactacaaatataaactagtcatatattatagaaataactgactcataatatacaaacacctaaattatttcacctatgtaaaaaatttgttttattcatgaataagatatcctaaaaataacatatgcttaaagtccaaaagagattttttctaaactcataaatcataaaattttaaaaaagcattttggcctaaaatgctccattcttggtctcaacccagataagtatttcggaaaactggaagaaaaactgtatttcatagttgtttca

SEQ ID NO: 18195 - DNA, 696 bp, Homo Sapiens
cgcacgaggcttaatgattgtttcttatgtgcctccatcccttctctgctatttctttccccaatatcccaatgaaatgagcttcacgagagtagttttgcttggatgacccaaaggagttaagtactatttccaaggttttgtagccactgaattgttcttacaaggcatcgtgctgcaaagcaaggactggcctaaaagacctgagctgatcgctgtactaatagccagctgagcagctctgtgcaaatcatattatatttacaggatagactatatatagggcgttgaattaattgccatggtttttatcattcttatgttctaattttttgacctgatgtgctattaatacagtatcttcccttttctatcagtgtgagtttgttattgtaaatggtgttttacagggactgaacatttagcttttcttttttagttgcttactcttttagaggagactgtgatggcaagagggagtagacatggcaaaatacataaggcatatctgtctatatttctttggcattgattttcatcaagggacatgactcttaaagatggctgtcccttctaatggctggactttgcggctgtagtggccagaatcataaagacgtgtaaagaggatctttcggtacttctaacattgaatgtctggctatgcagtttctgtgattgatattccgttctgtg

SEQ ID NO: 18196 - DNA, 484 bp, Homo Sapiens
cctgtaagaataattcatcagacagcagttggaatattgataagaaagcggaaatcaaattacaagaaagggaaagagaaaggaagagggagtgggacccagagagctggcgggaggcagcgaaggggaaagcttcagtgcacgcatagctcctgcacagcggctcctgcagccccccaggatgcgcctgagctgaggctgcttgtgggcaggccctagagagaggcaaactttgactccaggcacgcagcaggtttaactcctcactggctgggttctgggagctctgggcacacaggataggcaccaagaactaacacatcctggagctgcccggagttccgctcctgcgggcttagcaggaaagggtgcctaaggtgagtgcccacttgcgtccgatcctctgggggcgatgcagggtcggggcgcctcagtgtgtctcgctgcttgttctggttgcagtcgggaaatgtgggactttggg

SEQ ID NO: 18197 - DNA, 736 bp, Homo Sapiens
  misc_feature (606)..(675): n is a, c, g, or t
gcacgaggagcaaatagagttggaccccggtttgctggttgtttctttctggtgatttaaagatctaaaacaatacaaatcagaaatctaagagatgacagttaacaattttggtgtagggtaagccaccctaccgcaacaagatactaaaaacctgtgaaaaaacagacaaaccttttttaacttaatatataaaagttaaacacttctttataccaaagtatactataaagtctgtaaatgtttgactgtctgtaatatcaaggtgcacttaaacatcgacaagaaaaaagacaacacattggaaaaatgggtagagtctaaaaaattaacaattcatagaagaacaactccaatgaccactaatcataagtaaagatacttaaatatgtttttttcagagtccagaggttaaatgtcatttcttcaaagaggactttcctgatcactcaatctagaatagctggcttctattattctcccttgtaataccctctgctctctttcatagcacttaaacaatttgtaattatatactcatgtatttatttaatgtctgtctgtctatggctagtccaaagaaaaggaacgtatatttttttcaannnnnnnnnnnnnnnnnnnnnnnnnnnnnnnnnnnnnnnnnnnnnnnnnnnnnnnnnnnnnnnnnnnnnntcaaaaagaaaagatgctcaaaatagtaatcagggaatgcaatttaaaatagtattgaggg

SEQ ID NO: 18198 - DNA, 835 bp, Homo Sapiens
  misc_feature (50)..(159): n is a, c, g, or t
gctagcttgccttctgtatgtgagaacacagcaagaaagccctagtcaannnnnnnnnnnnnnnnnnnnnnnnnnnnnnnnnnnnnnnnnnnnnnnnnnnnnnnnnnnnnnnnnnnnnnnnnnnnnnnnnnnnnnnnnnnnnnnnnnnnnnnnnnnnnnatgaagataccatacctgaacacctgaacattcttcacaaggtagtaaatgcactgctttattctggtctcagtattgtgtgcttaataaggaaatgagaaagggtggatcagggcataggatgaacaagttactgctagacctctcacaatgccactaatggataagattgtattttcatcattcttgtctcttcggaagctaacaccatgctataataggcactaaatagatgtctaaaaacaccttaagtatttgtctagaaatctggtgcattgttcagaaagaaccaaaattcaaaataatttcaaagggcctaaagcactagttaatcaaaattcattagtttttaatggtactaccactctcaaatttaaaatgtcatcttacgttcctcttcctcgcattggatttattgctaaaacctggtaaacacttttaatccttttcaattccattaccactgctcttgtccagaattacttcgcagactaatagtcacctgacttctcccctgcatccgaattgctgtctattctgggtacaataataactgccaaactaaatctttcaaaaagcaagactgatctcgccttctttgctcacatggtaaagctcccatggtcccaaataaaccagctttccctggtgttacatacaaaaaaaggagggccgg

SEQ ID NO: 18199 - DNA, 405 bp, Homo Sapiens
gcacgaggccataaccctgcttcttcaacatttcacagaacttctcttttatataaaggcaagagcacaaaatgagttcagatgatcacaaacaggtgagttttgttggagaagaaagttggagtaggagactttcacaagtggtttccatggagatagaatgaagcattctgtggtcaagtaagtttagggagctattcatgtttcacttgctttgtggagattcacactatgcactgggaaagtatctgaaaagtcttataataaagaaacaggcttaactttgtgtaagaacactgtttatcaatgtcatttggctatagaaacattttctcctgctgattgtgtgtgtgaaacatgtattaacattccaatgaactagcatttaataaagcacaattttgg

SEQ ID NO: 18200 - DNA, 840 bp, Homo Sapiens
gcacgaggctgaaattataatctggtttagtctgtgcacttggttgtcattgcattgtattgggagaagactgttattggacctgggctgggtgattaagtcccgaattttgagaacaggggacgaagcatctctgaaatagaacggaagaaggaaagaggaatggaactgcatgagtattagtgtgggaagggaagtggatattcacaggaagtaaggcaattcagggaacatgcattttcattgagcttagggacagaacagaatatgtactcactagcatatttttttcaaacatgtactgaagtagggtgacattaggtgagtaacgttaggttaaatacagtaattccattatccctgaaaaacatgttaaaaagaaacatagttccattttcagtaatgcggacaaacaagataacctgaagccctcctgctaaaaacacttggaaatgccagctagaccataacagacatttttttaaagtgcatagttgagcctcaagaaagtaaaagaaatacccagggatacaaaatagagaggaatctgaaaattagagtagtgacaggtaggtgttgttttggctgccttttattttcagtaattagagagtttgggtttaatagccttgcaggttcttagacaagccatgaggctgtcaagaggtgagttgttggacctgagatctctccctgcacatgcctaaggtgacacccgcgaatcctgttctcaactacctgattgctttgagtctctctttcctttcacccattctgcaacttattcaacaaatattcattcagtattttctctgtggcaacactgctctaagttttgtc

SEQ ID NO: 18201 - DNA, 932 bp, Homo Sapiens
  misc_feature (46)..(58): n is a, c, g, or t
  misc_feature (766)..(867): n is a, c, g, or t
gcacgaggtttgtatatctcatgcacttaagacgattctatagccnnnnnnnnnnnnngtgttcttcctatttaaagtccattctttgacaatgatttcctaaagattgaatttctagaaaaagactctagtagttctacaacatccccaaagaggctatacacaagagtagagtaaacctcatgaatggacttggagtgagcatttgaagaggtgcagggcattccattcatgcaccaaagtgattctttgcttgttgaagtttagaagtaatttaaagaagtaactatgcaaagcaaccactttgaatgacagcattgtgtattgaatatgagttctgtaatacagcccacttaagttcaagtactactctggccacgtagtagcctcacaatttatataatctctttgaacatgcttccactttaaaatgggaataatatcttctgagatttgggggacattaaataaggcatgtgtagtatctggcttcataattgtcatgtagtggctgtttgaaaaatagtggatgttgttattacctgcatgtactttggaagcagctatttacaattttagggtactctctcctactttgccatataagtagagtaagaaaaatttcaactaaagtttaagaacctctaatctggaggtattttttaaagtattctgctgttcatataacactgttcacctgtgaaatttaaagatttgattaaagctctatagagagggagggaactatgcttcaatgaacatctannnnnnnnnnnnnnnnnnnnnnnnnnnnnnnnnnnnnnnnnnnnnnnnnnnnnnnnnnnnnnnnnnnnnnnnnnnnnnnnnnnnnnnnnnnnnnnnnnnnnntatttcataggattattaggataaataaatttctatggggcaaaataattaaaaattgtacttga

SEQ ID NO: 18202 - DNA, 466 bp, Homo Sapiens
gcacgaggcccgcttttggctgtcagcaccagccagacaggagcaagaaccaggaacaactcccagcatctcagaatcaaatctccactcctggatgctctagtctttcctgattacaggcccacatggagcctgtttgaaggggtcgctgccatgggctgagtcagggcattgaggtctggatgtcagggctcagcagtgtccagtttccaggcctcattacagctgctcccatgaggggttcccccagcactgggcctggagagttatgagtctctcctgtactttctgctctggggacctggttccacaatcttccgggaaggtctttctggtgtatgtgctctgtttcagtttatattctggactcctatgaagatgtttcagcaaagtcttttgctcctttttgttttatgtttagttatgtctgttgtaaaaaatcaatgtaataagtttataattaatt

SEQ ID NO: 18203 - DNA, 862 bp, Homo Sapiens
gcacgagggttttagtatgatgtaatttttctattttacattattattgtggacaagagaaggaagtaagagggtaaaatcagaagagacttttttttaattaaggaaaccaaatgaaaaaaatcatagcaacagagaaattcttctaaatgcagtgatattctttgtaatctctatgaaaaggtagttcattgtctacttttttgaagtcctgggcagttattaataaaagagcagagtgtgtccctccctacctatggggtatggtatctgtccagaggggaacagtgacatccttcccacagccatcctgcttcccctactcatctcatttattatctgcatgtctgacaggagcctgtgttccttaggcttcctaaataattggagagtgtaatttatggaagtcaccaggtgctctcctctgaccttgaataaccaaagtaaacttttgtggagtatttgcttagtgtcttagcctcacagaatgctggaaaggggagatgattggaaattatttttgactctaggtctttacttttgtattaacaatgtaagctgtccctgtttttttccacggtgattttgtgaggggacttatttagaagcttggcatcctgggcatttcagtccagacggtgccagtccagggacagatgggcgtacccagccttttctttcttgtccctttgtcaatttatgaccatcttttttggagggtagcttgcccagctcttgtaaagatccccagaaaaagtctgggatcaatcatctggtacattctgtcaatttaagtcaatgggttctttctctcaggaagtattttcccttagacttttctctcactgagtagtgagaagtt

SEQ ID NO: 18204 - DNA, 624 bp, Homo Sapiens
gcacgagggcttcctggacaggtacgaccccgaccacgtgtgcaatgcctccgacaacaccggccgctacgcgtacagcaagcagcccgaggtgtgcaggtggaacctgcggaagctggccgaggccctgcagccggaactgcccctggagctgggggaggccatcctggccgaggagtttgacgccgagttccaaaggcactacctgcagaagatgcgcaggaagctgggcctcgtgcaggtggagctggaggaagacggggcgctggtgtccaagctcctggagaccatgcatctgaccggtgccgacttcacaaacaccttctacttgctgagctccttcccagtggagctagagtcgccaggcctggcggaattcctggccaggctgatggagcagtgtgcctccctggaggagctgaggctggccttccggccccagatggatccccggcagctatccatgatgctgatgctggcgcagtcaaacccgcagctgttcgcgcttatgggcacccgggcaggcatcgccagggagctggagcgtgtggagcagcagtctcggctggagcagctgagtgcggcagagctgcagagcaggaaccagggccactgggctgactg

SEQ ID NO: 18205 - DNA, 681 bp, Homo Sapiens
  misc_feature (100)..(115): n is a, c, g, or t
gcacgaggcagaaatgctgctttcctcagcattgtcttgttaaaccgcatgccatttggaactttggcagtgagaagccaaaaggaagaggtgaatgacnnnnnnnnnnnnnnnntcaatgaaagtaaaatatatatgctcatatactttctagttatcagaatgagttaagctttatgccattgggctgctgcatattttaatcagaagataaaagaaaatctgggcatttttagaatgtgatacatgtttttttaaaactgttaaatattatttcgatatttgtctaagaaccggaatgttcttaaaatttactaaaacagtattgtttgaggaagagaaaactgtactgtttgccattattacagtcatacaagtgcatgtcaagtcacccactctctcaggcatcagtatccacctcatagctttacacattttgatggggaatattgcagcatcctcaggcctgacatctgggaaaggctcagatccacctactgctccttgctcgttgattttgttttaaaatattgtgcctggtgtcaacttttaagcaacagcactgcctaaaagcaagcagagaacagaatcccagcaccattctataggcaactttttagaattcagatatagtaaatctgttccagatttatgatgttttatgtaaaaaaattttgtata

SEQ ID NO: 18206 - DNA, 318 bp, Homo Sapiens
gcacgaggctgtcattgtaatctttgttgttagaaacaaatgatgaaaacataggggttctgtaaacttttgtaatgctatgaattctgtttaaattttgggctgtctattttctgctgaaaccatgcaaaattgagctttggtggggctgggagggggttatgtattcatgggacctttaatttgtacagaacacagaacttatttctgtcagttatttaatacattgaaaatttagtgaaatgttcaaagagaatagatgtttcccaaaacaacaatctttatgttaaaaatagtcattaaaagatctgttgtaat

SEQ ID NO: 18207 - DNA, 541 bp, Homo Sapiens
gcaacgaggcttccctcttaagttatttggggacattattttgttatttagataccaaggcctaattaattaagtacctataagaactatttatttggagtaactgagcctgtaactcaggtttatggctgttaagtatagattggggaatctttattatgtcttctcctaagcagtttaaccaaatgtgtggttagtgtttttttattcccctaagacagaaagaacaaaaaatgttttaaatttctcttatataggaaataataggaacgtcaaagctctgtatacctactaagtggaaaacaagaccatcatctaagtgatttgagaaattaacaaaagtagtgactacacagcaataattacagtaaattaaataaagattcctttaaggcagacaagggctaagatttccttagcagtaataatgacatacactgaattgaaaatctattttattacagaaagatcagtttctaacaaatgaaaatgtatcacctgttccttaactgtgtaaataataattaaatttctttgaaac

SEQ ID NO: 18208 - DNA, 589 bp, Homo Sapiens
  misc_feature (95)..(113): n is a, c, g, or t
  misc_feature (124)..(137): n is a, c, g, or t
gaaagaatacttttttatacctcactatgttctttgaatatgtatttttcctttaaatttctgcctttaattcttttgttccaaagattgtgcannnnnnnnnnnnnnnnnnnaaactgtggtnnnnnnnnnnnnnntaatgcatttccatgtctgtatgtccgtgcttagcttattctatcaatcacggaagaggcagtcaaggaggaaggagagacattaggagccgataaatgcatctgatcagaaatcagcagacagaattaccaaagtgtatctggtgctgaatgactgggggacaagcaaaagtggaaaaaatctttctgcaacaggatattcttctagtcttctgagtttcgggtctttgacaggcaattctggttggctgtggctggaatccacatgctgatagataggaatttgtgcttacaaagcaggagaattaaaaagacgctttcctctcctcttccctcctgtcttctccgttctttttacaatcatcttacacgcacagcctgagacagctggcatagtttttggaattatagtattgatattccaaacgtgctctcaaacagtggataataaa

SEQ ID NO: 18209 - DNA, 929 bp, Homo Sapiens
  misc_feature (117)..(165): n is a, c, g, or t
  misc_feature (583)..(624): n is a, c, g, or t
gcacgaggcaagaaatggaaaagatggtaacagagatgaacaatgcctccagcaagctcatggataaacttgatacaaatgataaaagaaccaaagaacttgaagacaggtcaagannnnnnnnnnnnnnnnnnnnnnnnnnnnnnnnnnnnnnnnnnnnnnnnngagaatgaaagaaaaaagcacaaaacatcccaataatattggacaatatcaaatgatctaacatgctgataattggaattcaagaagagaggaaagaggcagaaggaacatttgaaaaaatgacagttgagaatttttctaaattaatgatatattgataaaatcacatattcaaaaagcccagagaagaccaagcaggatgaacaccaccaccccttaaagttgaaggagaaataaatatttctcaggcaaagaaaaatgagaaaatatattgcttacagaactagtctgcaagaaatgttaaaagaagttcctcagaaagaaattatatgcaattagagcataatctggatctatacaaataaaataagaaacattggaaatggaatatgtaaaagtgcaataaaattcctctttnnnnnnnnnnnnnnnnnnnnnnnnnnnnnnnnnnnnnnnnnnatgactgaatgagatcataccattttttcaattagagaatagttaactaattgtctgggtatttgtattatatgtggagacagcccctctcttggtcttgatttgggtttagattgctaaaattcatttgttattcactttgaggtttcagatctattattaaaagtttttttacattttattgattcaaaattaaaagattattttggcgtgggagtctacaaaatacagagctcccactcagttaaacacttttttctatgcttttgtgaaaggagcaagtcctgaaaacttattattgttgg

SEQ ID NO: 18210 - DNA, 546 bp, Homo Sapiens
gcacgagggtttgaaacatggcggacgacgtagaccagcaacaaactaccaacactgtagaggagcccctggatcttatcaggctcagcctagatgagcgaatttatgtgaaaatgagaaatgaccgagagcttcgaggcagattacatgcttatgatcaacatttaaatatgatcttgggagatgtggaagaaactgtgactactatagaaattgatgaagaaacatatgaagagatatataaatcaacgaaacggaatattccaatgctctttgtccggggagatggcgttgtcctggttgcccctccactgagagttggctgaaacaaagaatttgtcctgtatggaaaacgggagactttgtacagtggcctctctaaaagtacaaaacattcataagagaaacctgcatacattttgatattaagaaataattccggggattcttccactcctgaaatgagttgatttgcagataactcacaacttcttaagctaaatggtattttcatttttctcaagctctccaataaatatgaccacc

SEQ ID NO: 18211 - DNA, 848 bp, Homo Sapiens
gcacgaggggacggcgggcgggctggccaccacgggacaggaaggcacagagcatggagaatgatgaacttccgtcagcggatgggatggattggagtgggattgtatctgttagccagtgcagcagcattttactatgtttttgaaatcagtgagacttacaacaggctggccttggaacacattcaacagcaccctgaggagccccttgaaggaaccacatggacacactccttgaaagctcaattactctccttgcctttttgggtgtggacagttatttttctggtaccttacttacagatgtttttgttcctatactcttgtacaagagctgatcccaaaacagtgggctactgtatcatccctatatgcttggcagttatttgcaatcgccaccaggcatttgtcaaggcttctaatcagatcagcagactacaactgattgacacgtaaaatcagtcaccgttttttccctacgattacaaaactgccagtcctatatggagtctgatcacaagactgcagtttcttcacagatctcaggaagttgtcgtggggcagaggctttttaaaaaacatgtgattagggagctatctttatctgaataataacgaatttttaggtaaaacctgagatagagtactacaaaatcatgttgatgacttcagattttggaagttaaatcatgtctgttatttgcattctttagaaacttgactagtacctgaattcatatttctattctactgtgcaacatagtgatgattcagatatttttcctttggggaaaaaaatgaatatgaacattttccttgtgttagtgtaaaaaggtccagacatgatc

SEQ ID NO: 18212 - DNA, 770 bp, Homo Sapiens
gcacgagggatttaagtaattgacaacttacttaaagtagcaaagtcatggattgtattgacttttaaaaatatagtaaaagtcatatttaaactttatcctaaagtttaaatctaacagaacaactgaagtacttgaaatagacctataaaatagtaattaaaatgagaaatacataagatgataaataaaatgaaggtgaagggattccagatctaccgaaaagattttcagtatcacagattattcataagaaattgagaaaaggaacaatcagaagttgcaaaagatggtatagccgaatataatggaaataggaaaaattagtcgaaaataaaggttgatttagaaatgaagaaaatgaatatatttcttaatacaaaataagtgggaaatgagaagttataccaataaaaagcatttaaaaatttaggggatattgtaacccagtataattttctgacaggttggactttgaccctaatggacttactggtgaactttttcaaatgtttaaataatgtctatccatgtatcatgaaggacagtatgcttcaaattgtcttttgaggcagacatgttctcagtactaagagacatgtttagaaggatgttattctcaacagatgcgaaatgcaaaataaaatattggcgaacaatacagcaacaaataatttactatcactcaggattataaggctggtgttaggcagaacagccattaaatcggcgtcaaaaagaacaaatagtaaaatccaagtattaattac

SEQ ID NO: 18213 - DNA, 850 bp, Homo Sapiens
  misc_feature (430)..(486): n is a, c, g, or t
gcacgaggtgaattgatccctttaccattatgtaatggccttctttgtctcttttgatctttgttggtttaaagtctgttttatcagaggctaggattgcaacccctgcctttttttgttttccatttgcttggtagatcttcctctatccctttattttgagcctgtgtgcctcttcaaatgtgagatgggtttcttaaagacagcgtaccaatggtcttggctctttatccagcttgccattctgtgtgttttaattggagcgtttagcccatttacatttacggttagtattgttgtgtgtgaatttgttcctgttattatgatggttggttattatatcatgatagttggttattctgaagacttattttgttgcttcatagtgtcactggtctgtgtaaaatgtgtttttgtagtggctggtaannnnnnnnnnnnnnnnnnnnnnnnnnnnnnnnnnnnnnnnnnnnnnnnnnnnnnnnngcaagtcaggcctgatggtaatgaattccttaagcatttgcttgtctgaaaatgttctatttctcccctgcttatgaagttttctttggcttgatatgaaattctggtttggaaattcttttctttatgcatgttgaatattggcccttaatatcttctggcctgtagggtttctgctgagaggtccactgttagtctgaggggttttactatgtggtgacctggccctttctcttgggttacctttaaccattttttgtttcatttcaaacttgggaaaatctgatgattatgtgtcttgggtttgatcctctcatggagtatcttactgaggttctctgcatttcctgaatttgaagggggg

SEQ ID NO: 18214 - DNA, 332 bp, Homo Sapiens
gcacgaggcctgcccttgcctcagacctttaagaccaaagactgcaaaaccacagtgctgtacctgccacctccaaggactggcgtcgaggcccaacccaggaatgttggcttatttacctcctgggggaagcagtttaggcctcatcagagctggggagcacatcccttcagagcccatgggtttcccattccctcctgtcagccctggccatgaaatcctggggatctggagggagggaggatagttagagagtgagaggggcgagggctagccttttcctaatacccctgggtttgagtttaatttgcaataaaatggaatcccagcac

SEQ ID NO: 18215 - DNA, 940 bp, Homo Sapiens
  misc_feature (350)..(377): n is a, c, g, or t
tgtatctgttccccccaaaatttagtgattgtatttctttacatcatactgtagagagttgatgtttgtgttcactccactaacctcattccactttcccctgccagtatacttcagaatatctcagatccaattcaaaatttaatcttaaaaggtataattattttcacagtttcatagtttagttttgatcactgaaagcatttctttcattttgtctaatcgaacaaatttatgcaaagaattggggacttattcctcattagtattgttcatctataggtggaaataagttcaagtatgtgttgcagtattaattaaaggcaaagtgacctacttgtactatattnnnnnnnnnnnnnnnnnnnnnnnnnnnnaaatagaagagtgactcaattattttagaatcttaagttatacagatttatgtaatgtctattttgatttttattaattaaccatgaatttatcctactctagtattgagaaaaagaaaatggaactatagacccttctttcatatgatacttaggaatgtatctgcactgtatccagaaagtcagttacatgccctgtttaccaattgaattctgcttcactaaggataataataactgacattgagtgcatggcatatgatgggcactgtgcaaattgctttgacatgttttgttcatttaatccacacaatggtcctatgctataaaaacagttaatatctacttttttaatagatgaggaaactgcagcttagagagataggtaagctgccttaagtcaccctgcctgtaagtgtttagagctgagattcacatttcacggagtcctcctgaagaacctaggattaaccaccaccgttgaacagctttggcctgcaagttacatgcttcttagaaatgaggctattatctataatctgtattttttaatatcaaattta

SEQ ID NO: 18216 - DNA, 407 bp, Homo Sapiens
tggaatcagtttttggactgtgacccatgcagtgttgggggacaaggagttgcttcaggagttagtgcagtgcgcctccaaggggcagtgagccatggaggcgcctgccttctcactgcagtcaatgcagccacacttgtgtatactgagtgctgcttcagatctcagtagataaaataattccacatttaaaatgattctgctattttttataaagggtttgaaagccactactataatgactttgtcacctaattgattttctactaatttttacatattcagaaacttcgtgtttttttggtggacagaatattttggaggtctccgtcgctgtttagaatgtggccacttggctgtttcacagtttttaaagctattttattgaatagtaaagcagtgaactt

SEQ ID NO: 18217 - DNA, 1020 bp, Homo Sapiens
cttagcacactgtcctccatgttcatccatgttgtagcatgtgtctgaatttcctttctcttcaaggctggttattattccattttatgtaaatatcacattttgctaattaattgatctgtttgtggacacttgggttgcttccatcttttagcttttgtgaatagcgttcctattaacatggatgtacaaatatctctgagattctgctttcagttcttctggttatatcattgcatatgctttttactcagatcccgtttctccttgacataaccctaggtaatggtagttagcttactcttatcttgagggaaatgctaaagttttgaggaaagatcattcatccaaatctttttgtttgattcactcttgctaacctccaagaaaaatttgtgatcacgagttatattttatacagtccataggttcagggaagggagtaattctagtgttcctaaaagatgccattgcagtgctgtaatgcagaaaaacgctaggttttggggtgtccttaggaaggagacaagaaagaaaacagagaacgttatccttcctttgcaaagccatgttgactgtgcacatggattacgatctgagattctggtctcctacttaaaatgatttaacagtggaaggtattctagtgaaggaaacccaagtcccggagcgaatgcatttgttacttttgtaaaactgactaaggtgatcagtactcttcagtctaaaaatatgaaagtggaaagaagacatacttaccagctataagcttatttcagaaaagcaaacataaactattcctctaaccttcaacagttatctggactttttgatgcttaaaagaccagcaattgttcaagacaaatgagaggaagagcttattttacactgaagatataattagccagtttgcagtacccgtgattagtatagactgaatttacaaatttttccttttaaggcattaatgtcgaacttcacgtagactattaattaaggaacgggctggccagaactcta

SEQ ID NO: 18218 - DNA, 648 bp, Homo Sapiens
ccggcacgaggctccatctccatcccttcccaaaagctcagctttagctgcctcataaacaggaaatacctattagccaggaggagggaagggaggggagccgcctggagtagagagttgaccccctccctcctggggtccccagctgctagcttttctttcttaagtttcagtatgggctccagggatagacgatggagacttggactagtgtctcctccctagggcgtctggccctgactgggtagggggttctcctctttgttacttagaggggtgttggttgagaaggctgtttggttccctcactctggctcagagtctgcacagctggcttgactggctgggggagggttacaaatgcggaggcttaaagtgtttatgagacctcttctctccaccttaggtttttgctgagggagcatgaaatgatggaacggtgcagagtccagggattgaaaagaaggcctgcctaggaatggagaccctccccaccatgtgcttaggatgggggataggggagcttgtacactgtggagtctcccacctccaggttttccccatctcctcctccaccaggagcatagaggacctgactggaagccatccacactcacacaaggtatttccttggcagcatcccctgcc

SEQ ID NO: 18219 - DNA, 401 bp, Homo Sapiens
  misc_feature (288)..(296): n is a, c, g, or t
ccccgggctgcaggaattcggcacgaggaaactctgtgattaggtaagaaaagcgacaagggctctccttgcctttttttaaaccattaaagtaaaatccataattttctacagagtacaacacaagttcacactaaaaagacatttccttttgcaaatcaaaacaggaaagaaaggaaaagctcaaacaagataaaggaaaagcatttctacggctgaatcacgactgagttgattgaatcccgtggttgctgcagaacagactgtgcgtttggtcatagtggcaannnnnnnnnctcttcacattgtgaaatcactttacattgttttctagtagaaaaggcaaaaaactgtacaaaacccctagtgttaaatacaacgtttggacaaataaaaaactc

SEQ ID NO: 18220 - DNA, 661 bp, Homo Sapiens
gcacgaggtttttgatttgcctgctgctgctaggaggaggcctagtagtggggtgaggcttggattagcgtttagaagggctatttgttgtgggtctcatgagttggagtgtaggataaatcatgctaaggcgaggatgaaaccgatatcgccgatacggttgtataggattgcttgaatggctgctgtgttggcatctgctcgggcgtatcatcaactgatgagcaagaaggatataattcctacgccctctcagccgatgaacagttggaataggttgttagcggtaactaagattagtatggtaattaggaagatgagtagatatttgaagaactgattaatgtttgggtctgagtttatatatcacagtgagaattctatgatggaccatgtaacgaacaatgctacagggatgaatattatggagaagtagtctagtttgaagcttagggagagctgggttgtttgggttgtggctcattgtcagttcgagataataacttcttggtctaggcacatgaatattgttgtggggaagagactgataataaaggtggatgcgacaatggattttacataatggggggtatgagttttttttgttagggttaaccagggtggtaaggatggggggaattagggaagtcagggttagggt

SEQ ID NO: 18221 - DNA, 418 bp, Homo Sapiens
gcacgagggtaaaaggtatgttcctatagccataggaatatgtctgcttcctttttttcatgttgagaaaacagtcaaatttaaccatttggagtttatttgaattcttggaaagagcaatattcaaaaccttttcaaaaataagatattctggactactggatggatgttttgttttcagttcatttttcatcagtagagatggtgatttcggttttgtagtatccttgtttctatgtctgtgcatgttaacattggatgtatttgtatatacttaattaatatacagactgtgtgtcattctggcttgattagaagctaagtcagttactgagtaacattttgcaactttattccagcaagtactaaatcggccaaaaaaagttttgtttttgataccattaaaattttattctct

SEQ ID NO: 18222 - DNA, 940 bp, Homo Sapiens
gcacgaggatcaagctattttatctctacatttaactaaaaacaaaagttcccaaagatctgccttcacttcagaaattttttttggattaaaaaaattaagcctgaaccttaaataaagtgagttggttattcattccaaggattaagtcccaatctacctctcagcacaatgcagaagctcaccactgtattgctgccattaactcatgccagaaccctttgccaataactggaattacaaatttttgttaaagaaaatttatcaagatctttctttactgccttctctatatgtacatctcaaaaacatgtacatctcaaaaactggagtagaaagttagattgctcaactacaactcctctagaactctatagctctgacatacagattcacactctcctctatttgctaagtatgtaaagaatgttttcttttaaaatgttctcttttgagaacaactgcttatttgttataaaagcatttggttaaaatgatgtcatcataaaaaacagtggctttgtttcaatacatatttttgagatgattatctagaagccagattaataaaatcagcttgtgaccttgctaagcatataaactggaaattcagatacattcaaaattatgggttcatttaaaagtgttctaccttttgggtatgagactaatatcactaattcctcaatagttatcatggctctatcttaataattagaaaatatgtgtgtttaattctttgagaattaaaatagagaatattaacagagggttaaaaactgcttcaactccataagataaaggaagctcaaaatctatgagctgagtgttcaattagctttgcctactgagttcaattttatgtcaatacaacagtggaatcagacagtacgactttgaactggtgaatgtaaccattgtttttcacctaagctgcttt

SEQ ID NO: 18223 - DNA, 895 bp, Homo Sapiens
atgagccgctgcacctggccatagttctctcttaaggttgtgtttaaacatcccagccacttactttcaacaaaacaaagcctttccctggagtggcctctcctatgccatagctggcaggacttgggggtcagtgtggctgggactgcctcggccgtttttcgtccgtaactgcttccctctggtgacactcagcagctccttttatcttcctctgtttcctcctcctcattggtgaccttgctcttcctttctctctctcaaaggccttgtcctagtaagtacttaatatacatttgtttccttgaatacattaaagagggctgatagtatcaaattctagtgtcaaaaaaaggtcaatatttatcttctacaaaggaagacgcaaaatagtcaacccattagaggttaaaaataaaattgttaaagtttgaataaatatttctcaattaaggtaaattcctacctaatcatgggctactttaatctcatcaaaatcattagcataaaattttgttataatgaatttgaagggctctaagtctcaagtctgcaaaccttttctgtaaaggaccacattggccagatgtggcctttatcacacattctgtttattatttttttaagacagtttttaaaatataaaaacattcttagctaggccctgtgctagttattcaaatctgggtaggcccatttggccattcagcttatcttcctattgcagtgagtccccgcaactctataagagggaaaaacaaagccccaagggtgtgtttttgtgtggcttgcatttggaataggttttctgtcatgtcttttcctattgtgtggaggctgttcactttgaaaacagtaatgcacttagagtttttaggaacagttttgtttattc

SEQ ID NO: 18224 - DNA, 847 bp, Homo Sapiens
  misc_feature (189)..(245): n is a, c, g, or t
  misc_feature (312)..(465): n is a, c, g, or t
acttttcccacagttcttttcatagtgctttagaataaatatttattgaacaatatttattttatatttatgaatatcatagaaattacagtttaaaatctttgatactggttattttatgattttatgattgcagaaaaaattcttaacggatacttttgttgttgttgttgagacaggtcttgcccnnnnnnnnnnnnnnnnnnnnnnnnnnnnnnnnnnnnnnnnnnnnnnnnnnnnnnnnntggggtcaagcaatgctcctacttcagcctcctgagtagctgggaccgcaggcatgtgccaccacannnnnnnnnnnnnnnnnnnnnnnnnnnnnnnnnnnnnnnnnnnnnnnnnnnnnnnnnnnnnnnnnnnnnnnnnnnnnnnnnnnnnnnnnnnnnnnnnnnnnnnnnnnnnnnnnnnnnnnnnnnnnnnnnnnnnnnnnnnnnnnnnnnnnnnnnnatctttaatatatagtatgaaaataaacaaattgtttcccaaccaatacatagtttcagaccctaatcctgaccctatctaaccaattagataatttgaaattaccaatattctgtgaaagcctattaaataaccctatattttttcatacaatcttgtttttagaagttctaatgaaacagaaagaagcttcatttcattcattgttacagttgattcagtatttatcaattccattcaaggtagttcaaacttactgtttaaatggtagagaatttcagaaaatttaaaaacttagaaacggtgccaaaccataccaaggtttgagagatttggggctggaatttatttcccaagaaataaggggtgctttgcctggttc

SEQ ID NO: 18225 - DNA, 222 bp, Homo Sapiens
tcatatacctacgcaggctctcatggatttgtcttacagtatttgataatgctggaatttctgaatttcccggtacttaaggagtatagagtccttaagtgtgccatcacatacatacttgcttatatgttattttgaattgattttttcctattttgtatatgtgcgtcttgtcttctctaggtaggattataacctcctaaagtgtaagaatcatgtctt

SEQ ID NO: 18226 - DNA, 831 bp, Homo Sapiens
gcacgaggatttttattatctttggagacctcttaaaattaagaagatcttgaatttattttattttggtggattgatccttttctaatccttcataaagttaatattattcaccagttttctagtgaagagatcattcttagcataagtaacactgttgttaagacaggttttgatccttccatagctggtatactacatcagaaacaattgtaagaatgggaaatattgagaagggtattttgttttactccctcacattttagtgtaatattttattatatctaagactgcaaaagcttttatgtttgccttttacaattgcattttcctgatactaactagtcgattatttcttaaagttaaaatgtacctatgcattttctgactttcttgttctttaaacttcatatttaaatttattcattaaactaataaaacatatggaggaattggtcacataattaatacctaataaggtttaacattggtagaattaagtttgaatgaataatatgaagcaggagctgttttctgtctcctaggactgtttatttctgaatttggaatttagaattgtaatatcttttagttcttactttccttctaactacataaaataatgttctgactttctcatcttccccaaaatcggtaaatgcatttgtcaatatgttaaggatataagccagggtgaacaatttgggacatggaacatgtgatatattacactttaaatatattaaataccatggggagatgggttttaataagatttcagcccaaataaattagtattcccttttatcctggggccagaactttcaaaaa

SEQ ID NO: 18227 - DNA, 871 bp, Homo Sapiens
  misc_feature (99)..(155): n is a, c, g, or t
  misc_feature (231)..(302): n is a, c, g, or t
  misc_feature (465)..(477): n is a, c, g, or t
  misc_feature (736)..(796): n is a, c, g, or t
gcacgaggaataggaagaaaacaaactaaaaaaacaaacagaactttggtgactcgtgaaactataataaaagatgaatattcatgtcatcagagtctnnnnnnnnnnnnnnnnnnnnnnnnnnnnnnnnnnnnnnnnnnnnnnnnnnnnnnnnnttctcaaaagacaaaacctacagattcaagaagacaagtaaaccccaaacagtgtaaaccccaaatcaatccaggnnnnnnnnnnnnnnnnnnnnnnnnnnnnnnnnnnnnnnnnnnnnnnnnnnnnnnnnnnnnnnnnnnnnnnnncaacattttccctagaggggaaaaacagtttaatgacagtaaatttctcattaaaaaccacggaagccagaaggaactggcacgatatctttcaggtgctaggagaaaaggcttgttaactcagagttctttaaccagcaaaaatatcctgcagaaatgaagnnnnnnnnnnnnntatttatagagaaaggagaatttctcactagcagatctgctctaaaagaataaagaaaattctctaaacagaaaggaaatgaaaaaagatctcggataatccaggaatcgtggataatgaggaaggcaggatgacaggaggaggaaaaatatgtataaacacaacagattcctattccacttgagttctcccaattatgtttgactgttgaagcaaaaattataatgctgtatgatatggttcaaaatgtatgtaaagnnnnnnnnnnnnnnnnnnnnnnnnnnnnnnnnnnnnnnnnnnnnnnnnnnnnnnnnnnnnncatatattagaaacatataaaaatgttaagataaataaatgggggggactaaagggagcaaagttttctatactt

SEQ ID NO: 18228 - DNA, 623 bp, Homo Sapiens
  misc_feature (189)..(245): n is a, c, g, or t
gcacgaggcttttgtgtatttgtgatgtgatgggcaaaatagttgccaagatgaggaatgtaatgactgaccaaattgtaaaggaggccacagtcttcaggttagactaaagtgccacttggattatgggaagacagacaaaaaggaatacttgagcagttcaatatagacataggaagaatgaagaannnnnnnnnnnnnnnnnnnnnnnnnnnnnnnnnnnnnnnnnnnnnnnnnnnnnnnnnaatagcgaagaaagatcacccaattttggctaaggctgtgagaaaataaatttattcatggagtatttgtggaaaggtaaagttagtacaacttttatgaccataaattagaagatgtaacaaaaattttcaaatctttgacctagaaatcccatcaaaacaatttatcctagaagtttctcataaggagataattggatgattgcacaatcacacaattgtacaaagatgcatgcgtgggaatgtaatttccattgaatgtagtggcaaaaaattggaaggatcctaaaattggtggagattctacagatatgccaatatttatttaattgatgaaatacaatgaaaccatagaagggaaagtgttttcattgccat

SEQ ID NO: 18229 - DNA, 535 bp, Homo Sapiens
cccagaaagcaatagcagcagagaataggcaagacctactagttaagagggagcaaatgaactgaaactgtgaggacactcagctaatacaactgaaactgtgaagacactcagctaatacatttcaactgatatttctttgattagtttttaaaaataaaatatagtcatttgaagctcagagtcagttttgaatttgttgccgtgccattttctattttctggtgacagtagcatgatttgagagctgcagattgacgggagccagcaagtcagcatttaatgtaataagaaaggaaaaattgaatgtttctccaatttgctgaatacatcaaatatcatggaaaggggcagaggtgaatctgacaccatgattatgttctcctgcacttcttaaggaatactttcggtttcatttctgtgtgtcgcttaccacccacaaaattctaaggaacattttgcctgttttgtacttggtattcctaattgaaaaaatttccttttgaactttctatctcaggccaatcctttttcc

SEQ ID NO: 18230 - DNA, 405 bp, Homo Sapiens
gcacgaggcttcacagcaaacttgtgaggttcatttccatcaacctgagactcacagaagctaagaaacttgataccgctagtaaccagtggacttgataccgctagtaaccggtggacatagatgtgaactggatctttctgacctcgggcagggccgggtaacaaggggaggataaatgcccagacagtgtcctcagagagctgagagctgtaacttgctgcccgggcttctcacagtgttcaaggacaaaataaggctttaagagagaagagggacagactgattgcagggcagcaggaagagatggtagagaaggaagaagagatgattcgtgtggaaagaagctggctcggtggatggataaaagaagggaaggacagatgggtaagaagaaagggagga

SEQ ID NO: 18231 - DNA, 607 bp, Homo Sapiens
  misc_feature (41)..(51): n is a, c, g, or t
  misc_feature (70)..(175): n is a, c, g, or t
  misc_feature (219)..(229): n is a, c, g, or t
  misc_feature (313)..(364): n is a, c, g, or t
  misc_feature (430)..(547): n is a, c, g, or t
cggtttacccgaaatcttttttttctaaaaaggagaagggnnnnnnnnnnngtttgttaacatacgggcnnnnnnnnnnnnnnnnnnnnnnnnnnnnnnnnnnnnnnnnnnnnnnnnnnnnnnnnnnnnnnnnnnnnnnnnnnnnnnnnnnnnnnnnnnnnnnnnnnnnnnnnnncaccaatccaaaacctccaccagaaacccccgaagaactttttnnnnnnnnnnnttaccaggttatccaaaaatcgggattttggggaggagaacctgggaatttaaaaatacaccttttttaacccagaaactattnnnnnnnnnnnnnnnnnnnnnnnnnnnnnnnnnnnnnnnnnnnnnnnnnnnngggttgaaatcctaatcccttcccaaggaaccaacctcctaaatgggaaattccaacttggggggnnnnnnnnnnnnnnnnnnnnnnnnnnnnnnnnnnnnnnnnnnnnnnnnnnnnnnnnnnnnnnnnnnnnnnnnnnnnnnnnnnnnnnnnnnnnnnnnnnnnnnnnnnnnnnnnnnnnnnttcctccattttcccccaaagaaataagccaccacaaaatttccgccagaatagaaaaaa

SEQ ID NO: 18232 - DNA, 303 bp, Homo Sapiens
ctccaaagtgttgggattacaggcgtgagccaccgtgcccggcccaattttatagctcttcttagtgccctttccagatagattgaattgatgccataccaatatagtgttaagtaacttgcttctccctcaggagtctcaccagactcaatttaaatatttttaatgttgagatgtatcatttctcaagaccgttttacaatgcatttctttattcattaagggtatgtattatgtggtgatattttctctgaaatgctagacactctgctggttttggaaaataaacatttgatttaaagc

SEQ ID NO: 18233 - DNA, 688 bp, Homo Sapiens
  misc_feature (536)..(607): n is a, c, g, or t
aaaatcatacttgcaaactggaataaaccccacttggtcatgatatagtattttaaaaacgtgctttggattccacatgctaatacttaaaagtttttacactgatactcattgagtgagaatgatctgcagtacaataggttttaaggttttagatcaatgttgtactttataatatcaattttgacaatttcctcttttttaatgttctagtaaagtttaagaaccacaggtaatctgatttttacaggttaggtagaatttcatcactaaactttttgagccaggactattattgtggggggagcactttaagtttcttattctcttctaaggtaatttgtcatttaggacttaatgttagtctggtaaaccgtaattttcttagaaattatccatccaatgtgactcttcaaatatatttgcatagagttgtatgaagtattctcttataatacttaaaattttctgtttggtaattattcatcatttctattttgtatatttgtgccttttcccttcctccaaacagctgnnnnnnnnnnnnnnnnnnnnnnnnnnnnnnnnnnnnnnnnnnnnnnnnnnnnnnnnnnnnnnnnnnnnnnnnatttaacttctataaattctagcattaaatttctgcttttttattcagtccttccttctgccttttttttgaggactgctc

SEQ ID NO: 18234 - DNA, 883 bp, Homo Sapiens
gcacgaggggatggtgacttggctttggggaaaatccacaagaagggcaggagtttgtgcagaggtcttctgagatgaagctggatgcaaaaataaatgggccacagcatgcatgagacagaaataaaaataaagccgtctcttagaagcaatccattgagagtagactgggaagatgagggaacttggaggcttgactgtgccaactagttagcaatatctgtatcaagtcagtatgcttctttggtcctcagttactacaaaaagtttaaattttattattacaaaatttgcaaacagttaactttttatgatttgaattttatgattagcaatgttacagtttaccaaaattatcttcagcagtattaaaacatctataaatatatataacaatatacctgaccatatattatgttgattttggtattgttcgcctattaaggccaatgggaaacttttcagctagattggatattatttcataattccatagagttgtatgttttgaacagaaatatttttagtgtcttctctaagtttactattcaatttcttgtttaaaagatcataaattgacctagtgtttcaggcatgtcaatactgttgctatataaatttgtagaaattataatgaatttatatatttgctttaagtttttcttctaagaatgtgtgtttgatgagaaagtttggaaaatacgtaaaagcataaattctacattctagatatagccagtgctgaggtgctttcggtcctgatacctgtttgtgtgtatgttaacaaagtggaaatatattgtgtgtaaatatttaacctacttctcatttatcatatcatgagcaattcccatgttattgaatgtttttgaaaatattttta

SEQ ID NO: 18235 - DNA, 414 bp, Homo Sapiens
  misc_feature (110)..(134): n is a, c, g, or t
  misc_feature (136)..(234): n is a, c, g, or t
gcacgaggcaatagctcatcgcagcctcgacctcccagactcaaaccattcttccacctcaacctcccaagtacctgagactataagcacatgccaccatgaccagctannnnnnnnnnnnnnnnnnnnnnnnncnnnnnnnnnnnnnnnnnnnnnnnnnnnnnnnnnnnnnnnnnnnnnnnnnnnnnnnnnnnnnnnnnnnnnnnnnnnnnnnnnnnnnnnnnnnnnnnnnnnaagagccaccacacacagcccagtaaaaaagtttaaaaaataatttcagccttctaatttagtttttttccaattacttactatttaaacagaaccacagtgaatattcttgtagctaaatctttgcacatattcatgattatttcctaaggctgtatttctaacaatggatattgcgga

SEQ ID NO: 18236 - DNA, 597 bp, Homo Sapiens
  misc_feature (278)..(286): n is a, c, g, or t
cccaggtcagcagagtgttaaaaccacaattccagtttatttactaaaagcatgaccacatcacttgactttcctataaacaaggaaacaagtagattgtattctctataatgtctttttaatacttttctttcatctgttgttattttctagtatctgattacaaaaaaatgacttatgtatttcaaggaaaactttctaatattcaaagctgaaagtagtttctaggaataaaacatccctaatgtccttagacagttaaaggcagggctgttggnnnnnnnnncctctaagtggaaaatgtgatattttatatgcttatttttaaaagcatattctataaagccatttgaaaaaaatacaagtttagagatagatagaatattttagtatacaaagatgactttacattgtagtgcctgtaataatataacctttacaaattccagcattcaattagttgtttattagtgctgctaaatatataattgggttccaaaatgttggagtctagcactaagtatatagtcccacatagaactatttctgtttttatgtagctcttaaatagaaagtatactgttagttttccatggg

SEQ ID NO: 18237 - DNA, 332 bp, Homo Sapiens
  misc_feature (165)..(174): n is a, c, g, or t
aaaggggaaaaaagggccctattttaaaaattttttggggaaattattctaggaaaaaggggatgaaatggtggtttggtccccaaattttaaaaaattgacccaaataaaccccccggcgggttacggggaaagtggtttggttttaaagtccgggaattgccnnnnnnnnnnaacccaatgggggaaacccccaagaatgcaaaaacttttgggatggtatttttaaaaaaaggggggcttccaaggggaattacaacctattgttcccgtcaaggggtcccaggtcccccggttctaagaaaaaagggggaaatttgtaagaaataaaa

SEQ ID NO: 18238 - DNA, 798 bp, Homo Sapiens
  misc_feature (235)..(267): n is a, c, g, or t
  misc_feature (425)..(436): n is a, c, g, or t
gcacgagggctggcctttctttgagtgctttaaatatattgctacactatcttcttgcttgcatagtatgtgacaggaaatctaagtcatctttattattgtttctctttatgtgaactgtcatttttctcaggtttcttctaagattttccttttatcactagttttaagcagtttgattatggtgtatccccacgttctcatgttttctttcttgtgcttggagtctattgannnnnnnnnnnnnnnnnnnnnnnnnnnnnnnnncagattcggaaatatttcagctatgatttcttcaaatattttgtaactccctgcttgccttctttcctttagcaactcccattacacattacacacatatttggctgcttgaagttgttccatggttcaatgatgctttgtttattttttcttggtcnnnnnnnnnnnnaatcttctgtgcttcgttttggatagtttctattgctatgtctccaagttcatttatctttccttctgtgatgtctaatcagatgtttatcccatccagtgtgtttttcatttcatacattttagttttcatctgttgaagttcatttttaaaaacatcttatgtatcttaatttgttaaatttttctctaaacttttgaacatatgggatgtgttcaaatatcataactgtgttatcataactgtgttactcttatttattaatgctataatcttatgtcattttaaaagtatttttgataaattattttcttctccctcaatgtcagtttgatttttctgactctttgtatgcctggtca

SEQ ID NO: 18239 - DNA, 460 bp, Homo Sapiens
  misc_feature (136)..(146): n is a, c, g, or t
  misc_feature (168)..(270): n is a, c, g, or t
ttgggggcctacccacccaaaactttttaaaaaaacggccgccccggatttaaaaaccctttactattttaattttacaaacacaaacaaactttttaagggggttggaaggacaaagggttgatcctccccaaannnnnnnnnnnccaaattggggaataagggacnnnnnnnnnnnnnnnnnnnnnnnnnnnnnnnnnnnnnnnnnnnnnnnnnnnnnnnnnnnnnnnnnnnnnnnnnnnnnnnnnnnnnnnnnnnnnnnnnnnnnnncgggtctttttgtaaacttgtttcccattaaacttttggcaggggctctgcttatccaaacgggcccataattcgggaaagggttaaaaattttttcccaaacccccccctcctttgacccagcgaaaattttaaaccttttttgaaaacattaagggctccgtggaattgttttccctttccccggggg

SEQ ID NO: 18240 - DNA, 627 bp, Homo Sapiens
cgtggtacaaaactggtagtttaaaaaatttccttcttacaaaaacaaaaatagcaactttatgttggttctcaaattaaaaaaaatatttttactggtttatgaaatagaaaaatctgagaatctgtagcttaaagacctacagcgtgggatgtctgtaaagactaggttatttatcagctcctaacacctcttgatagaagcttagccaagacttgcactatttcagtctttcccattccacattccatggaatcttgaagagacattgataaaacggtgcagccatgaaccaccctaactcaatcctagtgtcagaatcccccttttactgcaaaatgagctgcttgctgcagtgatacttgaaccccttagatatattctctactaattatattaaaacaccaccaatgcttttgctttgttttcccccaaattcacaccttagtcatgagaacccagagaattggatttagtgtgactgatctcccaactgtcagtaagaacatagttagattatatttttctccagttccaataaaagaaaattgacaataaaatgctgatcaatatgtgtagctgaagaagtagagcctgcttttgagatgccaaagtgtttggtttttt

SEQ ID NO: 18241 - DNA, 1000 bp, Homo Sapiens
caaattacattggacctaaatatttacctaaataaccccccctagggagagccgatacctggattcttgcagcatggtactccccccatactaatatgaagccccctgacctaaaaaataaaattactcttttagaaacaacctaaaattaaatcttttgggaactattttgacataattaaatgaattccaagaaccacagctttctctatctcccaaaaaccaatcacaaaattttctaccaattctatatgccttatcccttagttcctaaatgtaatctcaaacattttactaaccaccttggattccttttgaaatagggctctgtacatatgccctttatataccaacatttattaaacatgaattttaaaccaaatgtatgtgacaagatctgcattcctataaataaaaacttaagttgccaaaaagccacttgtataaaattctacgtagtttttacaaaacgaacacaatttacttagatatcgtacaataacactaatcttatatcactaagaaattgctaggtacttatggtaatgatgtacctttaaacaaatttcattatctgaagggtcattaataaagccccgtgatttcctcctaatcattctgatgacagtaaaacacaatttttcaaaaacagggtccgcattttccagtttaaaagtttttgtgattcctaatgggaaatcgttttgcgaaagttagcatatgttgacccggccccccctaaccctgctgctctgactctcgaaaccatcatcactatattgcatggtggcgtctaaaagaaactatcctgcactcttttaaacgttttatactattgccgcaaaaaagttcgtggtatttcaaattaaaaagtttttctccacccttgtgaagttttttgaatgtttctacaactttaaaaaaatgacgctaatttacaaatacaaaggaaaacacggaacaaaacccattttacattctggggtggtcggcccaaaaa

SEQ ID NO: 18242 - DNA, 895 bp, Homo Sapiens
  misc_feature (126)..(134): n is a, c, g, or t
ctctcaaagtgctgggattataggcgttagccaccatacctggcctaaaatgtttttctttatggcaaaacttagtgccatgaaaattcattgtcaccatttcccaaatctgtttgatgagggcannnnnnnnnctcttggggttagcattctgtggagaagcatttggtgaaatgcttatcccatttcctgcctctggcaggtggggaaaacaagtgcccagaaagacacatttcagagtcctagtattatccagtccgaggctagaacccaggatggctggcctgtctagtggtctttccactgtgtttcctcagagccatttgtttgtaaaaaagatatgacaccatgtttaaatgggttaaggagcttaatgtgtcatagaaatgtcctgtaaggtgacctcaccaatgaagattaaggacttttgtgacctggaggataggatacttagtgagcaagttttaactgttggggaagagaagaattcaatgggctgttggtggttctgagatgtaggggccaagtacaaagactagggtgagacctctaggagctaaaggcagcctgaggctgccataaattaagttaaaccattgttaggattgatgtggttgctaatcttgaatgtatgcggcatacttattcaagggctttgccagtgttgtttcatttctctctcatatcagtgatgcatcagcactcaaaacattgataatatttcacatttaagattgtttttatagtgagaatttctaaaagagattctacatggtacttgaatgtctgcgtgaattctaaccttaatgtgtgggtcgcttctcacgggatcctcttccaagatgaggaattaggagtgagggctcagattttgtcctttttttcgttttcctgt

SEQ ID NO: 18243 - DNA, 209 bp, Homo Sapiens
gcacgaggcgcactttgacaaatgttcagcaaatacttctttagttttccaaccaaatatttgctcctgatctgaatagtactggtctctggaaacttctattggcagcaagagtaatctctcaaagcccagatcttctgcaaacaggaatccagatcagaactgtttcaatttgggaatgtttgtataataaatacccatttctcctc

SEQ ID NO: 18244 - DNA, 764 bp, Homo Sapiens
cagaaatgcatctaagtgtctccttacaaaatgagagaattcattgattagccattctttggacatgctcttaaacgtcctctaccagaaggaatttcatattcctatcacaaaagggaaattgcttattcttatgtttataacaccagatcttttatttgatatatactatgtgtatatattatacaaataagctctttataaaagataaccatgaaggaattatttcctgaaacggcaaaatataaatttgcctgtaaaatcagaatgccctagccaatcttttgagatttgaccaggatgatcctgtgggtaaggaaactaaccctttcaaattgcatgaaaattaaaagacaaatgaagatgttgtgaatggaaattcatttccaaataaaccactgggataaaaatcattagaataatgctagtttcaaaatctatgtttttccgtctctttgtcactcacaattatttcaaatatgttcactttaaagtacagtatatatacctagttaggttgagtcatgttttagaaaaattccttagagtttgtttttaagcaaaacaggactgttttaaacaaagcagaaccttaacaggaaactgataacagtggccaagaaaagcatcttattttctattttctgtgtattagaaagaaacccctatttctcacttcctcatatggtattatatctcggtggaattgaatcctcaaggacacagggcatgttattgtgagatattttacacctggctaaccc

SEQ ID NO: 18245 - DNA, 712 bp, Homo Sapiens
  misc_feature (202)..(267): n is a, c, g, or t
gcacgaggcgactatgttgaataatagatatattttaactttttaagaagctatcaaactgttttccaaggtggttgtaccattttatgttcccagcagcagtaactggtgagaatatggctcattttcaaaagatgatctgaagtttcaaaagtaaataagttattgaaacatgtaatttgatagtggtaattagccaacnnnnnnnnnnnnnnnnnnnnnnnnnnnnnnnnnnnnnnnnnnnnnnnnnnnnnnnnnnnnnnnnnnagcgcagaggaagtactcagtattcattagcagttttattgttattctgttaatttaacttctttggttgttaacagtagtacatttgtgactaatttcgatagactaaaaataaagataaacaggctagactttaaaaatgaaagtcacatattctacaaaaaacattcacattcataaaaatacccttaaacaaaatacaaatttatttttttctttccagtagagggggcagtgattacctggcattgttgcaaaacaaaagttaagcttgccattattgtagttacaatttttaatataatttttgcagttatctctcagtaactttttattatatactatttaattatgaatgtcagggtctgaaaaatacatggtcaattcaggattggttgtaacttttaaaaaagatacttacattgacttgttgttatctaaaatg

SEQ ID NO: 18246 - DNA, 519 bp, Homo Sapiens
cctaaaaatcccccgggctgcaggtcctgttctagtaaacactccaaaatgaatatagttctccggactcttctctgggggttcattggcagctgctgctttcttcactttttaaaatttatttgccacttggtgaaagcccctgaaatggttttttcttaccttgggcaatttggatctttggaatctggagtgaatgacgtcatctggatttcattgtcttcttacgaagccagcagtaaacttgggcagtccactcacccaccccgagggccatatcgggggatgaaaccacccccgacctatacataggaaatgattgatgtgcctggtcttatacccagtctgtgtccggtttctctatcctcattgctctttggctttcgctcaggatgggtgggcctcccttccccaacagctgcctcagccctgatcaagggcagttatttggctcaaggtgagtagtggtttttaaaccctactctcacacactgctgagtactgtgttttcctttcttc

SEQ ID NO: 18247 - DNA, 559 bp, Homo Sapiens
  misc_feature (77)..(107): n is a, c, g, or t
  misc_feature (210)..(241): n is a, c, g, or t
ccttaaaatcccccgggctgcacgaattgggacgcgtattgcccccttaccatttaggtgggcctttgcgggggttnnnnnnnnnnnnnnnnnnnnnnnnnnnnnnncctaacattcgctcatgtctctttcttcccatcctttctccctgatatctgcggctttcctattgaaaatcgaaaactgggactacctttattttcgtatttnnnnnnnnnnnnnnnnnnnnnnnnnnnnnnnntgagtattggcacggttcaaaacgcgggtgaacgccctgatgctggttattcgcccggtgcccgagtgggtcacattctttagtatcgcactcttggtaagatctgggacagttttcgcccctaacaacgttttctctgatgagcactttggattttctgctatgtggggcggtattataccgtattgactgatttaaagaacttctcggtcgcttttaacactattttcacaatgacttggtagagtactctcttccgggaaaaatgatcttaacgacggtatgattattatacaattatccatcgctgccatatcc

SEQ ID NO: 18248 - DNA, 784 bp, Homo Sapiens
  misc_feature (569)..(637): n is a, c, g, or t
aaattttaaattatttatttaaagtcactaggtatggggagaattggtccataaagtataaattctatgaaaacaactaaatcattctggtataataaaaagctggatggtatttacaattcacgtttcttaattatgaaataacatgctaacactttcataaaatccaagaactttctagaactattatgtaaatcttttaaaaccacaaaggaacaacctatttcaaaacttacatacatcatttactagaaaaccactaaagatgtttcaaatctgaaactgcctccttccttccaaactgtaagaaacagtacgctcatcttgaagctttttaaattatttaaattcattgctaatatatttataactacattaaaaagagtttacaatattggaaaaagggctattgtcataatccactttattatgtctacatacatggtagcaaacctattacaagaacaattctagccagtgtggggaacagcatagtgaatgcactgtttccaagttcggccctcagtgacacctaggaaaacatctaattggaaagcctgctgctaaannnnnnnnnnnnnnnnnnnnnnnnnnnnnnnnnnnnnnnnnnnnnnnnnnnnnnnnnnnnnnnnnnnnncacattgttgaaacaattctagaacctttcatccactgtgtacagagacagaataatattttgatatagttatcaactaaatttacaagcacttagctggggtattcgctcctaataaaaagaagccaaagaaaccctctgttattc

SEQ ID NO: 18249 - DNA, 604 bp, Homo Sapiens
gcacgaggccagaacataagaataattcagtacaagctttcttattcagtcttctcttgaagagtcttattagattaattgatgctcttcattccctctgtaaagaaaaactggcttgataacatggcaagctgaatgcttgtagctagtaggctgtcactttctagtaagactatgtatttatcccaccagttgaagagtatgctgaacaggaggtagttgttagttttcaatttttatgctttttattattataattacttagtttaagcgtagatacagtgctttacaaaaactttaagacattgctgtctaattagggatggacaagtaattgtgtaagttagaaaagttataaaaatccaagatgtggtattagattgctttgaaagtgtttttaatttctagatttatttaaagaaatcaaaactaaaaatccttgatgatgtgttatgggtgtggtttgtacaagagagctaatacagaattccattcagtgaatcctctgtttaaagagaaagccttggcctttgtcagaagatgggaaaacaaatgtacatttataaactttcagttaaaataaaatgtttaaattataaaaaaa

SEQ ID NO: 18250 - DNA, 293 bp, Homo Sapiens
gatcatttggaacccctgaatggtgaatgcgaaccgccctgtaaccgcgccttaaccacgccgggtgtggtggttacgcgttgcggaccgcttacttgccaaactacttactctagctcccggcctttcttcccttctggatggacgcggacaccggctttcgaccacttccgcgctctgcccttctcgctggatggtttatagttgatgcttcaggaccccgcgaccccgggtctcttgatatcggtgatggttcggggcctgagggatcgccctcacatatcgtatttctc

SEQ ID NO: 18251 - DNA, 563 bp, Homo Sapiens
gcacgaggtggcctttataactgaacgtgccaaacggactctaccaaacatctttctgtggtgaagagggtcctgctgggacattctggcaaggagaagctcccgcggtactacaagaacatcagtctgggcttctggattcccaatgaagctcttgagggcccctaccttgacctcaaatgcccgttcgaaggtaatgtgtccattcgagggcggatcctctctgggggggtgaccaataataacatgcatttgaccattgtcatccgccgagactatctgcactatttccgctggtaccatcgcttcgagaaattgcactataacatgtcggttattatgtccccttgcttcgtggaggtccagattggtgacatcgtcagttcatgcgagtgccggcctcttcgtggtacactgcgcttctgtctgctcaaagtcaataaggttgccggcttctacaagaaatatccaaatttcttaggttggacatcggctcgctttttgcttgttacaaaattattttcgcatttccgacctttacagagtacagggctaggtgaaaa

SEQ ID NO: 18252 - DNA, 763 bp, Homo Sapiens
gcacgaggctatctttaagctccctgggaagcaggatataagcccagggctggcaggctctttctagctacctgctcttgcacatagagtttgcctcatggttgcaagaaggctgccatagctccagatggcacatagacattccaggcagcaggaaaaaggaaggagcacttaaccgaaggaggtcagggagttggttagtctccacctgaagaagagagccatgaaccagcttcagttgactaacgggctcctgtgagtgcatctttggacttttctggaggttgaaatctagatgtggtatgtgtcttaaagcagccaccaactcctcccattaccttccaagtgagcccaactacacgatggagcctcttccctgcccttggatctgggctgagcctctgacttgcgttgaccaacagaatgcagtgaaagtgatgccgatactaccctccctgccctagacttgggatacctggcagctatattcttccattcctcaggacttgcaaaaacgggtctcagcatgccttcccagagccatgaggtgtttctttgcccattcattgatctgagaagtgagtgtaaggagtttaaatcaacctctgttctgtgctagttaaggtaataaagttgctgcagtccagggggtaggtacctgtggacggctctgcgaataggacagttgcatttcttgggaatcaagtgcatccctaggctggcagtgcagcagaaatactgaataaaatgtgacaatctccag

SEQ ID NO: 18253 - DNA, 639 bp, Homo Sapiens
gcacgaggcctctctctgccatccttgtcctccagagactgcaccacctgtagcatagaaaaccaccaccacggacctgccagccattggcgcagcaaaccagccagctgtttgctgccaaattccttcctctcccaggtccagaccaaatacaagatcagcaccacaccgtggtgttgtcaggagccaaagcaacaggaaacaattcaatgctgttgggttcgattctgagagtagatttttccagacatgtctttcaggtgaccctcaactacctcaggtttgaaggccctaaatgaaactgattaccactcatagggacaaaccgagggggttcggttacatcttggtgataatgcagttgtctcaaacttataacagactctttcacatttcagtttgcagggatagggttgggtttgtttttcttctgtttttaacctttcccctgggtttccattagggtagttccttgaaatgaatttcatttttcactgagtgcctaccttcccagggcaggtggccactggcttctgtttccctccaacaatacttttattatggtattaaagacctttctttgtataatacattgcatctgtgttttcaatttttcaaaataaatatttccgccctggc

SEQ ID NO: 18254 - DNA, 415 bp, Homo Sapiens
gcagacatgaggtcttgctttgttgcccaggttggtctcgaacctctgggctgaaggaatccacctgcctcagcctcccaaagcagtgggactatgggcatgagccgccatgcccagccaggtctttatttcagtaaaaatatgtaaaaccactgtgaaagttaaagtaacaaaaactgcacatcaactactgtattaaatatgaaacacatgactcataattcaaaactgtctaaaaagagcttcatatcttaaatactaggaatcgttctacttttcttaattctagatttaccaatctgttacattctacctaccttttagaaacagcaaaacctgaatttaactttttgaacatctttctcacaaaacgcaacttgacgctgaattatttatttatttatttatttaaaga

SEQ ID NO: 18255 - DNA, 331 bp, Homo Sapiens
  misc_feature (210)..(218): n is a, c, g, or t
tgagggcggaaggggttgcgcgtggagaggagaggtaatcacattgttagctcctaaagggcaggcaggtgtagcgtttgtctacctgcctgcccatttgtgtgtctctggataagtgagtctgggtgatcacaggcaaatcagttgggataaataaaatattttatgagaatgatacaattatcgataccagttctagaaaaaaacgcnnnnnnnnngggaatgcatgattgcctatgaaaaaccaaatataagacctgaagtatccttagctacctggtgcacatatacaatgaggaaagtcaatgtgtagcagctgagtttcaaaaag

SEQ ID NO: 18256 - DNA, 462 bp, Homo Sapiens
  misc_feature (184)..(196): n is a, c, g, or t
ggaaaccgccatttaattaggtttctaaaaactttaaaaaccccatttttgaggaaaaattcccttcctccaaacaaaaacaaattgcagggaaccctggagccgaagaaaaacttttatttttgggaaaatttgggaatccccagcttttttattaatcttgccctgccccctaatctcaaannnnnnnnnnnnngggtccaaaaactccccttcccgggggctggggttccccaacttttttttcctgaaataagcatcaataaaaagttttgggattttttaattggcgaaatccattttgggtgaaatggcaaagaaaaatttctgggggggtcttcttaaaagaactccattgaggacccaaaggcccgtcccaaataaaaaaccaccaacccgctggtttaggaaaaaccccctcttgcccccggggggtcccaagaggaagaaccaaaagggccc

SEQ ID NO: 18257 - DNA, 888 bp, Homo Sapiens
cagtttttttagtgccttcttttgagtaaagtcataccaaacagatgcccagaacatctggatttgggtccccactagactccttaaataatgtatatcttctataagtggaatatgagggacatggacctgctttagtaagaacagtaatctgtttggggagttaaaagagcagttgtggatttatttattgataaagaccatttttcttcctaataaccttgctgttattctagtgtcttagccatcttcatttggttgtttaccaatatatgacatgtgattttatttttcagatggatacagacatatacaagattgtggtgacctgtgttacagttagaagttggtgagaaaggtgagggtggatagcaaaaagagagagatcatttggctggctgttccagctgggtctcccaggatgtaacataggtggacatagatccagggtctgaccctcagcttgagaaaccatttcccactgatgaaacttgagagacttggagattccccagttagaatataaatgtattaattcatagtgataggtctgcctatggtaaacaattaggaaacaggaagttacttggtaaacacaggtatgagcaaaggaagattgataaattggggtaatatttcagttgtgctgaggtaagacttggagaatttttcctgcttcatcattaattagaatgcttatctctgccaaaatctcatctctttcctagcccatagaggtgccctgatattttatttcctatatccttttcaagttccatgtagttttctttatgtttatgacagttttatttctgcagcttaccatattatttattcctggtccacgaaagtataaatagttctcatcaagaactcaattgtaagtca

SEQ ID NO: 18258 - DNA, 382 bp, Homo Sapiens
gggataaaaagaacatttaaatttttttcgaattgcttttaattttcaaattacattgtgcataaatattaactttgataaccacccctagggagagccgaatcctggatcattgccgaaacctttaaattttttaaaaattttataaaatataaagcgaaacatgtgacctccaccatactaatatggagccccctggcataaaaaataaaattactctcttagaagccacctaaaattaaaatctttggggaaccattttgacattatttaatgaatttcaagacccacagcctcccctatcacacagaaaacaaatcaccaaaattttcacaatccatatgcattatcagttagttctaaatgtgatctccaacaattt

SEQ ID NO: 18259 - DNA, 600 bp, Homo Sapiens
atcctggaggtgatatatttttaacaaatatctcacatgattttgaaggtagtggtcagtgattgcactttgaggacattcatagggccctcatacaaatttctggtgcctgtaactcttcccctatcaaggcaggagtttccgcccttttgaatataaacataggtttgggggattcttcataatactttctgaaagcactggaatctataacagacctgtgggagtcagaaaatggggacttttcccccctcatttaatacttacaactatattggtaagttagtaggagtagtaattttcccatataataagcccactcttgtacatgtagaaacagagaaaagaactacaaaggtaaatgttagtgcatgttgaaatgtatttaagaactctgtttttgttggcaagattgttcttattgtagaagtggatattatcagattattttagatgttatttaacatttgatttatttaccaaattgtccttactttgaatataagcaaacttttttattgtggtaaaagtatacatagcataaaattaccattctaatcattttttaatgtaccatttagtggcattaattacagcagc

SEQ ID NO: 18260 - DNA, 554 bp, Homo Sapiens
caacacccagatagatacacatactccttcagacttacagacctaagctgcatttatggggtagtgatgaggtttagaacatatacatattttgttaaaattccccagatgattcttggtatgaacgactatattataaattttaagatgtacttagaaatccttaagacatctagccccgtctctaatagacaacacatttatattgcagatattacttttttttcagtttatgaccaggtatttatgaaggactattggcagggaaaatatgaatatgttaactttagcttatggcatcaatttactaaggaacaacaggctcaccaactgatgtcaaacataaaaacccccacatcagtctgatacgatatggtactactttgaatctgttactagtaccatcttgacagaggatacatgctcccaaaacgtttgttaccacacttaaaaatcactgccatcattaagcatcagtttcaaaattatagccattcatgatttactttttccagatgactatcattattctagtcctttgaatttgtaagggg

SEQ ID NO: 18261 - DNA, 673 bp, Homo Sapiens
ttcagaaccaagaggctaactgggcttcctccaagaagggaccaggggctagaagcagaagttggcatcagcaaacatttctggaatctaccaaagggaggcccaggcagaaccccttcctcagtctcccttcccctcttccccccagccttgaagaggttgatcctttgtgctgtgtctcttagccctttcatcggggatgcccagaggcaacagcccaggctggaggtgccccagggaagggtgctcacagtggtcccagggctacacttggctttgactgcacagcccctgctcagatccttgtggagggtgtccgatgacttggggaggttctcttccccttcctagaggaggaagtgaccaagtttgaaggcggcagaaatggccacacagccaagaagagcccatgcaactcagtccaggattttactgggtcagtgacattggtggaagccttcatgcctcctcattccacagcacttcctcctatgttgaccttaaacactggcttcccactgatacagactgggatgagctgagggcagtctcatttactgtcaagagttgtatttttgtattgtcctttttgccaagtctacatgtgttgactctgtaatggatttatgtagcccacttcagtctgcaaataaagcaaagtaactggaaaaaa

SEQ ID NO: 18262 - DNA, 716 bp, Homo Sapiens
  misc_feature (182)..(205): n is a, c, g, or t
  misc_feature (208)..(225): n is a, c, g, or t
aagaggttagtagctaacagtgagaggcagcctcattgtttttagtttctagttgggtggaactcagccctagtgttgtatacttattaatcccattttagtgctttgcacatatccattgttattcagtgtttttctctgggtccttccagtttattttcttccttagctgtactcttttnnnnnnnnnnnnnnnnnnnnnnnnctnnnnnnnnnnnnnnnnnngtgataaagttaaaatataatgtaccctactttttttgtgcaatatgacacttacaaaacggccagactaaaggaagccagaggtgggcatggtaacactactgaaaagttgggggggtgccatggacaagggaccgaccgcaaagtatgtttgctgaggaaaataaaggcgaggatagagcaggcaggggaagggaaatgaaacatggagataggaggttaaagcagttgggagtccatacacagcctacccaacttcctgaaactcttagagaggaaaaggcatccttaggcatccttcctgtgaagtttgcctattccgtgatcacgctgagaagatgggaactctgaagtttgcttcacaagaaggtaaaatccttaaagggaggcaccttgctgtgccactgttcagttttactataacatcaatctttttttagtttttattcccacctcaagaggctgagttgaatactattaggcggggaatg

SEQ ID NO: 18263 - DNA, 561 bp, Homo Sapiens
  misc_feature (120)..(129): n is a, c, g, or t
  misc_feature (199)..(226): n is a, c, g, or t
  misc_feature (327)..(342): n is a, c, g, or t
  misc_feature (384)..(392): n is a, c, g, or t
  misc_feature (420)..(507): n is a, c, g, or t
  misc_feature (510)..(520): n is a, c, g, or t
tgtttttatggtttccggctaaaaaaaatattgggttttcaacccttacaggtgggaaaaaaggatatttttggcaaaaaagggtcaaataattttcccacgttcccacggttgaggatnnnnnnnnnnggggttttcatgccaaaattttgggcaccgccctcccctttgtggattgaaaagggggaaggggacctcnnnnnnnnnnnnnnnnnnnnnnnnnnnngatcaatcccccggtaaaaaacaaatttaacccttttttaagggcacaaacccaattcaagctccggaccttaaaacccctgattcccccccaaaatcccnnnnnnnnnnnnnnnnttaccctggggagaaaaccaaggggaaaaaggggtcccaaannnnnnnnncttagggtcatgactttcggggtcttcnnnnnnnnnnnnnnnnnnnnnnnnnnnnnnnnnnnnnnnnnnnnnnnnnnnnnnnnnnnnnnnnnnnnnnnnnnnnnnnnnnnnnnnntgnnnnnnnnnnnctccgacattaaaattccccttaccaccgttttacaaaaaa

SEQ ID NO: 18264 - DNA, 852 bp, Homo Sapiens
gcacgaggccccaattgtctttttattttgggttatgacgatcatgtttgataattacaatgatagtctctttccacgtgatgcttttgtttgaacctgataaaatttagtgaaactttgtaatgatctatgtgcacttttacttgtaaaatggaatttctgtatgtttatacttgtaaatatgattgttgttagtgctcctgttgctcatggtgtcctgcctcgcatttgtgattctgttaatgacatgtatcttaactaatttcttagtggtgttgtaatagggagatggggcaggtggggggttatttgtaccactgaatcttcattaatttggttctttactgttttgaggggagaaagaacgtgaaatggtttgtgtattattgaattttaagcaatattttagaagctgtgtgactgctttaataactttttcccagtgttatttgaatcatactacccgttatactaaagctgaatgacaattgtgtgaaagttactgccttcataagatcaagtcaccactgttacacagctgacatatagtgtattacctttgcagctagtaaactataaagtttagatattgaatctcgttacagggttatttatataatgtgacattattcagtactgacagactacatgaaagtagttttaaaatctagtgctatttttattttaaggttagcaatgaggaggaaatgtgatctggctgtgtttgtcttctgtacaaagcctgaagtgcttatggttttttggctaacagccacagagggcaaaggtttaagactttcttgtaggactaacctgttcttttcaagctactgtttgtttttctaaaagcag

SEQ ID NO: 18265 - DNA, 988 bp, Homo Sapiens
  misc_feature (477)..(625): n is a, c, g, or t
ggttttaaaaaaaacaaattttattaaaggaaaattttgcagggttaagggttgcaggggaaaatttgtaggggaaaagggttaattttcaccagtctggtctgggatggttctaaagaaggcaaaatcacctggatcaatgaaaaccaggggggacactctgtaataatttccgcaaggtgggccccgttcaatattattggcactggagtgagggacaccagttttaacccacataacataatactctatttcttaattcctcaaagctgggcaattgttaacgagaaagaacaatttcgctttgccctgtctgaacatcttcaaagactggttggaccccaagaagtacttcccacttttcataaagagttgggacctaaagttgattcactccagcgactttttcgtcttctttgcgggcaccatctttctggcttaagaaggggacgggccccaaacaacacaaccgctaannnnnnnnnnnnnnnnnnnnnnnnnnnnnnnnnnnnnnnnnnnnnnnnnnnnnnnnnnnnnnnnnnnnnnnnnnnnnnnnnnnnnnnnnnnnnnnnnnnnnnnnnnnnnnnnnnnnnnnnnnnnnnnnnnnnnnnnnnnnnnnnnnnnncgaaagagggcgcaacgatctcgctccccaaaatgtccacctgaatagggaatagaacacccctgtaacgggcgcataacgcggcggtgtggtgggtaagcgcaacgggagaccgtaaccatggtgaagccctaacgccggctccttactttacttacctcctttctccacagttcgccggcgttcccctgaaggttcaaatagagggggcccttagggttcaattattggcttagggccctctacccccaaaactttaataaaggtgagtttaccctaggaggccatccgacttgaaagaaaggttttcgcctctgaaggctgggaatcacccttctaaatatagagacatcgtggttccaa

SEQ ID NO: 18266 - DNA, 924 bp, Homo Sapiens
  misc_feature (445)..(464): n is a, c, g, or t
gcacgaggcttgtcccttcttctgtcaagtggcttttggcttggtcaccactttgctggtgtttctctccagaagtgagtcccagacttcaggtgtggtctgactcacgtcctatcgggtctctccctctgaaaaccgtgcttgtattaaagcagcttgggagctcattaatgttcttggcagccaggtcctacccctgacagtgcaggagctgcctgtccacttaggggacccctgtctttttcacacgtgagtctgttaagcctcacctccctcatcgcctccatgtgtgcggcagttttcaacaaatgttcagagtacaacacctgcccttgttaaacgtaatcttgttacactagtccccttgttttaacttctcaaacattttgagtcttgctcctgttaaccaagaagacctagaaagctccacatctcctcttaaaannnnnnnnnnnnnnnnnnnncgtgtattcgtacgcacacccctgggtacagctctgaggaggccacctataggtttctgaacaatcttccatgaatacagctcattcatacacacatttatttattctgcaacatttattcaacattccctaacaaaactttcattcttgagcactttttgcccaagcattacaggggataatagaagcaaacgaatccatactaaggagtgaattattgatagtgctcacctgcatttttttaagcagaaagtactatttattttggcctaatttccacctgtcagaaaatcaaaacagtgatgaattgcatattgctatactacattttattatcagcattcaaaattcaagtgtgctctgcttaaaattcagagacaaactttctcatttacaaaagttcattctgttagtgactgattagaaggaataaatttcatgatgccaaaaaaaggggggg

SEQ ID NO: 18267 - DNA, 734 bp, Homo Sapiens
gcacgaggggtaatcttcactcaaaatagaatttcttaatcaaatagtatgtgtcgttatgctttttatggatgttgccacactgtactgagttatgtttgttcattcagaaaatatctcctgagcatctattatgtgtaagcagtgtgctgcgtgttagcaaagagactttagctgccctttgtgcgtcctaacagtctagggagggagtagatattaaagaatcacacaaatgcctatacaattacaattccaacaagtgctgagaaggggagtgacatggtacaatgagagcatagaatagggaggatttgacttcaacaagaggactagaggtttctgtggggaggtctgagcaaatatctgaagtataagtaggtgttaaccaggtagggatgttgtggagagaattctgaacgtaaggatcagcagagaccatattaacaggaaaatatatactgtgttggaggaactggctagggagactgggccatgggggtagtatggcgttaaaatggagctggaaatatgaataggagctgaaaccatgcagagctatgtttaaggttttagtcactaccttaagagcaatagaaaaccattgaattttttttgttggggatgagtgtggggaacacattcaaatttgtattttcaactatcattttgctgctgagtggagaatacactgcagagggaaagaggtataagcaggagacagttgggagtgtttg

SEQ ID NO: 18268 - DNA, 704 bp, Homo Sapiens
aggcaaggaccttctttattactaacagatgttttggttgaaccacattaggtataaacatttatatatatctatagtctacactgatacctaacgagaagtacagcaacaaaaactctgcaaatacttttaattgacacgattctagatcaagaagacagatgattcagaaggctatcaaattattagatgatattatgatcaatgcagttctcttagcaccccctttacgcaactagaatcctaattataaaatagtaattattattatatgacaataatactatatttgatagaaaagttcacagacaatagagagatattttcaaatacacagtatgagaaatatcatttcccaacaaagacagtcctggatatcaagcatcagctcatttattataaaagaaataaacttttactttttaatgagatagttctaaacatcctatcaggtagtttttatccctctgaaaagttaaagaaaaagtctgtgccatgcagaatgaagacgagggaaatctgcaattaaagtgttcattttgacaatattttaatcttgcatattcagatatttatcttaaaccatcaacaaatcctaaatcacagaccaaatccgtcttatcatcctgtctccaaataatactaacctgatgcacccatggggaggagctgggtcagttgtgaacttggaacaaaactctaaa

SEQ ID NO: 18269 - DNA, 775 bp, Homo Sapiens
  misc_feature (682)..(690): n is a, c, g, or t
ggtttagcttcttgcttatatcatcaggaaatgataacgccttgagtaacactttcatttttggcttgtttctttgattactcctacacctgacagttcagctgtctacagctcagttgagctcctgacatttaagatatttttttactcggtgtaaaattctacgttggaagttattatctttcagcaatttaaaatttaattccatagtttttgagcctctactatgacattttcccccatggattaatttgctttcatttttttccagcacttccttacattttggcagtacagggtgctgttaaatcaactttagcttaaagctgcctccttacatattttaaattcagcctaaaggtttctctgtgtatagtgaactataacctaaatggaggtgtaagccaactataacctactcttctgccaatcaccgagttttggccaatcaaatgggaccaactgttcaaactgcgttcaaatactgtgttcaaaaactgtgctcaattaaactcctttaaatttaatttggctaaggattttcttctaatagtgctataggctcatcttgtatatttcctttcccagtcctagaaccagcactttcttcaaggagtcctggtttcttttgttggagaaaggtattaggtgctaaagtgtgctcttttgctctatcatgtcnnnnnnnnncctcctcctgctttactgcatcctttgacattaatgttttctaatataatatttattttattattttactacatattttgaagtg

SEQ ID NO: 18270 - DNA, 809 bp, Homo Sapiens
  misc_feature (471)..(529): n is a, c, g, or t
gcacgagggaccccttaagatggctcgcggggctgatgaggtggcttcggcctcggggcctgggtggacacttggtgagcttggcttcctcgtagcatgttggagccaagagcaggaggtccaggggacaggaagtggcgagggcctcccctaggcctggcacggcttgagtcacactggtcagccatggccgccctgctcaagaggaggccacagggacccccttcgtgatgggaggagggtccaagagtgtgtcgctgtctttatccggccgatttaggcttagaatggaaaacattgaaaaatgaataatttataaagaagaaaatgaatggctgtgtgctcacgtagaatattgcctagcacacagcgaaataatagttgttagtgttatttattttaagtatctgtttacttttctcatatatgtgttttttccaaaactggaatcatactttaagtagagttctnnnnnnnnnnnnnnnnnnnnnnnnnnnnnnnnnnnnnnnnnnnnnnnnnnnnnnnnnnnaaatgttaaattttaaaaacagatacatgtatctgtttttacagattttttaaacaaatttaacatttttcttggcatatttacattttatttaaatattcttcgatccattattgtattttgatttgaggtaaattaatacagatacattacttcccttttactgctgagaagagacccaaagaaagttgtaaccttctgtgttataattatgagtgtgggctctagaggaagactgtaccattcccactgtgaaatcttgaccagttacttatttttg

SEQ ID NO: 18271 - DNA, 880 bp, Homo Sapiens
gcacgaggctgcttctttggatgaatcattgttaataaaaagctgggcatttagaattttgccttataagcccttctccaaccataagattattttgtaccaaaaactttggtgttctctaccaaagcagttaaaaacttttagcctgctacttcttgtatttgtctactgacagccccttggtactatttaggttgggggaggggacctaaaataaatagactttaacatttcccttgggtgctaatcatagttggaagttgaatttaaggtgattatttgggtgacaattaaaaacctaaggaaaaccagaaatcttggtagtggaagaaatgtgtaaggtcaccccaatcggtagattttaatgaacgttgtggaatgttgggaagaggggatgttaagttgaatgcagaatttcactaagtacttagtgtaagtttaaggatgtagctctttttatctaagaattcaatgtaatggccaaaaggcagatttactgtttaaaaatttgaataattttacatgacattcttgaaattctaagaagttttatgtgtagaacattttaaaaattcatcagattattaaagggaaaataaatgattaatgataattttggaaggttaatgtgagctagacttaagtaaactttggttcatttgtgttcattgaatgttttggaaatgaccaaaaaatgtaaatggccttcactcaagtttgagtgtttaaagttgaaagatgtgctctactaaaagttatagtaattctaactcacattgaaatgagacagtattccttgttatacaggctgaatttgaagattagagaggatctaatgtttacttagtaaaggggcataggttttgtagtttaggatgac

SEQ ID NO: 18272 - DNA, 853 bp, Homo Sapiens
gcacgaggcctaagccccgtgccccatgcctccggggcccactccactgggcccaccctggacctgttttccactaaagccttttggaaagcggtgatttgaggggcaaggtgcttagagatactcgctcgctggggaaggggggagggaggcagtggtggctggagggtgcgccactttcagagcctctggtcaccctgtcctggaaagattgggagggggccagactgaaaattttactagagttacaactctgatacctcaacacacccttaaatctggaagcagctaagagaaacttttgttttgccagaggtggccactaaggcattctgacgccctctgcccacctcccccgctgtgtgtcactccaccccttcttccgaggagggggtgggtaaaagggagagggagaattaccacctgtatctagaggtgctctttgcaatccctaagccctctggtcctgacctccgacctcctaacatgaccctttacctcccaccccacccccatatcctgtttgggaaactgtcaccagtttccagcagtgtaagggagttggagtcctatcagaagttgcatagatcttctaggggttggggagagaagcatgtcaatcgtttctgtggctgaaaggctcagaagccatctgtccccacaaagctgggctagaggaatctggagaggagtcctcctctctgcccctgtcccctgcagtgtttcccttcactctctccgcctatcttcccttcctttgggatcttcccttttctccactctttcctttcccttcagctctttgctttgctttcttttggtggctgtcactcccagctctgtcttgtccttg

SEQ ID NO: 18273 - DNA, 573 bp, Homo Sapiens
  misc_feature (282)..(292): n is a, c, g, or t
ggggggaaacccaagcctttaaccttaaatggcatatatctgaattggtaaccagtggcaccttttaaggggggtgaagtacacaactcccaagagaaaaaaaatttaattttttctctctggagaagagccccctctcgggacccacaaaaactttttttgttcccctccacttggaacttctcaaacatccagggttttgaaggttttgcccttcttttatcttgggtccctgtggatgacaaaaattgtggcggctgggaaaagatccccccccttaannnnnnnnnnncggctgctcctatattaaaacttgggctccaacaaagggcgagggctcctgtaaagatatccttgcccaggaacaggaaaggccaaatatattatctcctgtaggggctttggaaaaggggggcgggaccccaattccctatattgagttcgattaaacgcgcctcatggcgtcgttaaaacgtcctgaatcggagaaactggcgtatccaatttatcgcttggacgataccccctccccgctgggtgaatacgaaaggccgcacgaatcgccttcctaca

SEQ ID NO: 18274 - DNA, 770 bp, Homo Sapiens
gcacgagggtgacgcattacccatttctttgccaagggatattaatttacaagtggagatatgcacatatacatacatttatatagtcactcatacagggtagctgtgttccataaagtcacctcaagcaatgaattagcgaatgctggaccactgctcctaggggaaatacatggctaggtttctgtgagcctctggtcacatcattttcagcaacctatcaacacataagcttgtttcgtgtgtttctgtgtaaatacaccgtatttaatatatattgttgattccttaatattgaattcatggccaatagctctatccctatgcctgaatgaagcttctctaatgaacattttctctggtcaggcagtttgcaaccttcttgcacttagggactctagacagcactgcagcactatgcttgggagccattttaagcagcaaaatcacccacaaaatgcacaaaaatgtgaaaaacgtggcactaaatatacttcgagtatacttatttacagtctgagagctgaaacaagaaggcagagtattgccttgttcagcctcagctgggaatgtgcataccgggcaactcaactttcaccgctctgcacatgtctgctaataactgcgaaagaagtgcctcaagtattaagatacaaatgaatcttagccagtaggcagtcacaatgtggaatctacaagtaatgaaattcactgtataatacacgctctatgtatgtatgtttgtatacatgtaatttggagggctggtt

SEQ ID NO: 18275 - DNA, 703 bp, Homo Sapiens
gcacgaggcaattgcattaagataagtgtaaagttcaaactgtagtagtaagtgcagtattagtgaggaaggggtttctttccaagaattatttcaaacaaatacatagaattttgtgggaattcagacgtaagggatgaacgactgaagcgtcagagtcttaagagtttgagcatggttgaatagagtgacctgtgaaagaccaaggctgtggatgtcagttttcatggcaatgttttgaggagtgtagataaaagtatgagaggggatgagctggaagcagccagtaggcttagatgccttaaatagtatacatttaatgtgctaaagggcgttgatgaaggaacagggagcatgctatttagagaagtgagcatggatatcaccttttaaaccattagttagcagtggctcaggtattttctcgatttagagactatagcataccatgtcacactaggaaagcgtatatgaaaatccagacttataaaaattaaagagtagttgcatttaaaaggattcttcattttcagcaggattagtcataaaactcattttaaagagttgaacttcttaatataaaagaagatgttttaccaaaatttggttagaatgcagtcctttagaattgcactttttggggacatctgcattcaaataatacctgtcttctagggtaaaagatgccatgggaaaaattgcc

SEQ ID NO: 18276 - DNA, 879 bp, Homo Sapiens
  misc_feature (382)..(390): n is a, c, g, or t
taataataataaattctagtattcagaagtgtgtgacggcaaaggccaagcatcctgggctgtacacagtgagggagcttttttaagttgggggcattgtagtcagattgtgctttaaaggcatactccgatggctgtgtggtagattgggttgaggagtgaccaaatggaagcaaggagagactgttgaggagacttttgcaatggtctaagtgagattttaggggtctgaactaggaggaaactttttataggaatgaagaggagactgaagattccaaaaatatataggacatcaagtgggtaggactcagtggttgattgattgtggagacaatgagagagtgaagagtcaaagatgatggctcaggtttcttgcagnnnnnnnnntggtgccaccaacagagaccaaaaaagagtagagaagaaagtttaagttggttacctttttagatgcaatgagtcctgaggtatctgggtttccttcaggtgcagatctttagccactaactgggaaaagacagatttgttatatgttaataaatatattttccttaataatttcccttgagattttatttgctttttgttgtccagaagtttccaacatttgtgtagtcagtgctgttcatcttcatttatatttctggctttagttcatagagcatttcttttccccaaatgatagaagtatttaccacatttgttagctttaaatattgtattcatcaaggattttattttgatgagtagattaagtatgtaaagaaaccggaagagcattttcagttgtagaatatgattaacatgacttatgtttcccagggtgtggcataaaatatgaaatactggattttttcttttaaaagtacctcggac

SEQ ID NO: 18277 - DNA, 925 bp, Homo Sapiens
gcacgaggctcatcagccaagtaagtgtatgtaacacaaagtgatgtacgtaacaaaagagtcaagagtgccgtgggatttacagcaagggaacttcatctgagcttgagaagctgggagtaagaggtttcatcggaaagtgattgcccacagaagtaggggtgttcgtcatgtgcaaagggcctgtggcaagtaaaagaaaccctgtgtggccagagagtaagaataggaggagaaaacatgctgcagatgtaggcggggcccagattgtagacagcatagaaataattttgggcttttcctgttaaattcctctagcttctaggatacattttttttaacttttgtctttgagataattttagatttacagaagagttgcaaaaagagtagagagagttcctgtacacccttcacccagcttcctctactgctaacatcttacataatcatagtttcaacctgagaaattagcatggggtacagtcctattaatgaaaccccaggctttattcagatttcaccaggttttcagtaacatcctttatctgtttcagaatttagttgtcatgttttccttagtctccttcaatttccacacactgaaacatgacattttaccctttactagttcagtatatcccaaaaataaggataagaaacaagttatcacaccaaaaaaattaaaaacaattctctatattgtctacttcctagtcctttttgttcttaaggtatcatttatggctatttattccatcaaggtttgcaatcaaatttcatactccgcattagttattgattctctttagttagctttattctagaactgcactatgcagtatggtagcactagtccatccccccgtaaaaataaaataaatgaatttaagaatcagtttcctcagtcccactacctacattc

SEQ ID NO: 18278 - DNA, 634 bp, Homo Sapiens
  misc_feature (69)..(88): n is a, c, g, or t
  misc_feature (115)..(219): n is a, c, g, or t
  misc_feature (233)..(347): n is a, c, g, or t
tgggcatctttgtagtgtaccacctttaatttttccatttctcacttagcacctagattcatcattccnnnnnnnnnnnnnnnnnnnnctttgaaacagggtcttgctctctcannnnnnnnnnnnnnnnnnnnnnnnnnnnnnnnnnnnnnnnnnnnnnnnnnnnnnnnnnnnnnnnnnnnnnnnnnnnnnnnnnnnnnnnnnnnnnnnnnnnnnnnnacatgccaccatannnnnnnnnnnnnnnnnnnnnnnnnnnnnnnnnnnnnnnnnnnnnnnnnnnnnnnnnnnnnnnnnnnnnnnnnnnnnnnnnnnnnnnnnnnnnnnnnnnnnnnnnnnnnnnnnnnataagcatgagccaccgcgcccagcctaaattcgtcattctaaactgcagttagaatcatggtattccctctttaattcagtgtatcctcattgtctgtactagggtaaacgtccttcacacggttcataaggcctttgtaccacggccccagctcacgtctctagccttaccccttacatttgtattacaaccctgtgcacgatccattctgaacatttaccaattcccttaataaaagccaaactttccttacctctgaatctaaaaatcctatgcctggaaagg

SEQ ID NO: 18279 - DNA, 892 bp, Homo Sapiens
gcacgaggcattaacctaagcctgtttttataatgaaaaaatgtgttaactttaaaatatgccaacctccttgtgtcttttaaacaagtcagagtgaaaatacattgtcccctaaggtgtggggagaggaagctttataataaaattagtgattctgcagaaacttgtgcactggatatcttgacaatatgaatataaaactccctaaattaaaaatagggttaatagaaattatcagtatttaaatagggaaaaatgattttatgtttattttatttaggttttatttctttggtcatcttaatgcaaaatgaataaagcatagaatctgggtttggtgtttttttgtctgtttttaaaattctacaggattattactaggaggcaaaaaatgctgtttagaatggaaaaaatttgaagagagaaagcagactgagacactcaagacacctgcaagttatctaagaagatctaaatagaattactaaattttatagtttgcttagagcatttagaaggagataaaggtcttacatactatagtgtatattgtctttggtctctatgctctttgtaaatgtcaattaatataaacagcatctgaacagctaataaatcttttaagttaagatacccagaaaaatgagcatttttagaatttcagtagctaataattcaggaatggaaatattttaactgaatgggacagaatcagtccctaacatttgtatgtatgtcctttatttgaattgggaactagctcataagtgggttaattttccattagttgatgtagaaatctggtttctccataatatctacaagtgaagatgaagattacttctcaaaaagtatccatatttccagtgttccttttaataaaatatgccac

SEQ ID NO: 18280 - DNA, 922 bp, Homo Sapiens
cgtgtaaacatggatatgataaagtgtcagtaacaatggaaaaggtcccagaggcattaggcatctaagaggatgccctcagaaacgtattctggcttgatttgtgttattaacttcagaagaaccttttcaaatgtcccagtatcgttcttagtgctttgggaaaaaatatttaacacactgttaataaatttgttatcagaagtttacaagacgaagggcttctctcgtctgaatttctagatttaagtcatgaagtgtaaaactgtttcacccagaagtgtaactaagcagaactaggagttttctctggcttcacctttttcagagccagcagtgctgttttctcaagcacagcgtttgctcttagactctgatctgcttgtgcctaagcattgcacaggtttccgaagacgggcagcttcagagaagaggattattcgggagattgctggtgtggcccatagactctttggcatagactctttcgcaggcagccactctgagtgtggccagttctataaccatccccaaactagctggagcctgatggataggaacgggtagtctgtcctcttccccataaaaatgttccaaaaagttatctccagagagagtcccttatgaagacagttgccaagctgtattctcattctttaaaccaatacccaggtcagggctagttcacactagcactgttagggacatggtgtggctagaaatgaattgagtgtgacttctccctacaaccccaggcccagggataggaggaggcagaggggtgcctggagtttctgcactctcatcagtgatgttcatgttacacttgcacaagggctgatttccacgtatgtgtgtgttaatttattcacttagtttcaaagattttctcctccccagccattcagaggtttccaactaa

SEQ ID NO: 18281 - DNA, 707 bp, Homo Sapiens
gcacgaggcaagaataaacaacaagaagaaaggaggtcattgtagactcttgagaaggcaatttctgtagaattttggaaacataacttttgatggatattcattcattcaacagagaatgaattttattgagaattcagttttattaaccaattccttaagtagcagttattatgctctttataggagcttgctggggacacagatgaaaagatgggcctctggccttcaagggtcggacagtgggagaaatgacagatgtaaacaaataagatgcagtttgaagcccttttatataatgaagtcctatgggaaaccctgaaaggaaaggatatcttgattttcctggggaatctgagcaggcttcacaggggaagtcaatctggacttgggctgggacttgaaggatgagcaggggtttgctagagtgtggcattccaggcttgagcaaaggcctagagctctgacagtattgagggaatggccggtacttagatactggagaatggtgagagatgagggtgcacaagccgcttgccagggtcgaattctggaggcctggagtcctccatctggtcatttgagttttatgttgtagcaacagagaagccagaataggatttttgaaaataattttttttcatctaccacttgagtatatttagagataaatatgcattttagactttgtgcaggtcacaaaggaa

SEQ ID NO: 18282 - DNA, 775 bp, Homo Sapiens
ggcgtgagccactgcgcccagctgattttgttttttaaagtgttatattttcattcattcagagttgaattttgtaatctgaattatggagtcatatcaaatggaaccaaccagttaaaccagtaacttatagtgtatttcactttcttcaattgtatttttcctttagtgaacaggtggaagcattctggataagggagtagtgagccctttaaatgccttacctttctctaaaatagggtatggtctgtatttgcttcagtactccagagcaatgccattttattgtatttaagtcaatccattttacaaaacagaagtaattattctgtcacaaaaggaaagacgccacttttagtacgtacatatattccatattaagaacaaaattaagtaactaaacttaagtttcttagagttgcctggatagtgattaaatgttcttctcatcttaaaatattgtttgtcatcttgaaatttatgcaagtaagtacaaagttatataaaatatactgagttttcattattgctttttctgaaattaaccccagcccctagcctgaataattatccttttgactatgcaaaggtatatttgtatgtcctccaaaacacacattgtgctttgcatatagtaggcctcaatacatgtacaatgtaaggatggatataatgatgtttgtaatttccacggtaatgtcccatgtatagtctcttgatttagaaaatctcctttatatttttctcagagtactgcatttaaacaatggtgaaa

SEQ ID NO: 18283 - DNA, 713 bp, Homo Sapiens
  misc_feature (244)..(490): n is a, c, g, or t
  misc_feature (519)..(663): n is a, c, g, or t
gcacgaggagagagagaagccaaggaagccaaactcatttttaacaacttgctatcatgggaactaattcattctctcagagcaagaactactcacctctgtaggagggcattcatctattcttgagggatccatctccctcacccaaacaccttccactagcctacctcccaacaccaccacactggggataaaatttcaatatgcattccagtagggacagaccacatccaaaccattgcannnnnnnnnnnnnnnnnnnnnnnnnnnnnnnnnnnnnnnnnnnnnnnnnnnnnnnnnnnnnnnnnnnnnnnnnnnnnnnnnnnnnnnnnnnnnnnnnnnnnnnnnnnnnnnnnnnnnnnnnnnnnnnnnnnnnnnnnnnnnnnnnnnnnnnnnnnnnnnnnnnnnnnnnnnnnnnnnnnnnnnnnnnnnnnnnnnnnnnnnnnnnnnnnnnnnnnnnnnnnnnnnnnnnnnnnnnnnnnnnnnnnnnaccctgctttggtataaaataaaccatgnnnnnnnnnnnnnnnnnnnnnnnnnnnnnnnnnnnnnnnnnnnnnnnnnnnnnnnnnnnnnnnnnnnnnnnnnnnnnnnnnnnnnnnnnnnnnnnnnnnnnnnnnnnnnnnnnnnnnnnnnnnnnnnnnnnnnnnnnnnnnnnnnttggggtatcagatgaagaggatggacttgaaaagagcacaggatggact

SEQ ID NO: 18284 - DNA, 751 bp, Homo Sapiens
gcacgagggaatttatataactgcctttgtcttttaggatcacagggctcaggtaaacgccaacattcccagtccattctctctctctgctcttctatccctgacccaaccagcctctgcatggaagcctctgaatggagcctctcactcccactcccttcacatttgcctggccaactcctgctcatcatttggtaatatgcataggcaacccctctcctgggaaggtgtcccaaactacctctcaaaatatgtctgaacagtagtgtgtcctctctgtaggttaatcacactgcacgtcatatctgcttagtccttgaggacagagctctgtcttgctcattgttgtaccctcagcacttagctcaatggctgaaattctgcaggctttcggtaaacagtgaataaaagcatgttgggggaggtgggggagttaccaaagctgtgacttttggaaatcagcctgttctcacagacagctgagagacagaaccatctccggatcctccgcacattcacagagtgatgcttcagcggcttgatcaaccagccctctaccctggggattcttcactggcttttcacatcagctgacaattaatgtgaaggaaaatggaagaaaaaacaatgtactgatttccatttcatcttcttagctgttatgaaaaagttctttcagcacatgggttgaaattaactttttaaaaatggaatagttatctggtttaatataactgatcactgaatgatg

SEQ ID NO: 18285 - DNA, 632 bp, Homo Sapiens
gcacgaggcttatgatcattcaaatctaactgagctattgtttttcttggaactatcaaggaagaaaatgttcaccatacaaattaatatcataaatagaatctcctaaaagagaaaactaatttaaatacgttagcacattgttttgctgtgacagtcaaatgagtttcacttgaataagtgatatatgtaaggaaggagaagatacaaccatggggaatgaataacagattaagaggatgtgtgcagagcctgctactgaaactcctatagacagcttggctccagagagggatggactgttggagacagcacagttagggcacaggtcatatatacacagaaggtccagaaggtccagcaaccactgtaaaataaataggtgattgcttaggatgttgtatacattggatagcactagatcctggcatcaagcccagttttctatggttatataaatatatcatataaatataatttttaacatccttttagaaagggttttaaaatcctgctttgaaaggaggcaatgtatttgaagacatttaaacaacagaatacactaactatatatagtcatatattttacttagaacaaataaaaactcttcataagttctctgtgacataag

SEQ ID NO: 18286 - DNA, 923 bp, Homo Sapiens
  misc_feature (501)..(539): n is a, c, g, or t
gcacgagggaggttgctgggcacctaaatgatgtttcatgatagctttgggtgattttactgctatttataatttgctgtataaagtgagcattacttaatttgcaagctgatttctcacagtgtaaatttgttcattcctggtagtctattttctataaaaatgtatttttgcacaacatttttaaaaactggtgtaccttcatctatgacgtgttccattttgacaaacagctttcaggcgtaaatccagagaagtgctttatatgaaatgtattattttgaacagagtttgtgatttggtagttattttatgttgttgaaatttgaatttcacaattcttagataattatttcaaatggatattgatgcattcttgttaccagatgtttggcccattccattttgatgaaacagagctgttgttttggaagtcattatttttctagaaatggcgaatcttttaaagaaaattacttaatggaaggttgtgggaaggtnnnnnnnnnnnnnnnnnnnnnnnnnnnnnnnnnnnnnnncctcttttaagggatagtagcaggtcttacttgaatgaaagtctgatatttgctgatggcagaatgattattctgtaccctggttgatgtgtagagtagattgtctggtgctctcagttgtttttatttacatttgtcacgttgttgtaagagaatgttaacatggtataaaactctgtgacaagataagcctcctgctttatataacttcttgaatccagctaagagatttataactaatggcataaatgtctggagccaaccttggcagttatagcaggagaacactgtcttaatatttctttacattcttcaaaaggcaaaatagattgcccttgtattgatgtaaaaatgtctgtaaacagagcttgtatggttgctggg

SEQ ID NO: 18287 - DNA, 264 bp, Homo Sapiens
tttttacctatttacctactaaaggacatcttggttgtttcaaaatattgttatctttgaacaaaagctgttataatcatttatgtgcaccttttccatagacatgttttctattcaattaggtagtaccaaggaacacaatatactttgctttgttagaaatcttgagattgtcttccaaagtgggtttgttatggtactccagaattgaatagaaaacatgtctatggaaaaggtgcacataaatgattataacagcttttg

SEQ ID NO: 18288 - DNA, 906 bp, Homo Sapiens
gcacgaggcttttctacccagtcatcagtgggagtgaatcagtaggaatgtggggaagggagtgaggggagacccccttcttgactcagcagtggtgacggtcggtgtgtcctgcagacctgaagccaagatcaagggcgcttgagcaccaggagcccccgcagttcctgaatgaccagcggagggcaggtgccagcctgtggcaaaataggaaagaaaaggacaggatggggacttcaccatttttttcagccttaaattgttccttaaaccttcatgtccttttctctaatgtatgttcttgtttggtaaaataaaaaagtttgtaaccctgagttctctaaagatatacattcttttttactggtttgtgaagtcagaaggatgagagctgctatttcttggaaccgtgcaataaatattagcatattcagtctcagttctgcctagaggacctatttgcttttctttatctcgtaacccataactcacaggacattaaccagggtgtccaagaacagtctgggaaagttttgataattacttcagcattgctgtgtgatgggagacattgttttaaaaaccgaatgtggtagaggttaaaaggacagccgtcaccatcctgtttcaaccaacgcttgactgagaactctttctggaaatctctcgaacagacttccaaaagttatatgtgaaaaagcactgaaacctcacataacgcaaagatccactgcaatacaggcatttaggaaatcatttacactacccttgctgatcacttttcacacttgatcttagccaaaaggcccagaagcgatgtggatacttttcaacctgtaaaataaccaccaatctgcaaaaaactaatttgaacactaataaatgaccaaatttggggggggccgg

SEQ ID NO: 18289 - DNA, 775 bp, Homo Sapiens
gcacgaggactggggtctggaatcacaaggacgagttaccgattgagattgaactaggcatgaagtgctggtaccactccgtgttcgcttgccccatcctccgccagcagacgtcagattccaaccctcccatcaagctcatctgtggccatgttatctcccgagatgcactcaataagctcattaatggaggaaagctgaagtgtccctactgtcccatggagcagaacccggcagatgggaaacgcatcatattctgattcctacctggaaggaattttgttgaaaggggttttcacctgtgagccttggtctgtctcggtagggtggtcaacttcagtggactgtggttggtttcagagcgcctggctgaggagttccactgaggggagcactggagcagccctttggcagaggctgaggagggagatggaccagcccacgcctggcacctggctccatggcataaggaaagggagatgctggcctctgtgctcctgctgtcttttcctgtttctgtttgcgtttgacttagtagcaaccgacagagtggcaagggatttggtcttcagcagtagacatccttccacccctgccctcagccaagtctcttgctgccatgccaatgctatgtccacccttgcccctcggcccaagagtgtccagcggtggcccacctcttcctcccactacagccctcaacagtatgtaccatctccactgtaaatagtcccagttagaacggaatgccgttgttttataactttgggggggg

SEQ ID NO: 18290 - DNA, 825 bp, Homo Sapiens
  misc_feature (131)..(663): n is a, c, g, or t
gcacgaggattcattccagccaggagacctagcatttgttaaaaagttccaaaaagaaagactcactcctgcttagaaaagacctcacaccgtcatcctcacgactccaactgctctgaaagtaggcggcnnnnnnnnnnnnnnnnnnnnnnnnnnnnnnnnnnnnnnnnnnnnnnnnnnnnnnnnnnnnnnnnnnnnnnnnnnnnnnnnnnnnnnnnnnnnnnnnnnnnnnnnnnnnnnnnnnnnnnnnnnnnnnnnnnnnnnnnnnnnnnnnnnnnnnnnnnnnnnnnnnnnnnnnnnnnnnnnnnnnnnnnnnnnnnnnnnnnnnnnnnnnnnnnnnnnnnnnnnnnnnnnnnnnnnnnnnnnnnnnnnnnnnnnnnnnnnnnnnnnnnnnnnnnnnnnnnnnnnnnnnnnnnnnnnnnnnnnnnnnnnnnnnnnnnnnnnnnnnnnnnnnnnnnnnnnnnnnnnnnnnnnnnnnnnnnnnnnnnnnnnnnnnnnnnnnnnnnnnnnnnnnnnnnnnnnnnnnnnnnnnnnnnnnnnnnnnnnnnnnnnnnnnnnnnnnnnnnnnnnnnnnnnnnnnnnnnnnnnnnnnnnnnnnnnnnnnnnnnnnnnnnnnnnnnnnnnnnnnnnnnnnnnnnnnnnnnnnnnnnnnnnnnnnnnnnncctactctaaaagatcaaccagatcttcaactctttccataactcgtgcttctcatcctaaattatgtactagaaaaaactgtaatcctctaactgtccatgaccttaattcaactcaatagtatcatggcatgtcctgacattaagattttatatcccatg

SEQ ID NO: 18291 - DNA, 780 bp, Homo Sapiens
gcacgaggtttaggttgaaggggtccatgtgcaggtttgctacatgggtaaattacgtgactctggggtacaatgtacaaatgaaatgacttcgccacccaggtagtgagcacagtacctgagaggtagtttttcaatcctcatcctcctcccaccctccaccctcaagggggtcccggtgtctaatgttcccttctttgtttctatgtgtactcaatgtttagatcccgcttataagtgagaacatgcagtatttggttttctgctcctgtgttaattcttaggataataacctccagctacatccatgtggctccaaaggacatgatttcattatttttcatggctgtgcagtattccatgtgcaacactcccttaacaggtgactcattctctcccttcctactgccaatgattttcctattaacaaccataatcacatctcttaaaacatttcaatggttgcttatatcgcaagaacaaattgggactagcatttaagttccttcagattctggtctccactcagatttccagcctcatatctcaatcttctattctttgcattcatcatgctgaatttctcatgattctctgatctgcaaagttcactcaaatgactccagagcttcatcattccttcccttctaaagcatggttcttcagcaacgagtttaaataacgcatcttaattgttctgtgaagctttttctgaccacctcgggcagagttaacttcatgtttagtataccagtggtttcttcaatttccttctttttt

SEQ ID NO: 18292 - DNA, 251 bp, Homo Sapiens
gctgctggaactcatggtagcccctttacttgcttgggggtgcatggtaggtgtttgggggtgttccttcacagattcttaaaactcaaaaggctcacagtctctcctctgtggaatgtgggcctcctcctaccctcaatctacctgggaagcagagtggggaggaaaatgttggcccgtccaggatgtactaactcttcctctgtaaagggaccctcctccttgattatctctctcaccaagggtgtggc

SEQ ID NO: 18293 - DNA, 507 bp, Homo Sapiens
gcacgaggctcccgcctaaaagataagttcccagttctcagtgacttcgcatactgcatatttatagctcacatatgtaaagtccaaaacatgtgttctggtcaaagagggctttcccccatgcaggcatccaggggactgggtcccttccttcttgtggctcaccaacttcaacacacagtttccaaggtctttgtgccctggcagaagtagaaaagacaccaaaaaccactatgggggattcttatgggtcggtcttagaagtggcatgcgccactcctgcttggattccatgacttagaacctggtcacctggactcacagctgcaagcaagggtccaggaggaaggagcggtccagctggtggtgagctagctcatctccacaacacccaccaaggctccaaagacacctctcagcttagctttcactggtggattggatgctgttctcatttgatctatagatcctagcattttggagtttgatgaaagaagggcaggagag

SEQ ID NO: 18294 - DNA, 619 bp, Homo Sapiens
gcacgagggtcccccttctctcaacatcatgtatttgtatatgggtgaaactcctcaatgcagataagcataagcctctacagaaacaactgccaacatgctgtggcttctcacctggagataagttttggagtatatggatatggcagtgggtcagagaaagctccaggcatgacatatccacgcccgcaaccaagaggaggcaaactgggacagatgagctcagcaaaaggaagttagacgctggctgtgaccagtggttcctggcagggtgtttggagagtggtttctggggataaatctttctatctcatatcttatgtgcctatataagactgatgtaaacttcaatttacatagattaacttgcagaaaacagaaagtactggagtaagaaaatgccagaatgaagatgtccaaatattatgaaatgtaaacgcattaatgaacatttgcataagatgaaagatacttaaatctacatgtgaactatatttaaagaaaatacagaactttctgcagaagcaatgcatttttaagtatgttaaatttaaagcagcttgtgaaatgttgaattaatgtatcattatgctaatttacataaatcgatttatctttt

SEQ ID NO: 18295 - DNA, 790 bp, Homo Sapiens
  misc_feature (205)..(220): n is a, c, g, or t
gcacgaggcaaggccttcattgtgcattttcccaaagccttattaaacctgaattagctgaaatccgggtgaacaaattggcaacagcagtggtatccctccctatgtaaacaaccatcagtattgttttactgttgtaataaatgaaacatgattagccaccatgagttcatgacctacctttattgtgctcagactagtgacnnnnnnnnnnnnnnnncagttttatccctcaagccgtagaggttcctaaactattagaaacaaccatttgttcattcgtggtcacttaatggtagaaaaaatagataatataatgctaattcagtacaaccattcttctaatctataatgagttgaattgtctgggcacaatgaagtgtgaggtttctctcttaagagccctgggcttctctccttctagggattcactgtgacgactaacatcccagagccagtgtggtccttgtaggccgaggttgggtagatggcagaaataaaaagcattctgatagagaatgaaggcattttgcttatgttattagctgaatgattccttagcgatataggtaggagtccacaaaaatctatgaaaattataaattgttattttttaaaactagacataaataaactcccttaatagtgataaagagctcctcttgactaataagtcatcctaacatggagttcagtttttcacaacgcttttaacgaataataccagatgacagtatagctgacttgcaatataatcaatttcattacaatgagcatactttcagatttc

SEQ ID NO: 18296 - DNA, 613 bp, Homo Sapiens
gcagataaaaggggcccgggctgcaggaattcggcacgagggtgaccctttataaatatttaccagttatttatagaaagagaaaatgggaaatgttttataggctttttactagcagtatcagtgaacacttgaactccattattcatgaaaataacacgttaggattggaatacgtctattcaaaagtgaaagaatataaagtgtttagttttttgtttttactctaaagatagaattggggagtaaacttcagtttttgtttagagtggatctgaatatttaaaatcctataataatttttgtgaatcttcattctttgagtatgggattgtaaaagacaaactatatcttattttagtatcatcatcagtatcaaaggtctcctttttttacttggaaaagtaattcacaaacattataaaaatactattcaaacagtaccaaagagtagattagcaaaagtaagtttttttccctagcctgtctcatttttccatcattacacagactacttggaatgtcttagatgtccttgtattgtaattttctgtgtaggtaaaattaaatgtagctttcttattttacaccaataggaaacttactgtatata

SEQ ID NO: 18297 - DNA, 483 bp, Homo Sapiens
  misc_feature (176)..(184): n is a, c, g, or t
ccattaaatcccccgggctgcaggcatccatcttcatgattggctaccattttatttgtcagtctacctccaagtatctgtttaatttttgtcacagatattatctacaaacccagctttcctagaaacacattgccaggtacttcataaaaccatgggctgtttgtggtgtttannnnnnnnncactctgaaatgtcttgccttctgctttctaactaaagaccttgaatatttccaggctcaaaaaaaatgccaccactctgtgacacatcccctaaatttctcagtcagaaataaaggctttattcttttgaccccttcaatgctgaacctctaactgtcaagacatgcgtttaactgcttcttgctgcagcaaagtcatttaatgatgccagttttcccattaagccatagcccccataggtcaaaaaccatgtctccttcattcccacacctcacaatgtcccagaagagaaacttct

SEQ ID NO: 18298 - DNA, 618 bp, Homo Sapiens
gcacgaggtatgatgagaactatccgaggccacccttggcctctaaataagctgctctagggagccgcctactttttgatgagaaattagaagagtaccaaagctaggaaagagctttatcacaagccttcactgtcctggcatgagaactggctgccaggctcagtgtaccccattaactgtgaatgaatctgagcttggtttcctttattgcttcctctgcaatatgattgctgaaacacattttaaaaattcagaagcttgtcactcctgttaatgggaggatcagtcacacatgtgtagtacaaggcggactttgtgtttgtttttggtgttaatttttagcattgtgtgtgttgcttccccaccctgaggagaggacaccatggcttactactcaggacaagtatgccccgctcagggtgtgatttcaggtggcttccaaacttgtacgcagtttaaagatggtggggacagactttgcctctacctagtgaaccccacttaaagaataaggagcatttgaatctcttggaaaaggccatgaagaataaagcagtcaaaaagaagtcctccatgttggtgccaaggacttgcgaggggaaataaaaatgttat

SEQ ID NO: 18299 - DNA, 504 bp, Homo Sapiens
aaaatatcaaatcaaataaaaataagtgctacttgcttggcatattggaaaaaaaagtaggacagtgagacaacacagtgagacaacgtcagtcacaatgagctgacctaaagtaggggtcagctgggggaagaatagcacaaatcacattggaatgaaagatatgactacataatgtttattgcgatctattttaaggcttttcatggatcttttcagctatgcacatggttagtcataatgattgtcattttaggtcagagtttctcagccttagcattgttgacattttggttaattctttgttgtaggggctgtcctgtacactgtagggtgtttagcagcatccctgatctctacctactaaatgccaggagcaacgcagtacctccagctcagttgtgacaactactgaatgtctccagacaactactgaatgtctccagacattgcagagaaattgagtctggttgaaagtcactgttttagggcataatttttggg

SEQ ID NO: 18300 - DNA, 858 bp, Homo Sapiens
  misc_feature (274)..(293): n is a, c, g, or t
  misc_feature (663)..(710): n is a, c, g, or t
gcacgaggccagtttccaaggtcatcatggttgcttaaagtctttccccttctgtactccatggaaatattctcagtaaaccaaaaacaaaaatggaaaaataatcaccaacccccatcccgacacacacacacagtccaaagcaaaagtcagtgtgtattgaatttaacaagtaatgcagtttgggatgcttttgctacattttggtggcattttaactagttatctgaatatttattaatcgtacttcctcttgtaaagttaactacttacnnnnnnnnnnnnnnnnnnnnaacatcaggttctgtatctaataggagatgtaacactttatttcatggcaggtttttattgcagagacttgaagtcttagttttttaaactggcacataaaacactttttgctgttatttttatttatgtcaatactgcagagtatctttatgccttattcaagtggattctgagcctgtatgtcacaatgtaaacactggaggttcactcacctacgcactcacccaccacctctgaaagaaacagaaactgcagagaaagacagcatcttagctcattttgtttttaaatgaggttttagacgcttgccacttcctaagggaaatcctaaaacagagcaagtgatgctcccaggtatcactgtgaacnnnnnnnnnnnnnnnnnnnnnnnnnnnnnnnnnnnnnnnnnnnnnnnnaaagtaattgaagcttgtggctttacaacttagtgttttttgctatccagataacaggttcattgtttagaaccagtgacacttaataggtagataaattgtccttttaaaatatcccagatgatatacacaatatggtacatttgtg

SEQ ID NO: 18301 - DNA, 508 bp, Homo Sapiens
gcatatttgactccatgaaagtgcattatcacaatgtgacgtaatgtgtaagcattgtgcatgtacataaaaatgttgaaacttgctcagtaaatgaagagatgtccgttttgttcatctgtatttgtgaaagataaaatttctcaagatcttggctctttgggtgactctattgcagtttttgtgcaaacggtagtgacccattgcagtttttgatcgatcttgtcagaagattcaggttgtctggtatttcagatgaccgcagttatgaatctgggtgcacctgattaccaaccatagtgatacgtgtttatccattttgctttttaatctatttcttcatgaatacattttctctgttcctattatacccatgcaatggttgttagtatacctgagtatttatgcttgcaaaaatatgttattagtgcctattttattgtgtaaaggggcctatgaactgttccgttgtgtttttatgtttctcaaataaatcttttaaaaatgg

SEQ ID NO: 18302 - DNA, 233 bp, Homo Sapiens
  misc_feature (167)..(184): n is a, c, g, or t
gccagcccgggcggggaaaaaccttgcgtttccccctttaatcccctttgccccaaccccccttttcccagggggggaataacaaaaaagggcctcccgatttccccttccaaaaatttgcgccacctgagagggagaggggggcccccccgggggcgggcttttannnnnnnnnnnnnnnnnnttacccccctgggggaccttttttttggccgcccccttacgccgccccc

SEQ ID NO: 18303 - DNA, 811 bp, Homo Sapiens
atatttaatccaaaggctgatctcccttgactgagtctacccgcaacccgctgaccctttacctcacccgcctggcaccctccagccagctgaccatgcgctacgtgctgcaagacgccgccgaccgcctgggctttgaagacatcaacctcgaagacatcgactggcacctgctgcagcctgaacacgtcatggccctggtggcggcgttgcgggaagacggttatgcgccgaacacctcatcgctgtacgtcaacgccgtgcgtggggtgatgaacgaggcctggcgcatgagcctgatcagccaggatcacctgttgaagatgcgttcggtcaaggccatggccggcacgcggctgagccagggccgcaacctgcggcgtacgctgattcgtgagttgatggaggtctgcgccgccgacccgcgtccccagggcctgcgggacgcagcggtgatcgggatcctgtatggctcgggcatgcgcaagtcggagtcggtgaatatcgagttgggccaggtcaattttgacgagcgcagcctgcaggtcaccggcaagggcaacaaacaactgatcaagtacgcgccggcctgggccttcgccaagctggaggcgtggctggagttccgtcgcagccagttgaaacccggtgagcaagacgacaggttcctgttcaaccgcattcgccggggcagccacatcacccgcgagcgcatcaccaagcacgcgatttactacatcgcccgtcagcgcgggaaacaagtcggcgtgaaatcatgccccatgatttccgccgttcgttcatcacccgg

SEQ ID NO: 18304 - DNA, 298 bp, Homo Sapiens
  misc_feature (168)..(228): n is a, c, g, or t
ccacgcgtccgagttacgtggcttatgtctgtaagagtcagaaaatccttcctggagagtccttaggctgtggctgccagttatctctcaggtagagttggttgcaagtttcatagtaaactgcttgcttacagtttaatcttttatttatttatttgaggcagagtnnnnnnnnnnnnnnnnnnnnnnnnnnnnnnnnnnnnnnnnnnnnnnnnnnnnnnnnnnnnngtgggttccagcgattctcgtacctcaccctccctagtagctgggactacaggcgtgcgccaccacaccc

SEQ ID NO: 18305 - DNA, 466 bp, Homo Sapiens
aacgcccagctgaacctctactctggccagcgtcttaccgcccgctcctttgcttttcttcctttcttttctcgcaaggtccgccgtctttcccttgtcaagctactaaatcaggggctcctttaaggagtccgaattgattgctttacggcaacttcgaacccaaaaccttgattagggtgatgaatcatcgtattgggcatccacttggataaactgtttcccccttgacctggagattcagcgtccttaatattgatctctgtgtctgacgtgataaacctctaccctatcccgttctatcttttattataaggaatttgtcgaatctcgctctatggtaacaataagcgagtataaccaattttatcgcgattttacaagataatacgcatagtataggtcgctctttcgggatatggtgcgagagcttatttgtatgattaaaaatatacatatgtacccc

SEQ ID NO: 18306 - DNA, 726 bp, Homo Sapiens
  misc_feature (273)..(285): n is a, c, g, or t
ggggggggccccctaaaagattccagctttggtggggcgtgctggcaatttcaaggctcttgtaaggggcccccaattttaatttctggggccgccttttaaaagcgcggggcgggggaaaccctggcgtttccccaatatatccccttggcaaccattccccttttccccagctggggataaaagaagaaggcgcgcaccgatcccctttcccaacatgtgcgcactctgaggggcaagtggaaggcgcctggatcggccccttaacgcgcnnnnnnnnnnnnnttaacgcgcgggtgattcctaaccttggccggcgcctaccgccggctcctttctcttcttcgctcctttctgcgcgtgtcacgtgttcccgcaaagggctaaatggagggactccttaaggtgcgaattagtggtgacgggctctcaaccgagaagtctgagtgaggtgatggttcacgtagtgccgatgcgccttatatacgtttttcgtcgttagacgtggagttccacttactatagtgggactcctggtccacagtgaacaaacctcgacctatgctcgagctatcctatgaatttagaggagaatttggcgaatatggcctatgagttaaataagggctggatgaaccataatgtaacgcgatagtttaggaatattatgcgttagattagagtgctctttgcgggagagtggccgcgagtcctaattggttatgt

SEQ ID NO: 18307 - DNA, 514 bp, Homo Sapiens
tttggcgccgccggtcatgccgcgtccggccatcacctgctgcacgttgcccgccacccgcaccgtccacagttgcggcgccgcgttgttgccggtccagatctgcaattgcgtggtgcccggcttcttgccgtacagcagcagcgaggcctgccgcttgccggaggccgccagcaccttgacgtcggccacctcggggtcaccgatggcgatgcgggcgggcgcgccgtccagcatgagcgtctgctggcccttcacggcgaccgcgatgtcgcgggcgggcgcgccggcgcccgggtcggactggatggcgttctgcgccatgccggccacgccgtaggtcattgcggctgcggccgacaggacgcagatcagggtggtgcgctggaatctcttcattgtgctggatctgttttgacgggtaaggtccagccgcgggcggcaccaggccacgcgcagccacgtttcaatagcgcacgcgctcggctttgtctcctcgcaggatttcgacgct

SEQ ID NO: 18308 - DNA, 625 bp, Homo Sapiens
tcttagcttctcattgagattcctagaggtgcgttcgagttttcagagtaattttccagaccaaccagcgtcagtgggaaatctgacctcttttggcaaactgcgatcattcattttcctgagtcccctggtggggtggggggaattctgcctcaggaccctgaggggtctttggggcaagatggccttggtaatgcagccactaagaacaggacttcattcaaaggcataatgaagtaaccagggtgaccatcaagtaaaattaaagcacaagatcattgtaggaggcttccttgtcaaagacgtgaacgtgggatttccaacgcaccacggtgtgtccactcatcactgcatgttaggaactgctgtctctttgggacacgagttaaaagaacacactaatttctggagtgtgcctgcagcttcacggccttcattttgttactaagttattttctggaagaacagcaaaatttcaggttgaaaacagaactttccaagtgctactgaaattccgcagagaattacgctgcgatggtgggtttcttaccctagaaacatcctaacctgtatccacagaagatgtccttttatttttttaaaagatcaataaaatcaagagaaa

SEQ ID NO: 18309 - DNA, 854 bp, Homo Sapiens
  misc_feature (478)..(490): n is a, c, g, or t
cacgtatggaatcagccttacttacatgtaggacctttgtgctttaagagctctgggacatattggccaaatagaaaagaagaggacagtatttcaactcagtcatactcaatatttccaattaagatataatcctgacaccattgttcaattaactttgacgccagaagtcaaagccagaactgggaccccacagctcttaagtactggtccctatcctgcctatgcctatagccagccacactggtttccaagttctgtgatcattttgctacaatcatgttagggtgaaaatctgtacgtcagaactgttaaatgctaattatttttaagtgcatgagacctggggccttctctttctacttgcactctgcttatactagtttctatttgtagatctcaggccttcatcataaagacctctatcaactcacaaaagtatttgtctctattagagtggcatgtggtcatttgagtnnnnnnnnnnnnnttacatgggtatcggattcataggcatcctgtccatctaagacaagtgttaattttattggcccatcagctggagcccctttcctcttagccataccattgttttctaccaaattaccactcaatatcttaatgaaagcactcaacattaagtgacataaacagtggcatttgggtaagcaacactcagtggggtgctgacatacagtttgggtaagattaaaaaacaccaagggctgaaatctgtgagtactaagaactgtgcatataggtttagaaatttgactgtgtaccctaaaatgtgcagtgtaatattttcaataggtgttttttaaagaacacaaaatttttggaatatatatttc

SEQ ID NO: 18310 - DNA, 295 bp, Homo Sapiens
gcaaggcactgtccaagcaataatgtgttgtatcatgttttaattcaacattttttcttccttagtcatacataaagtaagaatttgtcttatattttaatccagcatttttcttccttagtcatacacaacataataacttggccacatggcaagaacatggtggcgggggtgggcctctaaggagctcaaagtggtccctggctgacagccagcaagcaaacagggacatcagatctacaagaacaaggaattgaactcttcccacaaccggtgagcctggaggagaacccag

SEQ ID NO: 18311 - DNA, 409 bp, Homo Sapiens
ttttttttgactgaataaagctttattttaatgtaaaatatgaaaagaaaaatttatatactcatatataacaacttccaaaatgttttctgtggtacaaatggatcatcttaaaaagtctgtaaagaattcatcctccacccccatatgccaaaatatgatttcacataatttatcttcagaacttatgaacagacttggaatcacaaaagcacaggaaacaccagaaaaagtgatggtacaaacaacaggttttgttttaggttccagtagtaagcagccctacagatggaacaggagaacactttctgaaggagcccagtcaggagacaggttagaagagtctttggggttggttcatttcctgtagccaagcttgtctttaaaagtcaggctgtgtgtgattctg

SEQ ID NO: 18312 - DNA, 868 bp, Homo Sapiens
gttgttgttgttttaatgtagaaacaaggagtttccaataataggggtaactatgtaacgtataataaattcagagttttaccaataaaaatagtggcaacctaccactttacaagaaagattctgcaatttacacaataatgtatagaaataaaatagtccacaaagaaaagccaaatatattacggtaacaaagaaatgtgttgaagaataattttacctgattgtgagtagcaccgactacaaaaatttctgtaaaattaagttacattggtgttaatgctgccacaactcatcagaagtggaaacagaaggaaatcgggaattctatgctcatgagctagtcccctttttaatccatctctaaaatgtatctgtttaaggcaaagacctcgtaaagagccaacgaacagaagaaaaaaagaatcgaccccaaggtcattttaaatgagaaataaaatctggagggaaaccacgccagaatttattgaaaaacagatttttctccttcaaaaatgttattaaaaaatacgaatgtttttgtgacttattgccaagtatatgttataagctctctgctactcagatgtaccacactgtacaatgtgatggatgggggctattaatcatttttactgaagagcagaacagcccatgcaacacagtggtattaaaaaaaggtgtaggtattctaagagtacattcgtttcctcataaaatcacatttcatgtatcccttggtttttcaatagttccttccaactgattcacgtatttgctggtcctgaaagatgggacgctgtgtggggcaaagggttgtctcatggccccaggacgacggtcctaattcattctctggcgaactttt

SEQ ID NO: 18313 - DNA, 884 bp, Homo Sapiens
gcacgagggaccttatttggtgggcaggaggtttcagtccaacatagatcaaggtaagaatctaatttcagaataaagccaactgataaaaatcaagatgccattttgagtaatctaaattttttcagtcacttttctttggattagagtgttctaataggtagcattgcacaaacaggaaagttttatggaagtggggaaatatggctttgttctaaatgttttatttctaaagttcgagggccatgtaaatgaggacaaaaaagaattgttagggtcaatgctggcaatgggggagtgacggtcacagaaatgaatcgtttaaagaaagggaagatatcaaatctgcatagattaagggaatagctattatgtgagccaagcctcctttttctgatctccagctttccctgttccatcttttttccaattcaaaaatgctagaagaggcagcacaggcagcaacagctccaacagatcacaagcctggcactgccagaatctaggccagtcacagctgcaaatcttccttcagctttggggtccctggcattaactggcagcttttctaggctcgtggaacagctaatcaacagcacaattcacacagggggaagaggcaagaggctctctttcaggccacctctgtagaccttcaagtcacacaatgtatttttaaacaatagtataaacgtggcatatagacactatctaattctgagatgtgtgatggggttagtgtatttaactatgactttaaacatattagggcatcaaattgtcttgcagcaacatctataattcaaataaattttgacctcagacatggtgtgctggttcaatatgttccattatattccccagaaaggtccagagagttgctg

SEQ ID NO: 18314 - DNA, 912 bp, Homo Sapiens
gcacgaggatgggactgacttatttgaatagagtttgaaataccacctttgtatgatgcaaacaatatttgattattttatctaagaaatctatgcatgtgtattaagttaaaatagtgggtttaaatacaatttataaagcattagaatgttacctaatctcttctgggttaaatgtgataggaatgtattggaatgtgaagaaattatagaaaattaaaagactcagcctctttaggaagtttgctaaaatggagaggttatgtttaatttatttatatcttcgttaatccaagcatctaatgaacaaaaaactgctacagtgacgtcataattctataagggcaatagttgccaaatttcctctggtattattagcattctgcctttgcatagattagccttcaaatttattatttttagtattatttgatacgattgaagtggctaagattgattgagcttttcttgatcacattttctgcttcttagctaaagtaattttatttaaattgacatggcttgagttgtcatcattttctgctcttctagaatgatgtgtagagaaaacttgaagatactatcccttctttggcattcttctcttaatgctatgctattatttatcataatatgcatatatttagttgtatctggtatcattctaacactcataaactaccattttagttaagtccaactttatatttgttacaatgcagtgttttggggaaagggtctattagtaattatttaagtattacatatttttatggaagtccttagaaagtgaagatcttactgagaaactattttctaaataaatttaattttcttttgtatttgtatcagatcatgcctactgtatgttagattttagactatttttaaagaaaccgtaaatatataaaa

SEQ ID NO: 18315 - DNA, 586 bp, Homo Sapiens
  misc_feature (84)..(92): n is a, c, g, or t
  misc_feature (475)..(521): n is a, c, g, or t
gaattcggcacgaggatgatacctaatccaatgtaagtgttaggtaaggagatgttacactgtattgtttatggaataatgacnnnnnnnnncctctgtacatgttcattacagacacaaccctccattttttaaaaacaatatttttcatccgagcttggttgaatccttggatgtgaaaccgacagatactgagggctgcctgtacagataaataaaaaggagataaaatccataatcccacattctaaagataactggtgctaatattctgggctgtgatttagacttttcatcacactctgcatacatacatattgattgagatttcagctccgtgtcttggggcacatgtagaatgtgggctttatactgaggtggcttatattccaccctggctctgtaaccgcttggctttgtgaccgtagggagatcactacccagtatgaacttcagcttctgctctgtaaaactnnnnnnnnnnnnnnnnnnnnnnnnnnnnnnnnnnnnnnnnnnnnnnngaggggccccttctatggatgctgtaattgataagtagtggatttagacaacaggcttcagagaa

SEQ ID NO: 18316 - DNA, 279 bp, Homo Sapiens
aattacactactatatgtttgacaaaattcactgaatcttatacttaaattggttaattttattgcaaaatggaaccatggtaacatgatttactttgctacatttcccaaatattgtccagggaggatgtattattttaaaatcccaacaataatcccatttaaaagcaattagcatattataaatatataattatacatgatcacaatgaccttattaataaatacaatctcgatctataacagaatgaaatttaccattctttatttttggggtaa

SEQ ID NO: 18317 - DNA, 803 bp, Homo Sapiens
gcacgaggattacctgtactcatcactcggcttcaacagtgatcactacgtgactaatcttgttttatctgtatgcttacatccttctcacccttccccttccctattattttgaagtactagtcactcagaatttcagctataaatacttcaggttgtgtctttaacagacttaaaaaccaagcaagcaaaatgtcattattacacctaataaagctaacggtcatgttttcatattatctaattaatacctagagttcaaataaaatgcctagtatttttggggctgaagatacaacccataaaagtaaagccttggtgttataatacccaagagccaatattctaacgtgaggaaacagacaaaatgtaagtaaaatacgaacaacataatttctgctaacaatcagtgctcggaaagaaacacagtagatgacaaagagagtgacgcagggccagggggatcctattccaggtcggtggtcagggaaggcctaggaggtggcatgagtgtgaggaccaggtgaagggcaggagctggcccaggggacagtgtcctaagtggagggatttgccactgcgtgaagagcttgatgggcctgcggagtgtcatctagctaggcaccttttttccctgttaatgctggctttattatagtcatttgtaatgtgtagattttcagtgtccttaacttttccacagggtaaataggacctccggagtacaccaatattgagctttggtgataccttttggtcgatttgttgatcagttatgccttcattgttccagaaacatttca

SEQ ID NO: 18318 - DNA, 785 bp, Homo Sapiens
gcacgagggggacaataatcttattaatgacactttaaaaaaacatttacagtgactcttcgacctctgaatcagaagtttcctcagtgagccctttgaaaaataaacatccagatgaagatgctgtggaagctgaggggcatgaggtaaaaagactcaggtttgacaaagaaggtgaagtcagagaaacagccagtcaaacgacttccagcgaaatttcttcagttatggtaggagaaacagaagcatcatcttcatctcaggataaagacaaagatagccgttgtacccggcagcactgtacagaagaggatgaagaagaggatgaagaggaagaagaaggtatttagagaccatctgtaaaagggtggagtaaggagatcctcaaattcttgtacttcatttttttcgtgaaagaattttacgtaatggaactccttataatgctgatgttgggcttttctcccacctgtatgtagttgctgctgaatttcaggggatgtgatttgaactatagaatatcagaattcatgaaacttaactgtggaggtattttgaaaatacaatttaactacaacaacatttgcttatttttagagtcttttatgacatcaagagaaatgatcccagaaagaaaaaatcaagaaaaaagaatctgatgatgccttaactgtgaatgaagagacttctgagggaaaataatcaaatggaggaatctgatgtgtctcaagctgagaaagatttgctacattctgaagctagtgaaaacgaaggccctgtaagta

SEQ ID NO: 18319 - DNA, 356 bp, Homo Sapiens
  misc_feature (47)..(57): n is a, c, g, or t
  misc_feature (64)..(98): n is a, c, g, or t
  misc_feature (111)..(131): n is a, c, g, or t
  misc_feature (187)..(208): n is a, c, g, or t
  misc_feature (242)..(254): n is a, c, g, or t
gtaggaaaaattttgccaaaaaacccacaaattcttttccaattttnnnnnnnnnnnccctggnnnnnnnnnnnnnnnnnnnnnnnnnnnnnnnnnnnggaattacaaatnnnnnnnnnnnnnnnnnnnnnccctggtcctcccacaacccccggccttggtttgttttcatttgggggggtttttnnnnnnnnnnnnnnnnnnnnnngggtttgaaccatttcgggattccccccggcctnnnnnnnnnnnnncaaattttaagcaaaattccctccaaaatctaaaggggcaagtttttaccccccttccccaaggggagggggcccccgggccttttgaaaaaaggggattgg

SEQ ID NO: 18320 - DNA, 895 bp, Homo Sapiens
gcacgaggattttattttatatttcaaataactagaattgtacagagtttaattttacagctttagggcaaggataaactcatttttatttttgcagtaaaaggtataaatattgaaaattatgtaggtttaaaactttactatgatatagacacattctcaaattaatgaattttactgagctttttatatcaaacttactgatatttaatgcaaaataataaatattgagattcttggttgtacattataaaatgcatcacagagcgatttattgatgcaaaggaaccgttttggctcatgtaagtgaaaagtctaggagtcacatctttaggcatcgctggatccaggtgctgaaatgatgtcatcaggcccaaaatgtctctttattgcttgattctgctttcctgagttggtatcaactaggagactctctctacatgctccatggcagctccaggctcacacatacttagtattaagattttctcctcttctttaatataaaggaaattcagctagatgatctttagttcaaaattctgtgatatataaataactcgaaataactgctaacagttaatgaaacatctgattcagtaaagataatggttatttacaattgagtattgcatattaaaaagttcattaaaggtttatttttatagttatttcaaatttgccttttgcatttttagtaactatgagtgatacaagcaaaactacaacctagcacaagttgaagtatcacaaattttcaagtcaattgctaccaaattagattttaatataatttagatactaatattagtgtatatggtgaaaagtgtttgctaattggaaatttaccccattaattgtcaatcaccagtcaggatttagaaacctccttttt

SEQ ID NO: 18321 - DNA, 380 bp, Homo Sapiens
gcacgagggttttattgttcatcctgaaaacactgtttttactttgaaagtaacaacctggggaattgcctgaacttccaagagactcaagacttcatacaggtttcgtctctcttctgtggccactatcttcccaaggaggtcttgcccataagccctgtggttttttgatccgttgtactgaaatcttctcctcctttccctatatccaacaaaactctagacatgtaagatttaattcataaagttccaattatgaaccaacaaatacttggttcactcctatgagccactgaaatatctcatacctaatgacatttaaacatacctcttattttctgtcaactgtgatgggactagtctcctgttgtataaaatga

SEQ ID NO: 18322 - DNA, 454 bp, Homo Sapiens
gtggtttgtaacccatgtttattctaatcagtcaatctggggctatatataatagtagttgaatgtttatagtactacccttggaaaattcccatatattcacacccagcatggatataaatacggaaagatttcccattgagtacttctctttagcactccagtaacactagacaaataagcacctaaatgccgagtgtttgtcagttttaaaattagaaaagaaggcaagttgttttcttgtctacctgtttaataaattttttattgccaagtacgtatgttcatttgatttaatacgttgaaatgtagtttaaaatatatattcaaataactaacaagtgaaggaataatttatttagaaacgtagaaataatggtactgtaagcagttgctttagagtcttttatagtattgtattttgaacattaaaaataaacattttattcctgaa

SEQ ID NO: 18323 - DNA, 808 bp, Homo Sapiens
  misc_feature (335)..(375): n is a, c, g, or t
  misc_feature (712)..(751): n is a, c, g, or t
catgggccctaacaatgaaaggttttcattaatagagaggaatgtttatggtacattatctacttacaagcaaacctatgataaaaaagaaaccaagccaaacaccatggacatatttctgaaaagagtgacacctccttaagaagagcctcaggcaggtccttcagtgggtgttccagaagattgttgtcatagcaaatgacagctccatgcatgctattttccctgaagaccatgcagtgggacaagctgtgcagatggaagacagtgacatcgatgaccctgacctccctgtgtaggcctaggctaatgtgttgtgtgtgtcatttttaacnnnnnnnnnnnnnnnnnnnnnnnnnnnnnnnnnnnnnnnnntagagacttacagaataaggatataaagaaggaaatatttttgttcagctgtacaatgtacttgtgttttaaattaagtgttacaagagtcaaagttttaaaaaatcagtttataaagtaaaattagttagctaatgttaatttattattgaagaaagaaaaatatttttaacacatttagtgtggccatagtgtacagtgtttataaagtctacagtagtgtacaaataatgtcctaagcctcacattcactcaccattcactcactggctcacccagagcaacttccagtactgcgggctccattcatgggtagtgccctatacaggtgtatcannnnnnnnnnnnnnnnnnnnnnnnnnnnnnnnnnnnnnnnctatgttgagatatacacatacttagcattgtgtaacagttgcctacggcatcagca

SEQ ID NO: 18324 - DNA, 953 bp, Homo Sapiens
ctgaaaaatacaataacaaattaaaaatgcaaggagcatgttttacaacagaatggaaacagctgaagagagaattattaaactggaagatagaccacaagaaaatagccagatttaagcaagcagagactaaagatgagaaagacaagagagaatattagacttgaaatacatggcgaaaggaccagagtttcaggatgagagaagaaagaaaatggacagaagcaatatttgaggagatagcagctgagaaaataatttatttcttctctttattttatggggagtttagagttttttctgagcttaattcttaggaagatgaagcacttttaaagtgctcattaatcactatcaaataagtagagagtaaaagcctctgtttttaattaaagataacttaaagtagttctaaacagagttattttaaaatagactaatcaattaatattggaaacagggttatcttagccaatattctattaatatctattttggtactttgggaaaatagtggaatgatttcttaaccacttgaaaatagtcaaactacgattgttccctgagagttaaaccttacaatacagaagtagctgatcagggcaaagatgtgcaaacctttcttaatgacacagagtagtgcccaggaaagcttaacttgacaacgacctgaatgatgtcatgtcttaatcaattaggtgtgtaaatgaagggccaattttatcagccaagtaagcagagtaaaaggagggtcacagagacaaagattggctgggcctatagaaacttagtctaggggcaaggacgataatattcccataccctaaacaagactcttcatcaaaagattccatatatccaattatccagctgactcccttgttgtgagccagatctaccattgcattctctgatttataagttgggattcctaggctctctatgaagaaaaa

SEQ ID NO: 18325 - DNA, 292 bp, Homo Sapiens
gcacgaggtgaaagtatgaataaaataaaatggaatgtagacaaaatccctggtattattttatatgtcttaagaaagttctaaaggtattaggaaaatgaatgtcaagctgtatgtaattgtaattagctaagagtgattcagaataatttagactgttaatgaaaagaggacatagggaatagtttttcattttatgccaagtgatttttctgttttattagctagtgaaaccaatgttggtaaaattaagttaacaattttagagtttgtgctagaaaagatattctga

SEQ ID NO: 18326 - DNA, 697 bp, Homo Sapiens
  misc_feature (51)..(118): n is a, c, g, or t
  misc_feature (129)..(209): n is a, c, g, or t
  misc_feature (337)..(348): n is a, c, g, or t
  misc_feature (362)..(378): n is a, c, g, or t
gtggattggtcttttttcttccctccccaaaattctttttcccaaataatnnnnnnnnnnnnnnnnnnnnnnnnnnnnnnnnnnnnnnnnnnnnnnnnnnnnnnnnnnnnnnnnnnnncccacccccannnnnnnnnnnnnnnnnnnnnnnnnnnnnnnnnnnnnnnnnnnnnnnnnnnnnnnnnnnnnnnnnnnnnnnnnnnnnnnnnggtttggaaaaggttcttgggttaaaaaggggctttcccttttcccatttaaaaagattttgcgaaatttggggcaataacttagaaagcccccaaagcccccccggggggttaaaatattaaccctnnnnnnnnnnnngggggtttttattnnnnnnnnnnnnnnnnnacaaagggggcctccggccccccaatcgaggcttttaaacactttttgggttgtaagaataaaaaccccccccaaaaggggcgggggcgaaaaaagggccactggaaaaaataccgacggtctttttttctggagttgcccccagggaagtgccccctctctcaattaaaaaaaaccccacggaaacagaagggggccaccgtgggggagctccccccccatattcccgagaaaacaaagggggcgccccccccggggaaaagagaggcgagacgcgatattggggaaaacggccccgctctcttctcgggcaaaagag

SEQ ID NO: 18327 - DNA, 357 bp, Homo Sapiens
ccacgcgtccggactcatacactggaaggggacccggaaaggtaatgtaactcagtgattttaaaacttgatttttttaactgagaactttttttgccccctgcctgtaggttaagtcttacgtgaaatgccaagataattgctgagcagctttggttacccagggcggggtctgggtctgtctgtacttgcctttactctagatggctcctgagacacaggcaggactcccaagcaccgggttgggatctgccctggtcccggcattccagtataagattgcctcagacctgtgtttttcagactgggtttttgctcttcacatgaaatcaagttagatgacaatgactggtgttg

SEQ ID NO: 18328 - DNA, 867 bp, Homo Sapiens
gcaacaccaccaagctgatgggcagcgaagacttcgcctggatgctgcaacgctgccccggcagctacctgtttatcggcaacggcgtctcgcggccgatggtccacaaccccgcctatgacttcaacgacgacatcctgttgaccggcgccgcctactggggcgcgctggccgagagctggctcaagcccgcctgacgacctcttttttctgccgctggaccctttcccaacaggttgaatggagtgttcctcatgcagactgcaaaacagggcgtatcccgcacccgccaggtcgtggcggcggtgattggcaatgcgctggaatggtatgacttcatcgtttacggctttctcgccagcatcatcgcccggcaatttttcccgtcggaggatgaatacgcctcgctgctgatggccctggccacctttggcgtcggcttcttcatgcgcccggtgggcgggattctgctgggcatgtattcggaccgtaaaggccgcaaggccgcgatgcagttgatcatccggctgatgaccgtctccatcgccttgatcgctttcgctcccagctacgccgcgatcggcatgggcgcgccgatgctgatcgtggttgcacgcatgctccagggctttgccaccggcggcgaatacgccagtgccacggcgttcctggtggaaagcgcgccggctcatcgcaaggggttgtacggttcgtggcagttggtggggcagtgcctggcgggtgttcggcggcgcggcgatggtggcgttggtgacgcacttttcgagcccgcaaacccttgaagtctggggtttggcgcctgccgttcatctttggcttgctgatcggcccggtgggcttgtggat

SEQ ID NO: 18329 - DNA, 239 bp, Homo Sapiens
  misc_feature (162)..(198): n is a, c, g, or t
cgtccccggggaggcgaggtcataacttttctaaaggggcgcctaatttattttcacgggccgtttttttaaaacgccgtgagggggaaaaccctggggttaccccctttattccccttggaacatatccccctttttccaccggggggaataacaaaaagnnnnnnnnnnnnnnnnnnnnnnnnnnnnnnnnnnnnntgaaggggaagggagaggccccttgtgggggcgctttaatc

SEQ ID NO: 18330 - DNA, 890 bp, Homo Sapiens
catgtagtcgaaggacgacaacaggttgtagaactcgatggcacggtcttctttctgcttctcttcgatcgccaggcccatggctacgcgcatgaagaacacttgcggcagttcgaagcggataccgtccttgtggatgaagtaacggtcgtacagggtttgcaggcccaggtaggtgaactgctggtcgcgctcgtggttgatcgccttgccgagtttttcaaggtcgaaggtggccaggatcgggttcagcaattcgaattcgatacccttggcgatgtacgccggcagggccttggcatacaggtcggccatctcgtggtgcgtggcgctgtcggcgacgccgaggaagcccaggccttcggcacgcagggtgtccatcagcaggcgcgcggtcacgaacgagtagtttggctcacgctcaaccagggtacgggcggtcatcaccagggcggtgttgacgtcggtcagggccacgccgtcgtacaggttcttcagggtttcgcgctggatcaggtcgccatcgacttcttccaggccttcgcaggcctcggtgatgatggtgttcaggcggcccaggtccagcggtgcaaacgtaccgtcggccagggtgatgcggatcgacgggtgagcttgtacggcagcttcttcagccgggggaacgtacggcacgttccttggcgcgggagtcacggtagatcacgtagtcgcgggcaacttttctgctcgccggcacgcatcaagccagttcgacctggtcctggatttctcgatgtggatgtgccgcccgatggcatgcgacgcttgaacgttgcggtgacctgttcggtcaggcgcgcaccgtgtctgggatgcgcgaacaagcaccaccggtgccgctttcactgcaa

SEQ ID NO: 18331 - DNA, 869 bp, Homo Sapiens
  misc_feature (46)..(54): n is a, c, g, or t
ccacgcgtccgggaaaatgctgattcttatatcttactatcctgcnnnnnnnnnaattatacacacagagttcatcagtgaaactgcaggttttataattaaatataaaaatcgaggcgttcacacagatatgctaataactccattaaacttctccctttatatgtaaattcaagcccagatgttgcatcatttgcaaatcttgcaattaaagcattttataacttcagttatgcaaaggggcagcagactggaaaatgggtaaaattgcttggctaggacattaccatggcaacacactgacctccattcaattagttaccaccgaagattcagctattaattatagtggtcaaaagtggatatcatctggatctcctcttacctttttaatatggacatttttcactcaccataaatctttgacttttagaggcaaggcttccaaactgaggtgttaaaaagtgatactgcttaagtactgatggaagtgagggtcagaaagggaatcccatttatcagccatattcaggatagttcctcaactttctgtaatctaagcactctgtcatgcaggcttcgaagtgaatattcattactgctcatattcctcattgaaccctttgcgttatgtgtgtcagcaattacctctcactttagaaagccgtcattaattagggccacaacaatcatcaccaaaggggcttctgaaatagatagatgccccattttgggttgagttttacattttccagcaaaaaagttattattttcttggcagagtataaaagaagtgtttggcagttaattacagaggtactttataaatgatgaaaaaaacctttctgcatttttattgcacacttgaa

SEQ ID NO: 18332 - DNA, 429 bp, Homo Sapiens
cgcccccttacagtaatttcacaacggccccgtgggggggccctatttttctctcgctgggcgccgcaacacgagaccccccgggatggccccccataaccccgcccggccaaatagcctatgccacggggtggatatacatgcagacgcgggcacccttctctgggaggggtgacccctctggtgggctgatgatcccccgctgacgcgtcttacctcccccctctctattctccacctcccctacctccccatcttgtgcgtcactagccgtcgcttatgggttttcctgcatggtggcagcagttaggacgcgagtggcccgtatagagggagattggcgctacgtgggtctcaattatatagtatctgcgcggcacacgctgaaactaggtcgaagactgatcacctagtcgcacctccgtaaaa

SEQ ID NO: 18333 - DNA, 729 bp, Homo Sapiens
  misc_feature (306)..(366): n is a, c, g, or t
ggggggcccctcaaaaggatacaaatgaacgcgccgttgcatgccatctcttagctcttctagagtggcccctaaattcattttttgggccctctttttaggggaacatgacggggtaaaccctgtggttacccatcttactcatcttgcttcacatacctcgtttaccagcgggatggacagcaaaaatgccccttccaatcgcctttccaaccagatgggcacacggaatgcgccatggaacggcctctgtagcggcgcagtataggcggtggcgtgcgtggttacgcctaccctgacccccannnnnnnnnnnnnnnnnnnnnnnnnnnnnnnnnnnnnnnnnnnnnnnnnnnnnnnnnnnnncggcgggtttcccggtcagggtctaaattgagggctcccattaaggttcctattcatgctctacccgaaactcgacgccaaggaccatgatcaggtaatggtccacctccgggtctacgctctgtcaccgttttttctctctttgactttggacccctgtacttatgtgggagactgtgttccaattggaacaactccagacatatctgggtttatcttgaatttacagagtatttccctagtcagacatttggttaaaataagctattcggcaaaacttcacccaattactcttatattacggtgacacctaggggcacattcccgggaaatttcgtggtatcctcttttttattcttcaaa

SEQ ID NO: 18334 - DNA, 807 bp, Homo Sapiens
cccacccaacagcagcgcgagcagggtgaacaaaccaccgcccagcaacaggtaccaactgaacaggttcaggcgcggaaacgccatgtctttggccccgatcatgatcggcaccagaaaattgccgaacacgctgggaatcgagggaatcaggaaaaaccagaccatgatcaccccgtgcagggtaaacgcgcggttgtaaccatcggcggtgagcaagtcgccttccggggtcaccagttcaatacggatcaggctcgccgccagtccgccggcaaagaaaaagaaggtcacggtgagcatgtacagcaccgcgatgcgcttgtggtcgcgggtcaggaaccacgagcgcagaccttgtttatgcaggtagctgggttggctcatttgggatctccaggcagtgtgcgcagataggccaccaggcgctgcacggcctcttcgtccagcaggttgctgtaggtcggcatgatcggcaggtagccggccaccagttgtttttgcggcaacaggatactgtcgcgcaggtaggcttcatcagccttcacctggctcccatcggccagctgtaccgtgcgattgaacaccccggccagcggcggcgcgttgcccgaatcgtggcaactgccgcagccgtattggcggtacagggtttcgccctggctggcgaggtcggcggcgctgccgttttcagtcagccagtgctcgtagtcggcggggtccagcaccaccaggcgtgccagcatggccgcatggtccggtgccgcagtattcggcgcagtacacctcgtaggtgccgctgtgctc

SEQ ID NO: 18335 - DNA, 552 bp, Homo Sapiens
ccggccagcagcgcccgcgccgccggcagcgcatagccgcgcagcaccaccgactgcgcgccgatgcgctcgcggccggtctgcgcggtttcctcgtcgtcaaacaggttcaggctggttcccatgtcaggtcgcgtcgtggaagatcacgccgagcgtgtggcgctggccgtcgcgcagcgcgctgacgccgtggcgcatggccacgcggcgccagccgcgcgcgccggcgaccgggcgctggttgacggtgaagaccagcgcgtcgccctggcgcagcggcagcacttcggcgcgttggcccgcgctgtcggtctcggtcatgacgaactcgccgccgctgaagtcctggtccggccgcgacagcagcaccgccacctgcagcgggaatacgtgttcgccatacaggtcctggtgcaggcagttgtagtcgcccggcccgtagcgcaggatcagcggcgtcggccggcgctggccggcctggtggcagcgcgccaggaagtcggcgtgcgcatccgggtactccaccgcgatgcccatctgccggttcca

SEQ ID NO: 18336 - DNA, 555 bp, Homo Sapiens
tcgggcgtgaacgccaccaggcacacgatggccagcggcgccagcacgaacgtcaccaccagggcattgaaggccaatgcgaaaggaccgttcttctgcatgatcgctgtcctcgttcaacccaggctgcgccggtaggaacgttccaccacgcggttgtacgccatcatgatgatgacgttgaccaccagcagcacgatggcgatggccgcgcccagcggccagttcaattcggtcaggaattcgtcgtagaccaccgtggccaccatcttcaggcggcgtccgcccagcagcgcgggaatcgcgaacgaactggccgacagcccgaacacgatcaggctgcccgacaggatgcccggcatggcctgcggcagcacgatgcgcagcagcgtctggaaacgcgacgcattgagcgacagcgctgcgtgctccacggtcgggtccagcttctgcagcgaggtccacaccggaatcaccatgaacggcagcatcacgtgcaccaggccgatgatgacggcggtgggcgtgtacagcagcggtcccaggcccagcgcc

SEQ ID NO: 18337 - DNA, 844 bp, Homo Sapiens
  misc_feature (41)..(92): n is a, c, g, or t
ccacgcgtccggagtcataacttaacatggtggcaggcaannnnnnnnnnnnnnnnnnnnnnnnnnnnnnnnnnnnnnnnnnnnnnnnnnnnttgaggattacaattcaagataagattttattggggacacagccaaaccatatcaagtgataaattaatagatgcaggttaccttggtagatatacctttaagatgatcttcaatattgggtagatatttgaaattgtggagatgttagaaatagaattataaactgagtaaatcaatttaggtttaatcatgagttttatctttaaaatttgggcttgatttaaagtgccaaagagatattccatccaattagtatgggaaaatggctagtggttcagaaactttttaaaaggagttagtttcagagtttaaaaatttgttttttccaggtcattaaatttgacggtggagaggaagtacttatttcaggggaattcaacgacctgagaaaggtaatgcttttgtgtgtataatgtaatatcagcagctaggatactaagctttaaaaacatgtaaaaagcacattaaattgacatcttttttgtgttaggtcaccaaggagcagtgggacaccatagaagaactcatcaggaagacaaaaggttcctaagaccactttggccttcatcttggttacagaaaagggaatagaaatgaaacaaattatctctcatcttttgactatttcaagtctaataaattcttaattaacaaacattcattgaatatgtattatgtgccagggccagtgatagccattgtatattcaaagataaataaaatgaaatatagtcccttcaaaacattaaaa

SEQ ID NO: 18338 - DNA, 217 bp, Homo Sapiens
cgagattgaaagcctgacgctggtagacaccaacaaagatccgaagacccgcctgcaggaattcctgcagtcccgtggttgcgacctgccgcgttacgaagtggtggatatccagggtgagccgcactgccgagttttcttcgtcgaatgcgaaatcaccttactgaatgaaaaaagccgaggtcagggtgtgagccgtcgtattgccgaacaggta

SEQ ID NO: 18339 - DNA, 626 bp, Homo Sapiens
  misc_feature (235)..(265): n is a, c, g, or t
ccacgcgtccgcatgacttgggaagtttgaaatgtgttatacttggaaagagaagtttacttcttttaaacatctggaattcttaagcaatgcttcagaatagtgtaggctcatggagaaatttgtgagaaattctttccatatgtaacttactggatacatggcctgcttataatacttatgatgagcaagcttagggactgaatgtaacaaactggaataggacctgattcannnnnnnnnnnnnnnnnnnnnnnnnnnnnnngcatatctaagttgatatgcttctgtattttcagttattttcatgagtcccagtttttaccattccagaatctggaggaagttgaaagcaaatttacttccttagttctccatttgctagtatgattctgggatcagaaacatcttctgatagcattattttggatattcttttgagaatgattgatataattaatttacctacagttccagatgatcaccctcggttgaatcaacctggatttaactactgttaaatattttaatttttttctaatattagtttttctctatgaataggtgaaggttttacatagttctaattataccatgccttttcccctgaacttactataagcagg

SEQ ID NO: 18340 - DNA, 412 bp, Homo Sapiens
ctggctttgcatgtcggtgttgtcgctggcgaagcgggcggtgccggtcttcatcaactgggtcttgatcgaggtggtgatctcgcgggtatcgatgtactcgctggtcttgttcttcacgtcatacacctgaaccaccgggcggccctggaggatgccggactgggccagggagcgggtcatgctttcggcgatcatctgcaggtcggtggaaccgaactcgttggtcaccagttccacggctttggtgtcgccgtagctgatgtttttaccgcccagtaccggcgaggtgttggcgcagccgctggccagaacggcgaccacggcgaggaacgagaagcgtgcaaacatggggatgtctctctgaaactgaatgagtgggcggatcaaggcgtcttcacttccaggcgga

SEQ ID NO: 18341 - DNA, 774 bp, Homo Sapiens
tacccctgagcgccaccgtggcccgtcgccagttgcggttgcgggatattttgcacatgcagccgggggatgtgattcccgtcgagctgccggaagaactgatcatgcgcgccaacggcgtgccgtcgttcaaggtcaagctgggctctcacaaaggcaacctcgcgttgcaagtgattgaaccgatcaaccgccgctgatccacattaatttctgctccgccgaggacatgtaatggctaccgaacacgaaaacacttccgccgaagaccaggccctggctgacgagtgggcggctgccctggaggaaaccggcgatgtcggccaggacgatatcgacgcgctgctggcagctgatgcggccaccgcaccggtgggcaaccgccttcccatggaagagttcggcagcgtgccgaagaacaacgagccggtgaccctggacggtccgaacctggacgtgatcctcgacatcccggtgtcgatctccatggaagtcggcagcaccgaaatcaacatccgcaacctgctgcaactcaaccagggttcggtgatcgagctggatcgtctggccggtgagccgctggacgtgctggtcaacggcacgctgattgcccatggcgaagtggtggtggtcaacgagaagttcggcatccgcctgaccgacgtgatcagtccaagtgaacgcatcaagaagttgcgttgatatgaagcgctcattggtaggactgttatcgacgctgctcttgagcgtaatggcagcagaaccggtcgccca

SEQ ID NO: 18342 - DNA, 321 bp, Homo Sapiens
cacttgctgcaggcggatactcggggctgccgggccctggctcatgccggcgtgcttcatgtgctcggcatgctcgccagacatcggcatcggcgtgttttccatggcccacggcacggtctgttggctcgcggtgttgaggctgcgggcctgctggtcggactgcggtacgttgttccacatcgccgccgggaatttattccacagttcggcatattgcttgccccagaagccggtccaggtcatgccgctgagcagcatcaccagcaggaacgccgcgccccagaagccggcgactgcgtgcaaatcccgccagaacaa

SEQ ID NO: 18343 - DNA, 359 bp, Homo Sapiens
ctgaatcatggactgtgtgtattctacactcttaacatgaactctgagactaagcttttataacatgcaaaacagaatcaagcagttttgcattgaaaggaaaacccgttgtatttcccacctgccttccgctggaaattctcaagtgggaaatacaacggaaggcaggtgggggaggggctgtttaggggaccacgcagcgggagagccatccccaacaggaagggagcggttgtctgcaggagcagtgaccaggaactcctatggggcacctgggttgggggaagctggatttagggttagaagcttgtgtgtaaacaggaaatatcagtgtaaaacagaaaataaaatatgtaatt

SEQ ID NO: 18344 - DNA, 737 bp, Homo Sapiens
ccacgcgtccgaattaaataaaaacatcaaaatgttgaggtgatatgtaaaatttaagagggcatgataaaatagtatggggataggtaaaaattaggaagatagtgcttaaataattggcatttgggcaacactttaaacattgaaagcgagaaagcactttatgggtcattgtctgctggcctccacccctacctaccctatgtactagactgtttaggaaggctgaggccatgtgtcagtgagcttaccgttacatcctgggaactggtaggtgctcaataaagaaatgaaatgtaggtggatggatacatcatgtggctcagatcccttgttttgcaggtgagaaaactgaggtttaaaggaacaggtgacttggctgggagcactcagtcatttagtggcagtaggcaactgtggccccatctccagtactgagtcccgagcccctttcactagcacatgctgcctggtagagtatgaacagatagttaccaaatgctctacacagagaacatttaacccccagtcttaacaagtgccggtgattcatgagatattgacccatgtcctttattttacgagtgtgtctcttttaaactccaaaaatgtttttatgcttttatgagtgtcctgaactttacatgggtgctgctggagattaaatcctccatcagacccctccattcaatattttcagcagaattttatcactatgatttcaacatccccaccac

SEQ ID NO: 18345 - DNA, 313 bp, Homo Sapiens
tcatgcgagccaacgtttacttcgacaattcgattccggatggcaaaggcggctacgaagatcgtggcggtttttgggcgaatgtggagtggtggcacaaggacgccgagcattattcgcaactgttccagaaaggtatgcgagtgctggtttccggtcgcgccgttatggaccgttggaagaacgacgatggcgaattcgaagctttgaaaatccaggccagccgggtcggcatgctgccacaccgcgtgaccatggtgaatctggcgccttcgcaaaaccagaattcgcaacagtccaacagacccgaatc

SEQ ID NO: 18346 - DNA, 831 bp, Homo Sapiens
cagtcggcatttacctccaacttccagttcacctacgtcggttcaaccaacggcgtgttcacccaacggcccgacgccaaaatgccggatgactacgacccgcgtcagcgtccctggtacaaacaagctgtggccgccgacaagaccatgctcacgccgccctatatggctgcggtaggtgggctgatcgtgaccatcgcgatgccggtgaaaaagaatggcgaactgctaggcgtggttggcggtgacctgagcctgcaaactctggtgaagatcatcaactcggtggatttcggcggcatcggccatgccttcctggtcagcggtgacggccaggtgatcgtcagcccggaccaggaccaggtgatgaagaacctcaaggacatctacccgggcaccaacgtacgcatcgagaaggtcagccaggaagtggtcctcaatggccaggaacggattctgtccttcacccccatcagcgggttgccgaatgccgactggtacatcggcctgtcgatcgacaaagacaaagcctacgcaccgctgggcaagttccgcacctcggcattgatcgccatgttcattgcagtggctgctatcgcggtgttcctgagcctgctgattcaggtcttgatgcgcccgctgaccaccatgggtcgcgccatgcaggacattgcccagggcgagggtgacttgacccgtcgcctgaccgtggaaagcagggacgagttcgggtgacttgggcagtgccttcaaccaatttcgtcgagcgtattcacgcgtcaatctccgaagtttcctcggccacccgtcaggtacacgacctgtcccagc

SEQ ID NO: 18347 - DNA, 828 bp, Homo Sapiens
ccctaccagatcgtcgaagctcgtgccttgggcgccgattgcgtgctgttgatcgtctccgcactggatgacgtgaagatggccgaactggcggccgtggccaaaagcgtcggcctcgacgtgctggtggaagtgcacgacggtgatgaactggaacgcgcgttgaaaaccctcgacacaccgttggtgggcgtcaacaaccgcaacctgcacacgtttgaagtcagcctggaaaacaccctcgacctgttgccgcgtatcccgcgtgaccggttggtgattaccgaaagtggcatcgtcaatcgcgccgatgtcgaactgatggaaatcagcggcgtgtactcgttcctcgtcggcgaaaccttcatgcgtgccgagaacccgggggctgaattgcagcgcctgttcttcccggagcgtggcgttgctgtcagcggttcgaccctggattgatgatgacccagccggtggcgatgacggtcgaggcaggccttaaggccgagcaggatttgctcgccgctgtctgcgcgggggagcagccgttcggcctgctgttctggcagcccagcgatcaagcgttggtgatgcctcgtcgtttgagccgccttccggcattcgagaccgccagccaggtatcggcagatgccggttggccggtgctgctgcgggaaacgggcggtgagccggttccgcaatcggcagccacggtcaatattgcgctggtctacgcgccaccacgcagtgaaggtgaccaagggcgcatcgaaaccggctaccagcgttttgtgccacccgatttggcgaccctgcttatcgagctgggtggca

SEQ ID NO: 18348 - DNA, 891 bp, Homo Sapiens
ccacgcgtccgtgtggcacccagatcacgctgtttttatctgcagttcctttttagtattgtacaaagtttcttgaagatttttaaatacataagtttaaaagagaattaactttcaatttgcaaattaaaatgagaatggttgccttttcttcattatcaagagatggtgagttgtcctcctgttgcatcataaatacaaaggactgaagttataaaagagaaaagagaagtttgctgctaaaatgaatctgagcaatatggaatattttgtgccacacacaaaaaggtactgaagatttaccccccaaaaaaaattgtcaatgagaaataaagctaactgatatcaaaaagcagagcctgctctactggccatcatgcgtaaaggggtgctgaaggacccagagattgccgatctattctacaaagatgatcctgaggaactttttattggtttgcatgaaattggacatggaagttttggagcagtttattttgctacaaatgctcacaccaatgaggtggtggcaattaagaagatgtcctatagtgggaagcagacccatgagaaatggcaagatattcttaaggaagttaaatttttacgacaattgaagcatcctaatactattgagtacaaaggctgttacttgaaagaacacactgcttggttggtgatggaatattgcttaggctcagcctctgatttattagaagttcataaaaaaccacttcaggaagtggagatcgctgccattactcatggagccttgcatggactagcctacctacattctcatgcattgattcatagggatattaaagcagaaatattcttctaacagagccaggtcaggtaaaactagctgattttggatctgcttcaatggct

SEQ ID NO: 18349 - DNA, 324 bp, Homo Sapiens
tgaggctgggttggcaaaagtttttttatattggaacgggaattacctttacgggccctttttttatacccttgagactggaaaaactttggccttttttcatatatattgtattaggaccacatccctctctccttttctcaataaataaaaagccagaatggtatatgagatcgcactgtaccgacgcatatagtgagcgcggtggggtggtaattctacgatagatccttaccattagttattcctaaacccacggctctctcgtttgtctcttccattgtcgacacggtaggggttttactcttgcagttaatcaacgag

SEQ ID NO: 18350 - DNA, 267 bp, Homo Sapiens
  misc_feature (178)..(190): n is a, c, g, or t
ggggggccgccccaaaaaaaacaaacttaaataaccggggatgggaacttaaaacctttttaaaggggccccaaaattaaatttccggggccttttttttaaacgttgggagggggaaaaacctggggttaacaaaataaaaccccttgaaaacaaaccccctttccccccggggggnnnnnnnnnnnnnggcccccccaaaccccttttccaaaatttgcccaaccaaaaggggaaaagggaagccccccggagggggccaaataa

SEQ ID NO: 18351 - DNA, 512 bp, Homo Sapiens
caccttcttgccgccgaagtcgtagatggcggtggcgccggtgtagctgactgcgccggtctgcgccagcagcgccaggttgaaggcggtgaaatcgctcatgccgacgaagcgcttgccgctgtcggccatggccttccagtcaaccaggtgcagcagccggcccatgccgtagccgccgcgcgtcaccatgacgatcggcagcttctgcttggcggcgcgcgtcaggctggccaggcgctgggcgtcggtgccggcaaagcgctggtgttcggccagcgcggtgcggtccagcgcggtcttgaagccctgcgcggccaggcgctcgcgcgccagctcgacggtctgcgggtcgcgcaccgccgacgacggcgagatcaggtagatgccgcgcgcgtccgggaagctgtggacgtggcccggctcgtggtcgtggctgtggtcgtggccgcaggcctcgccgcattcgtgatcgtggtcgtgcgcgtggctggcgtggtcatgcgccgggg

SEQ ID NO: 18352 - DNA, 757 bp, Homo Sapiens
ccacgcgtccgcggatcaaggcgagaggatccggcagggaaggagcttcggggccgggggttgggccgcacatttacgtgcgcgaagcggagtggaccgggagctggtgacgatggcggggccgcagcccctggcgctgcaactggaacagttgttgaacccgcgaccaagcgaggcggaccctgaagcggaccccgaggaagccactgctgccagggtgattgacaggtttgatgaaggggaagatggggaaggtgatttcctagtagtgggtagcattagaaaactggcatcagcctccctcttggacacggacaaaaggtattgcggcaaaaccacctctagaaaagcatggaatgaagaccattgggagcagactctgccaggatcgtctgatgaggaaatatctgatgaggaagggtctggagatgaagattcagagggactgggtctggaggaatatgatgaggacgacctgggtgctgctgaggaacaggagtgtggtgatcacagggagagcaagaagagcagaagccactctgcaaaaacaccgggcttcagtgtccagagtatcagtgactttgagaaatttaccaagggaatggatgaccttgggagcagtgaggaggaggaagacgaagagagtggcatggaagaggggatgacgcggagactcccaaggcgagagtgaggaagacagggctggagatagaaacagtgaggatgatggtgtggtgatgacttctctagtgtcaaa

SEQ ID NO: 18353 - DNA, 435 bp, Homo Sapiens
ccacgcgtccgtgttggtatttataagttgaacaccaagatattgctaaataggctagtccctcaatctggcatgttagaaactgcgtaaattaggactcagaggaccacctggttttagtttctactttgccactccctacctatatcactagacctaaatttcctgaacagtaaaaacaaggatgttgccctgaataagctataatttacttttcatctcagatattctttaattttggaacccatgcaaaatatctggttaaatttaattaggagttaagaaggtgaggattttgcagaacaggtgtctcagatctttactgtatttattatggtttcatagtctagtagccccaagatgttctgtttctacaacttctctgtaaatggcactggcaaagtcttttaacagtgttttagaaactttttttct

SEQ ID NO: 18354 - DNA, 573 bp, Homo Sapiens
ccacgcgtccgatttgtgataattctctaggcaaagctttcatagctgtgacaccaaaaacaaaaaagtgcaatagataatttgttttaaaagacagcgtttttattacaggaggttgtaaaactagtctgttttatctgtttcagattaatctcaacttaatttcagtaatgaaaaatttgctctatatgccttcattctgcccatgctgttattgtcacaaactacatctttataataattatatgtccatcaacatagttttataattacgcagttttaaaaatcaggagggaagaacaagagttacgaacagatatacattgtcttgctgctccaaaatctgcaatgtaaaaggccccatgcacaagggcaatgtgctaattctgttggagtcacgagtgagaggcccagaggttgcacctcacttggctgctcactgggtcttggatgcagggttcaaccacttggccagtgggaatggtgtgctacgatctgctcctttattttattttttgctcaccacacgggaattgtgatgcacccttaaataaagcatttgtgttccaaatt

SEQ ID NO: 18355 - DNA, 249 bp, Homo Sapiens
ccacgcgtccgccaaattgcagattattctgcagagagggaattgcatgtttgtgttgtatatttagtatgaacttttttcagaatataatatttcttagttatcaaaagtagttggaaaacatttgcaagactatgaacatagaattgctgcttttatattttaactgcagattgtgaatttcactgccttatattatttatttctgaaacaaaagaggcatttttcaataaaactactgaaaatttg

SEQ ID NO: 18356 - DNA, 674 bp, Homo Sapiens
ggggggggcctctatagagatcaaaactcaattaccgcggcgtggattcacataactctgactgagagaaccctaaatttacttcaccgggggcccttgaaacaaatccccatggagaaaactgccgataaccaatgagactccattgatcgcactccccttttgttaagcggggtaaatcgcgaaaggagcccccctatacccctccataaagtgggcgggtgtaggtggtaaggggagcgtccctgctacgcgtcctataccctcggcggggtgcggtggttctccctccgtgcgcttctagcttcggtgcgctgattgcccgcctcatttcttatcgtggcgtctcctttcgcgtatggagctaggtgtccacgaactcctaaagcggaggcgctcataaagggtacgatacgtggttggcggtcctctcgacacacaggaattggtacgtgggaggtggaggcaaggtgcctacgcccgaaaactgatgttttccgcactagactggaggcttcctttgtttagtggttgtcttgtccgaagtgagaaactccacccttgcgtggatatgcttgataaaaggagattccggaactcgcactgttaagactaggctaatgtgcatattggcgcaatttcccaaactcacgctctattattgggggccattc

SEQ ID NO: 18357 - DNA, 633 bp, Homo Sapiens
gccggccggacctgtccatggtggtctatcaccccgcctcgccgcaggccgccgatcgcatccgcgcgctgctggcgtcaacgcccgttggcggcgtcgatgaatcccgctagatcgcggttgaagcgctcggcctcctccaggaatggcgcgtgtcccgacgccgcatacaccgtggcctgcaggcgcggattcaggcgcctggcgcgctccagcgacggctcgacgcgcaccagcgcatcgcgcgccccgtagatcagccacagcggcttgcgcatcgcgcccaggccttcgcgcgccgcgatcgtcatccgcggcaccgcggcctgcatcccgggcgacgccagcgcggcattggccagcagccgctcgaatgtcaccgtgtcgggctgcgtcgcgaagcacagcgccaggaacgcgcgctcggcgtccaggtgcgtcttcaggtcgctcgacgccatgccgcgatacacctcgggatgcggcgcgatctggctggcttccagttcgatcacgccccccacgtagaccgcgccggcgatgtccgcgtcgccatgcgcggccaggtaattggtcgtcacggccgcgtccagcgaccagcccatcagcaccggccggcgcacgcccgacgcc

SEQ ID NO: 18358 - DNA, 779 bp, Homo Sapiens
ccacgcgtccgcccaaggtaataaatcagtactcatccctgccttcaaggcatttgcagactagaaagactagaagtctacatgtgaaacagaatgatgcccttatatggagttatccaggcaccaagttgcgtgaaggcaaatgctcttggtgtggaagaagttggaggggcttcctggaataggaggtggacatgtgagttggactcaagagataagggcctaggaaggaatatggtgttcaaaatgagaaagaggtggtgcacatggggtgtggggccagtaaaattccatccagagtggaggaatctgtagcagaaagcaggaagttttgaaagttcagagctggggggaatattttataattcccagtaaatgccttagatggtaggatgacatttactgataaagagcatcactaactcagtgagtctttccctcacagatggccacttcttcagtgtgaaatgtcagtgtatattgacaatgtttatgttcagaaaacctctcagtatttcaaaggccttagggtcattaagcaaatgacttaattcttttaattcactgaggccacttctttgtctgtaaaattagactaatgcttcttatttcactgggtttgcacatttatcagaataacatgtgaaaaaaatcttagcacagtgtctagtccagagtattaagtactgggggaggtggcatagggatgatgttgacttacatttattaacctattcataggactctgaacatgagcatgggtgccttcacatcccttt

SEQ ID NO: 18359 - DNA, 639 bp, Homo Sapiens
  misc_feature (50)..(329): n is a, c, g, or t
acaattaaagcgtccgaaaatagtcaaagtgtggccaggcatggcccttnnnnnnnnnnnnnnnnnnnnnnnnnnnnnnnnnnnnnnnnnnnnnnnnnnnnnnnnnnnnnnnnnnnnnnnnnnnnnnnnnnnnnnnnnnnnnnnnnnnnnnnnnnnnnnnnnnnnnnnnnnnnnnnnnnnnnnnnnnnnnnnnnnnnnnnnnnnnnnnnnnnnnnnnnnnnnnnnnnnnnnnnnnnnnnnnnnnnnnnnnnnnnnnnnnnnnnnnnnnnnnnnnnnnnnnnnnnnnnnnnnnnnnnnnnnnnnnnnnnnnnnnnnnnnnnnnnnnnnnngtgtgaatgttggcctttccatacaaacagtgccaggctgaggttgcctgacccttgtcaggtcttgggaacaggtgtccctctgctatagaggtaaatatgatatgtcagtgattttagcttatcactattaaatatttcacctgtacgattgacagctgttcttttgcttccgtgttcaccataaatctgctgatgatttggctgccatgtccctaacggagagaatgtgttagcctgaggacttgacgttcccatacccttggcaattatatttctagtaaattaataaactggcatccttggttat

SEQ ID NO: 18360 - DNA, 338 bp, Homo Sapiens
attataatttctacacccccaaccaatataaaaaattttaaggtaagaaatgttttacattctttttttcatatcatgtattcgaaacccaatgagttattttatacttacagcatatctcaaactcaggccctgaatgtttgtcagaaatacatggtttgtatttagatttcattaaattcacagttaaaaaggtagattctcataaccaagttccaaagatacttaaacgttttccagtatctgaactgaacatgagttctaaaatttaaattgattgacactgaatgagatttgatattgacttcctcggttgtactacccaacttcaagtgctc

SEQ ID NO: 18361 - DNA, 431 bp, Homo Sapiens
ctgcccaacgacctggcgctgctgccggtgccgttcttcgacagccgcgacgtccgccagctggcgctgccgatcgtgctgggccgcagtccggatgcggcgcggctggagagcgcgggcgtcctggcctcgtggttcggcgcgctggcgggctaccgcggcgccaagttcgacgccagcctgcaggacctgccggccaccggcaacgcggtcgtgctgctgcagccgggcgacacggtcgccggactgcagacgccgacgatcgaggggccgtcggtggcgatgcagaccaatccgcgcgacccgcacggcaagctgctgctggtgatggggcgcgacgccaaggaactgaagcaggccgccgccgcgctggcgctcggcagcgaagcgctatccggcccgcaggcacgcatcacgcgcctggagacgcc

SEQ ID NO: 18362 - DNA, 679 bp, Homo Sapiens
cacccacgcgtccgatctggtgaaacacaattctctctgttatattcaaactgcaaaaaattctgtagatccatttgaaatatgaataagaatgatattttttcttatttaataatatttttaaaactgaatttacaagagttaagtaggagctgtcatactctgataaattctttaaagtattttaagaaacccttgggaatatttcaggaagtatgaattggaagagagccaattaaatttttgagtttgagggttaatcacagatctgaggtgaagacatttgcctttcacatattacttccttaatacatttgtatttaattatgatttaacatacatgttggggaactgtaaatggtgcatataaacagatttaaaagaatctgagataaaactatagactaagaaatatgccttgccttcagagaatttatagaaagtctatctgtcagtgctagggtgctaggggctgggaggagctgagagcagctctaaagccaggaagctggacctaaaacagatggctattgagcgaagtatttgaagctagatgatgtgtaagtaataatattctctgagcacctctattattattttttaggttctctgcatcagaatgaggaaagagatttaataagttgtgaattttaaattcatgagaatgccaatagagacc

SEQ ID NO: 18363 - DNA, 852 bp, Homo Sapiens
agcgcgtgagtgtccaggccgacaaacagcgggccgttgatgccttgggcttcacggtaaaggcaaatggcctggctgatggcaagcacgtgccattcattgaagctcaggtcgaacgagctgccgcggtgcccggaggtaccaaaggcgacacgctgggtggagatcgctgcatcaggctggccggtgtaataggccgttaccagtcgcgggatgtctaccagcagttgagctggtgccggcttgcccgcaaaaggactgagagtcatgcataaacctctgaaagagaaggattcggaaaaaagtgcagtttactgagagttggactgctccgcgacgttataaatcctacaacaatcagtgaaatttcattcgacgccggtctgtgcctgcctcaacgcctgggccagctcatccagggcgttttccaggtgatgcgccccgtcaaaggtagggctcagccgaaggtgctggcggtgcaggccgctgatgctgaacagctctcccggcgcaatcaccacctgccgggtgagcaggcgctggaacacctggcgcatgtccaccaccgccgttgagcgcaaccagaaggtggcgccagcggcaggcattcggtagctcacctgctcccccagatgctcctccagatgctggttcatcagtcgggactgctcgttgagtttcggtcgcaactcccgcaagtgctggtcgatccgcccgctgagatagagccgcgcaatcgcccgctggcggatggaggacagccggaattcacgcagcaggaactgacgttgcagctcgccgctcaagtgggggacaacaatagccaacgggcgcttcgggccgagcattttt

SEQ ID NO: 18364 - DNA, 784 bp, Homo Sapiens
cacccacgcgtccgctggaatagaacatctcaaatgctgcttaattacagactcaggtcgattacttgtatttcatgtaatgttcctccaagttagacatctggtgcaagaccaaccgggagaccatggaattgtcaaaagtacaaactgacagtgtgtatatttaatttaaagacttatttaaaaactcacaagctctcacctagactttggagagcagtctgttttctgtaatgtctgatactagaaactaatttgcttattttagttgtattcaagatttgaagatgtattttatagacaagttctgtttttgaactttgtggaactgttccaatcaatcaatttcccagttatgatgagtatttacattatgaatgtataacccagacatgatttgtaaagccgacagtatgtttctattacacaacactttttgatacagcgtctcttgtcttcactgatactggagtctccgttgtctgcttggtcccttcgagtttctagttacagacacaatcatactgtgattttatttttaatatggatatgctatcaaactgtgatacacttataattcactggtcctgcatcaggagatggagtggggaaaactgtatttaatacagtttgtatctgaataatctgtatggtttatacagtttgtgttgttcagagatgtttaagtttgatctttgtttttctaaagattaaaaaagcacttgccccactgtaaatatacagcatgtaaaatttctatagtatataattggcaggcaatccc

SEQ ID NO: 18365 - DNA, 364 bp, Homo Sapiens
cacccacgcgtccgatatgtaatatttataaatggtgccaactgtggcttccatttgttttttagaatattgcaaatttgattataattatgaatttgtgtgcagaaacctaattttgtatgtttctgctccataagtttcttaagaagaacattgcttttaccataatactatgcttcattaaaatttagatggacacacacaataagtacttctattttcattgttgaacttattacttggatttataataacatttacaataatttcaaatgttttcctttgctagaataaacttccaaaaactttactataattctgaatgttgaaaaagaaaagattaaacctttgttggaatcagctc

SEQ ID NO: 18366 - DNA, 707 bp, Homo Sapiens
cacattggtgtcgctgtcgaaattcatgtcccacacccgcgaggcgatcagcgaacgcgacagtacctggtcctggtgggtggcgaacaagtgcaacaaggcgaactccttgttggtcagggtaatgcgcacaccgccgcgggtgacgcggcgcttgagcacgtcgatctgcaggtcggcgatctgcagttgttcttcttcacggcttggcccgcgccgggtcagggtgcgcaggcgcgccaccagttcggcgaaggaaaacggcttgatcaggtaatcgtcggcgcccagttccaggcccttgatgcggtcggcaatgtcgtcccgggcggtgaggaacagcaccggtgtgtcggcttccttgcgcaggcgacgcagcacttcccagccgtccatcttcggcatcatcacgtccagcacgatcacgtcgaacggggtttccagggcctggtgcaaaccgtccacaccgtctcgggcgaggctcacggagtaacccagttcctgcaggccgttaagcaggtagttgcccgccttgggctcgtcttcgactacgaggatattcatgggagttgccctggtgatgtgccggtgtttcgtggcgcaagtgtagccctatcatttgtcattggggcagccgatgccctgtacttgatagtccagcacgtgttcgcggccttggctgtcgaggtagtcgaggcgggcgggga

SEQ ID NO: 18367 - DNA, 904 bp, Homo Sapiens
  misc_feature (117)..(194): n is a, c, g, or t
  misc_feature (200)..(804): n is a, c, g, or t
aaatccttggagcttctggttcctatcagttcctgttgttaatcgtagaaccgttgtcccttcccccattcccgtatccatcatgttctttttcttttaaatatcaatataaaggtnnnnnnnnnnnnnnnnnnnnnnnnnnnnnnnnnnnnnnnnnnnnnnnnnnnnnnnnnnnnnnnnnnnnnnnnnnnnnngggggnnnnnnnnnnnnnnnnnnnnnnnnnnnnnnnnnnnnnnnnnnnnnnnnnnnnnnnnnnnnnnnnnnnnnnnnnnnnnnnnnnnnnnnnnnnnnnnnnnnnnnnnnnnnnnnnnnnnnnnnnnnnnnnnnnnnnnnnnnnnnnnnnnnnnnnnnnnnnnnnnnnnnnnnnnnnnnnnnnnnnnnnnnnnnnnnnnnnnnnnnnnnnnnnnnnnnnnnnnnnnnnnnnnnnnnnnnnnnnnnnnnnnnnnnnnnnnnnnnnnnnnnnnnnnnnnnnnnnnnnnnnnnnnnnnnnnnnnnnnnnnnnnnnnnnnnnnnnnnnnnnnnnnnnnnnnnnnnnnnnnnnnnnnnnnnnnnnnnnnnnnnnnnnnnnnnnnnnnnnnnnnnnnnnnnnnnnnnnnnnnnnnnnnnnnnnnnnnnnnnnnnnnnnnnnnnnnnnnnnnnnnnnnnnnnnnnnnnnnnnnnnnnnnnnnnnnnnnnnnnnnnnnnnnnnnnnnnnnnnnnnnnnnnnnnnnnnnnnnnnnnnnnnnnnnnnnnnnnnnnnnnnnnnnnnnnnnnnnnnnnnnnnnnnnnnnnnnnnnnnnnnnnnnnnnnnnnnnnnnnnnnnnattccggcctttgggttaaaaaggagctggttttaccaaaatttaccgcgaatttaacaaatatatacccttacaatttaggtggcacttttcggggaaa

SEQ ID NO: 18368 - DNA, 250 bp, Homo Sapiens
cacccacgcgtccgagattttcagttataattacaattaaagtatacttttatcttgaaaaaattactgatttttaaattagtgaataatgatgtaattaaactctcaaataactttatgctcttttttcattcctgctatattcacatgtgaaagcatgtgaccaattgttgctgcaccaaagatatgagagattcttttattaggtgggcattatttaaaacattttttatggaacagtaaggatatt

SEQ ID NO: 18369 - DNA, 504 bp, Homo Sapiens
caccgccgccacccggccctggccacgctcgtcggccagggcaaactggacgtttcgggcgacgccaggttgctggtcgtgcaacgcaacgccaacgcgcatctgcgcggctatggaatctttcgcgtccccactgactgggcggcgcagcaactggactggtcttcgccacaggcgacccggcaatcgctgctggcgcagttcgaaggctggcacccggacatcctcgcgctgctgcacgcctcaaacgagcgctttctgtcccgggccatttacgcgctgcccgtcgggcatcactgggcacaccgcccaggcctgaccctgattggcgatgccgcacatctgatgtcaccgtttggtggcgaaggcgtcaatgcggcgatgctcgatgctgcggagctggcccggcacctgatcgaaaacagcacatgctccgaggcggtaagggcctatgaaacgcagatgttcgaccgcatagagccgatcgcccgtgacagcgccgaa

SEQ ID NO: 18370 - DNA, 713 bp, Homo Sapiens
aaaatcaatgagctgctgggcccgggcgtggcccaggccatcgacggcggttcggtgcgtgtcaccgcaccgttggacccaagtcagcgcgtggactacctgtctttgctggaaaacctagaggttgacccgggccaggcggtggcgaaagtcatcatcaactcgcggaccggcaccatcgtgatcggccagaacgtcaaggtttcgccggcagccgtgacccacggcagcctgaccgtgaccatcaccgaagacccgattgtcagccagcctggcccgctgtccaacggccagaccgccgtggtgccccgttcgcgggtgaatgcccagcaagaagccaagccgatgttcaagttcggccccggtaccaccctggacgagattgtccgtgcggtgaaccaggtgggcgcagcgcccggcgacttgatggcgatcctcgaagcattgaaacaggccggcgccttgcaagccgacctgatcgtgatctgacgccatggccatggacatgcgtaaaagcggcctgagcagcacggcagactcgggttcttattccgacctcaaccggctgaaccagttgaaggtcggcgacaagaacagcgacggcaacatgcgcaaggtcgcgcagaattcgagtcgctgtttctcggcgagatgctcaagtccatgcgctcggcaccgaagccctgggcaaggacaacccgctgaatactccg

SEQ ID NO: 18371 - DNA, 717 bp, Homo Sapiens
  misc_feature (59)..(140): n is a, c, g, or t
  misc_feature (167)..(392): n is a, c, g, or t
taaataaacctggctggggaagtccaaactcttctaaaatggcaaccaaattccatttnnnnnnnnnnnnnnnnnnnnnnnnnnnnnnnnnnnnnnnnnnnnnnnnnnnnnnnnnnnnnnnnnnnnnnnnnnnnnnnnnnccccgccggggttataaccaagaaggnnnnnnnnnnnnnnnnnnnnnnnnnnnnnnnnnnnnnnnnnnnnnnnnnnnnnnnnnnnnnnnnnnnnnnnnnnnnnnnnnnnnnnnnnnnnnnnnnnnnnnnnnnnnnnnnnnnnnnnnnnnnnnnnnnnnnnnnnnnnnnnnnnnnnnnnnnnnnnnnnnnnnnnnnnnnnnnnnnnnnnnnnnnnnnnnnnnnnnnnnnnnnnnnnnnnnnnnnnnnnnnnnnattaattgtttaagcccctcgacccccaatacttgatttagggtaggtttcaggaacggccatcgccctagttaacggtattctcgctttgacgtggaactcccggttcatatgattgacttctgctgtccacttggacaacactcacctatctcggtctatttccttgagttgaaaagaactcgccattccgcctattgtttatgatgagctgatgagcacaaattaccgccgatttataaaatagttacgcctacatttaggggccttttcgggaaattgcgcgcacccctattgtagttctcaaaacatccagtatgacccc

SEQ ID NO: 18372 - DNA, 582 bp, Homo Sapiens
cacccacgcgtccgcaccaattaaacgtagatttggtcttttcatagtcctgtatttcttggaggctttgttcgtttcttgattctttttctttgttggattgggttaatgcaaaagccttgtcttctagctcaaaagttcttttctcaattttgctggcgcaaaattgcaattacttctgaaccaatgtaatacttgttcaattcttttgctgagacttttcagtgcatttgtcatttctctaagtgtgtcatttccagaagttgtgattgttttgtatttatgctatttctctggagattttcccattcatatcctgtaacactttttaaatttctttaagttggacttcacctttctctggtgcctccttgatgagcttagtaattgatcttctgaattctttttacaattaagagatttcttcttagtttggcttcattgctagtgagctagtgtgatatttggggggtgttaaagaactttgttttgttgtattttcagaattgtttttctgcttccttctgatttgggtcatctatgtcagagggaagagctcaggatcaaaggctgctgttgaga

SEQ ID NO: 18373 - DNA, 659 bp, Homo Sapiens
ggaaattaaatggggggggcccctataagaaaactaaataactggaacaccggtggggtttttcaattttttctatgtggaacacatattccttttccccggttggcccttttaaaaaaaagctgtagaataatgcgactttcctgggtgtgtgaaaaagagagggcgccgcgctggttccctgcaacatgatcgctacccttgtgagggcaatgggacccgctcctatcgcttcctaccattgcgtggttgccgtccgaggttgccgtttttattattagttacccggctttcccccccggttacactgtaattacgtagagactctaagacttgggcatcgtatagatgtacgaatacggctttgcgcccctcaccaaaaaagtgtgatgcgacgtatgtttcaattggagcactacacgagatactggttccttcttggattacgtaaagctctttgcgattaaagctcatggtttcaaagtgaattcacctaccccactttagggtatttttatgattaaaaaagcatctactattgggtctattgggtaaaggtaccaaattcaggatacctcgctagacattacaccaattcatcctcggcttggggggactctggaagaagtgcccggaacacattgttatatattaaatct

SEQ ID NO: 18374 - DNA, 234 bp, Homo Sapiens
tcacatcttagcacttccgctctcaggcctcctcctccatcacagatgtctggatgcttttggaaatggccttggctaaagtaaaagggaaaagtatatcctataacttataaacgtagctcatcccttaccatccaaggggcactcccttggttggattttctatgacagcacaggggacaggtggcacaccatgagaggtctgcccatggtgggagcagtgtcactgtgcta

SEQ ID NO: 18375 - DNA, 663 bp, Homo Sapiens
  misc_feature (57)..(129): n is a, c, g, or t
gcacgaggccaagaccaactgaccttcagctaacctgcagatgcatcagggggaatnnnnnnnnnnnnnnnnnnnnnnnnnnnnnnnnnnnnnnnnnnnnnnnnnnnnnnnnnnnnnnnnnnnnnnnnnagcctggtgtcagtctacaactcttggactctgagctgcatttacgtcctgaatccatcacttactgagaatcaggtctttattattattattaattttactccatcaatttcaagttttccataagagacatagacaatgtaaaggtcaaagattttgggcgacaaaacagagataactacaaaacctctggcaaacaacagttgctacctttgcaccaagctgagctctgagcttcctgacaggcatggcaaagagaggaagaacatgcactactcatatgctggggagcattaaggtcctacgggctgcgtcccatgggctggcgacctcccactggggccctcttcacattgctgtgggatcccagcattttccccaactttcctccttccagaccctgctccagtatcaccccaacttgaagccttcctggctgttagaatttcttacagcagattgcctctgtcactcattagttcatcccgtatctgctggcatcaacctatgttgtgcttagaaaagacttataga

SEQ ID NO: 18376 - DNA, 468 bp, Homo Sapiens
tgggccaccgtacccagcctcttgttcccttctttgtgtccatgtgtattcaatgtttagcttccgcttataagtgagaacatgtggtatttggttttgtgttcctatgttagttcacttaggataatggcctccagctccatccacgctgttgcaaaggcttttttatggctgtgtagtattccatggtgtatatgtaccaccttttctttattcattctactgttcatggacatttaggttgatcccatggctttgctgttgtgaataatgctgcagtgaacatacatgtgcatgtgtctctgtggtagaacaatttatattcctttgagcatctacctaatattcggattgttgggtcaaatggtacatctgttttaagctctttgagaaatttccacactgctttccacaatggctgagctaacgtacattgccacactgttattaaaacaggctttattgccc

SEQ ID NO: 18377 - DNA, 430 bp, Homo Sapiens
gcacgaggttcataatgtaatatcctaaaagtatttaatatataggttatgggatactctaagtacaaattccacttttttttcacacttagggaagctgtggcatagtgatgatgtgttactgaagcagcttctcaattgtatacagagtatacagggttaccagggaactagtattttgcagtgtgaaagaacagttaaattgcttaagaaagctactggtttgatgtagtataatgttttttactctagttttctttatacatttttctaagaacttccggaattgtgaccaaagtactacacagtacattgttttcacctaagtgagatttattgcttctactttgctagggtgaatttctatgataaagttcaaattgggttttctggtatttttattcactaaaataaaatacatttaaaatat

SEQ ID NO: 18378 - DNA, 288 bp, Homo Sapiens
  misc_feature (74)..(82): n is a, c, g, or t
  misc_feature (152)..(171): n is a, c, g, or t
gaaaaaagggggaattaaaaaagtggaatcaaaggcaaaaccccgctacttgtttttaaaaacaagggggaggnnnnnnnnnaaacaacatttttcccttccctaaaacctacaaaatgaaaccaaccccaacaccccccttgaaaggggtnnnnnnnnnnnnnnnnnnnnccaaaaccccccccacttatttttcctaatataaaaggcctttttggggcttgaaaaatcaagcattctgggaacttttctttccaaaaaaaattttctccaaatttgggtttaaaa

SEQ ID NO: 18379 - DNA, 765 bp, Homo Sapiens
gcacgaggcaataatttgtgagattaaaataatctacttgtcatagaggccctaagacagtaactggagctagctctctcagcccaagacaaggggaaacaatttttcaaatggcagttactgaggcggtaacaatcagatgaacagacgtgccttccctcctccctttcccatgtacatgacactcctatcactgtgcttacagtggacctttagaagtttagctcgaaaccttaaaaggccttcaaaggaccaaaaggtacatttgttggataaaattgggtagcagaaattagaacttttgttactttcatgattgacaccgaggtagcttcaggataccttgatgtatgcttgttaaggaatgatgattgggaaggaccaagaattcttgaactcagagacatttctctcttctcttctaggcactggcttactcgggtgctcttaccttctagtcacttgccccatgggaatggaatgagctgggagccccctccctgggtgactgctcactcagcctctgtgatggcagtgtgagctggactgtgtcagccacgactcgagcactcattctgctccctatgttatttcaagggcctccaagggcagcttttctcagaatccttgatcaaaaagagccagtgggcctgccttagggtaccatgcagacaattcaaggaccagcctttttaccactgcagaagaagacacatgtgagaatctagactgacatcccttactcagcaacagaagttccaaccc

SEQ ID NO: 18380 - DNA, 264 bp, Homo Sapiens
  misc_feature (52)..(77): n is a, c, g, or t
  misc_feature (117)..(126): n is a, c, g, or t
  misc_feature (159)..(185): n is a, c, g, or t
accttcccccggaattttcggttaaaatccccttcagaatttttcaacctgnnnnnnnnnnnnnnnnnnnnnnnnnnttttctatatttttggggaacaatttttgtttagggattnnnnnnnnnnaaaaaaattttttttcctattaggggggatttnnnnnnnnnnnnnnnnnnnnnnnnnnncaagggggttttcccccccttttccaaatttccctttttaaaaattttggtaaaaaaccggtctgaatcttttgaaccc

SEQ ID NO: 18381 - DNA, 398 bp, Homo Sapiens
ctggtgaggattatttaggaagcttattggtcacagggaaaaaaagccatgaaaagaaaaaccctgatccccccattctggcacccgatttaccacatcccttttaagctaataggcattaaagaatttccaaggggaaccttaactaagttcaaatcttgctgaccctatttggcacaatggtaaaaatgatccccatgctctccccatacggctgggctgggcagtggaaaagacctgctccccaagcttgccctatccccaaccaccgcgcaattcccgtccttctcttcatatccctcggacacatgtgcgtgacagacaactccaagctgggcaacttgacaataatgctgaacattgagaggggaaaggagcaaccaggaacaagtgtttta

SEQ ID NO: 18382 - DNA, 510 bp, Homo Sapiens
gcacgagggtcttccccgaatcatgggtctgactaaggagctcttacggatggacctttacacgctgctgagtgttgaagacaaggcagcgcacaaagaggtaaagatggcgtatatgcccaaggccctctctggccacccagacaaaaatccacataatccccgaccttctgaactcttccacctcctttctcgcgccttggaggtgctgaccgatgctgcatccagggctgcatatgacaaggtctggaaagccaagaagcaataaccaaagaggacccctaaacttggtgagataaggtttattgtgaaccttgacctggaggcccgggagctttcggcccaggcccaggagagtgaggaggaatatgagatccggattacctggatactagagcatcaaatctaacgcctgagataagagggttcgttgccgctggaggaacatcacaggcttatccgggagctcatcctctaagatcgtgacccgaggttgataggaaaggcaga

SEQ ID NO: 18383 - DNA, 349 bp, Homo Sapiens
gcacgaggtgaatctcacaataccatttcgtattacccctccttgaagggcctcatgttaaattttcacttatggtttaatttacacgacaataagatgaatcacatttgggaacaccccccgtttgaaaactttcgggatactgaaaaacagttcacagttagccctccccgttagttgcacccctggaatggacccggggcaggctggtgtagcgggtctgtggggcactcgggtggggcactcttggtggaaacgatgagccacgtgatggtcttcccaggagtgggcaatgggtgaggcctgattcctgacttggctggttcttgggctttcctcgaaaaggtgg

SEQ ID NO: 18384 - DNA, 870 bp, Homo Sapiens
ccacgcgtccgcggacgcgtggggagagagggagtctctttcccagcttgtgttggagaaatgccagtacagcccccaggcccctctggggtcagttgacggtggccaggaggtaggggatgtaggggagctctgaacaccagagccgggagctgcaggctgttctcagaggaccaggtgctcttgctagcctttcccctcaggggctcctgctggggacaggctcctctgtgtcacttctggcctttacctggctctgctccagagccacatggctaaaagtggccttgctgctcactgagcttgttgggattgggcctgggcctggcctggaggccacagagagggagccctctcagctggacacttgcctccatggcaagtgctgagaagtggggaagacccttgctggaggggcccttgctggagggtcttgctggaggggccctcaggcacccctggagaatacccaggttcctcagaccttaagccagtccgtgggcttgtgcatgcctcagtgagaggacccaggacagtgcatggcagactcttcctaagaaaggtgtaggagtgtgctgatacccatttccatggccgtaataatcccaaccacttgtgctgagttttctcagggccggggcctgcactgagtgagttccatgtatcatctgatttcatcctgacagccatcctgggagccaggcaccaatattatccccatcagacacatcaagaagctaactccaaggggtctgatgactgcccaagcaatggaggaggcagtggagctgggattcacagccagggctttctaagtccaccccacaccttaacaaacattcattacaggaggaaaataaaggacttttg

SEQ ID NO: 18385 - DNA, 418 bp, Homo Sapiens
ccacgcgtccgcttgtttttgtctctttttccgaatcatccctaaagaagttggaagcagcttagaaagtaggagaggaaggtgaggcataaatcatataaaagaagcaatcacccccacattttcccctgccaaccacttgcctgtaccaagtgtgagctctgaaaggggaagtctttaaggttaaacaagtgttgaagtcttaattttttttattacatggactttaccaaactgactttttgtttgtctctttttagtggctagaagtgaccccaggatttttttattatcaagagagactagaagaatcatgagacttttcctagttgcctttcaagaatatgaagaaaaaaatggttctcaaagtgggtttgaatgagtattgttccaataaatgaacttatattcatatttc

SEQ ID NO: 18386 - DNA, 652 bp, Homo Sapiens
ggcaggaaggcgggcgggcgctctttaaaaagggccccttaatttaatttgttgggcctctgttttcccttttaggactgggaaaacccttgggttaccccactttattgccttgggcgccgatcgccatatccgccggttggcgtattagcaaaaaggccaagaccgaatggaaaacgcctgttaccagggtatttaaccccgaaggtggggaggtttagccgctcctgaccggcctaactgggccggcggcttagggcggttccctccgcttttttccctttctttcttgccatgctcgcccggtttctgcgtttgctctaaatctggagctcgccttgagccttcgaattcatgatttagctgcacacgaacgctcaaccctagatacgagtataggttcatggttggctaacggccaaaaacctgtatgtcgcctgtcaccgttggatcgcgtttcttagtatggaactctgtaccaatgggaaaaagtacaacctaacgcgtatactctttagtttatgagtatatagcagttcgcgccttggtctattatgactaagtagccatatttacgcgactattagaatatattaagcctaacatctaaggtaacgtgcatgtattgatgtagtagccttattgtgatggt

SEQ ID NO: 18387 - DNA, 656 bp, Homo Sapiens
ccagccctggggcctgctgaccctcgacgccctggacaccgagcgcttcgaacgggtggaactggacgccctgcaagccttcgccagcctcgccgccgctacggtgaatgttgccgaacgcatcgaacgcctggccctgcgggccgaagacgaacaccagcgggccgaaatctaccgccaggccagcggccagcagcacaaggagatgatcggccagagcaagacccacaaacgcctggtggaagaaatcaacctggtgggcggcagcgatttgaccgtgctgatcaccggcgagaccggcgtcggcaaggagctggtggcccaggcgatccacgccgcctcatcccgcgccgagaaaccgctgatcagcctcaactgcgccgccctgccggaaaccctggtggaaagcgagctgttcggccatgtgcgcggggcgtttaccggtgcgctgaacgaacgccggggcaagttcgagctggcgaatggcggcacgctgttcctggatgaagtgggcgaattatccctcaccgtgcaggccaagctgctgcgggtgctgcaaagtggtcagttgcagcgcctggggtctgacaaggagcatcaggtggatgtgcgcctgatcgctgccactaaccgggatttggccgaagaagtacgca

SEQ ID NO: 18388 - DNA, 459 bp, Homo Sapiens
cccttaagcgtccgcgagtattttattcatgttctttaccattgttcttttctctgatgactgagtaccactgaatggattgagttcagtgagtatgtgagtgcgctcaagattagccacactcacaatgccaagtgctttttatctttgtgcctatttaaaagtatacgatactgtgccgcttatcactagtagcagcaaattcatttgtttcgtttttgcacagttctttataaaaataaaagcaaatgcaatacaataaaggcagtgtagctgccgtgtaatagctcaaaatgttcacttattaaaagcagcacattcagtgtatgaaagaagctgtaggagtatagaatgtgtgaaaattaggatctcttatacaactatgctcactgtataatagtaaaatatttgcaatgaactaatcagactgaataaattttggtacatttattaaaagtc

SEQ ID NO: 18389 - DNA, 367 bp, Homo Sapiens
caactcatccgccgggagccacactagaggaactgcctcctgtacacgtgcatgcgattggctcctcttctaaattgtctcctgcattcaattcggtggccgtcgttttatggcgcctcgagtggtaaaaccctgcgggggacactgataatacctttgcagcacatccgcctttggcgctgtggactgggcacaaaaagaccggcgcccattgcccatccgagcgcctgcgcaacctgaatggccaccgggaaactcactataacggggcattaaacgcgaaggttgtgggggtgaccttcagaaagaccttggcccttgaaactgcgctaacgcccgctcttttgtctttcgtcgcttactttca

SEQ ID NO: 18390 - DNA, 669 bp, Homo Sapiens
ccataatcgtccgccgggaaccacaagtcctgaactgcctcccgttcacgtgcatgcgattggctccgtgaccgaatctcttcctgcgtgcaatttggcgcacgccaatggttggggcctcgaggggtctcatcctgcgggggacactgataataccttcgtcgctgacctgcctgtggggctgtggactgggcacataaagactggtgcccattgcccatctgagcgcttggctaacctgaacgggctccgcaaaattgaataggacctgggcttcaaggctaagtttgcgggggtgaacttcagaaagaccttggccaatgaaactgtgggaaggccagctcttctggcttttgttggctactttcacccctcccctcgtgtcttcccccgcagctctaggccccggacgatcccttgcaggggtccatgttatgtttcgccccacctccgtggagttcataccgcttccttagaacttccacgtaagccaagctccccctgacctgttggcagctctagctttgcagtcgagtaattgttccaagtcattgattctctctcctcactgtacacccagtgtctacaatcatgtgagactcgtgtcatctccagggtagccagccgatatatcccccagtggttttgtgctcaacataataagcctca

SEQ ID NO: 18391 - DNA, 1047 bp, Homo Sapiens
  misc_feature (132)..(792): n is a, c, g, or t
ccacgcgtccgcaatagcttagatatgtgtagggagatttatgtaatacaaaatatctttgtgaattttttttataaatcctcttctaacactctttatgataataataataaaatactttcggaacaactnnnnnnnnnnnnnnnnnnnnnnnnnnnnnnnnnnnnnnnnnnnnnnnnnnnnnnnnnnnnnnnnnnnnnnnnnnnnnnnnnnnnnnnnnnnnnnnnnnnnnnnnnnnnnnnnnnnnnnnnnnnnnnnnnnnnnnnnnnnnnnnnnnnnnnnnnnnnnnnnnnnnnnnnnnnnnnnnnnnnnnnnnnnnnnnnnnnnnnnnnnnnnnnnnnnnnnnnnnnnnnnnnnnnnnnnnnnnnnnnnnnnnnnnnnnnnnnnnnnnnnnnnnnnnnnnnnnnnnnnnnnnnnnnnnnnnnnnnnnnnnnnnnnnnnnnnnnnnnnnnnnnnnnnnnnnnnnnnnnnnnnnnnnnnnnnnnnnnnnnnnnnnnnnnnnnnnnnnnnnnnnnnnnnnnnnnnnnnnnnnnnnnnnnnnnnnnnnnnnnnnnnnnnnnnnnnnnnnnnnnnnnnnnnnnnnnnnnnnnnnnnnnnnnnnnnnnnnnnnnnnnnnnnnnnnnnnnnnnnnnnnnnnnnnnnnnnnnnnnnnnnnnnnnnnnnnnnnnnnnnnnnnnnnnnnnnnnnnnnnnnnnnnnnnnnnnnnnnnnnnnnnnnnnnnnnnnnnnnnnnnnnnnnnnnnnnnnnnnnnnnnnnnnnnnnnnnnnnnnnnnnnnnnnnnnnnnnnnnnnntgatatataaagggatttttgcgcaattccgcctatttggtttataaagtgagcgtgattaaaaaagatttaacgccgaattttaacacaaatatttaacgcctacaattttggtgggcactttctgggaaaatgtgggcgagaccctctattggtttattttctaaagacattccaaaaaagttatcacttctgtagaacataaacctgataaatcgcttcaataatatataaaaagctctattcccccttttt

SEQ ID NO: 18392 - DNA, 433 bp, Homo Sapiens
ctgcgggacggcggttttctcgcctggcccggcgttatcgcgctgatcctcggcgccctgatctacggctggcgccgcccgctgctgcgcaagcccctgagcgcaggcgtgatcaccggcctcgcgttctgggccctgaccagcctgtccctgaccctctacgaaaaaggcacgcacctgccggacatcaccctgcgcaacgccaatggcgaaaccgtgcaactagccgactacaagggcggcccgctggtgatcaatctgtgggccacctggtgcccgccgtgccggcgcgaaatgccggtactggaaagtgcccagcgccaacgcccggacgtgaccttcctgttcgtcaaccaggccgaaagcatgcaaagcgtcgccacctacctggcgacccagggcctgaacctggacaacgtgctgttcgacgcca

SEQ ID NO: 18393 - DNA, 554 bp, Homo Sapiens
  misc_feature (488)..(496): n is a, c, g, or t
cctggcatgcatgcgtttcatatctcttctatcatgtttgatctttgttttcactggccgtcgttttacaacgctcatgactggaatcaccctggggttgaatttgatatgatgagggaatatgaccccctttcattgctggcgtatatggaaggaggcccgcaccgatcgcccttcttgattctgcgctgaatgaatggcgttgggacgatacctgggctctcgcaggatatattttgagagtggtgttttttcgtttcgagaaacctacaattgccatgacctaagcacccgctgctttatctttattcccttcctttctcaccacttgtacacgcttttattactctaaactaaagaattacgctcgctttatggttccgatttacatgctgcttattggaggcacccctacaatcttgatcagagcgatggttcaatggtctttaatgagccctgacctgagcttttcgaactttgggatgaannnnnnnnnctttgagtggactcctgatccacactgtaacttactcatactaatcactctcgatccc

SEQ ID NO: 18394 - DNA, 740 bp, Homo Sapiens
atcggcgggggtacgtctgacttctccctagtgcgcctgtcgcccgagcgccgccagatcgacaaccgccacgacgacatcctcgccaccggcggtgtgcatatcggcggtaccgacttcgacaagcaactctcgctggccggcatgatgccgctgttcggctacggcagccgcatgaaaagcggcgcctacatgcccaccagccaccacatgaacctggcgacctggcacaccatcaactcggtgtactcgcaaaaatccaagctggcgctgggcagcatgcgctacgacatcgaggacacgggcggcatcgaccggctgttcaacctgatcgaacagcgcgccgggcactggctggcgatggaagtggaagaaaccaagatccagctgacccaacaggacagccgccatgtgctgctggaccgggtcgaaccagggttgagcgtggaattgagtcgggcattgttcgagtcggccattgatggcttgctggagcgggtgcgcaacagcgtgacccagttgctcaacgatgcctcggtggacgtggcccaggtggacacagtgttctttaccgggggttccagcgggattccggcgctgcgccacagcatctcggcgatgctgccgaatgcgcagcatgtggaagggaatatctttggcagtatcggcagtggtctggcgattgaggccagcaagcgctacggctactgagttttagctgaaaccgtggcgcgcccttc

SEQ ID NO: 18395 - DNA, 909 bp, Homo Sapiens
ccacgcgtccgagcaaatttagccaccgatgtttccagtttacagtacttggagattgcattcagtttgagtagagcacatcctttgtcctgtcattgcttatattgatccccaattcatctgcatgacttgcacgctttctcagcatggtctctagttcttttccacaaggtgatttaggtgacatcataaaatgagagggcttcagacagacctgtgttcctcacatttacatacctgcattgtctgctcctctcctctcttcagacatattgatacataggcttttggctattttcattttcttcaaaacagtaaagaactaaaggcaactttggcgattaaagccttgatttggttgaatgagaatttttactttgatgttcctgtatttgcatatatttattatttatcttcattaatgtgtttctattagtttgattacttaaagatttaatggacatgtgtgtaatggatcccaaagaatcaaatagtattttaaactactactatttaagtagaaactagtataaaactgtaaatactactataagacattggctttttccagacatggatccaaaaaatttctgcatctactttgaaagtttgttatgtatggttgtatttacttttgttttatcttcttttgggggttgggtgatttgttctagatgtctcctggagtatgaagtcatctgaaggtataagtatttaactgtggttctctgaagtttccctggcatgctgtgaagcactgctgacagcttgggtttcttatcttttcacgagggaggttctttgtttctgttaacttagctgacctttaaagtgtagactttaggtccgtgttgcagttggtattaggaattttgacttccagaacctgctttttaagagacagaaaac

SEQ ID NO: 18396 - DNA, 902 bp, Homo Sapiens
atcgttgtaagcggcaacgatcgcatggacaagtggattgcggatcgggccagcacctttggactcaaggactatgacgtcaatcgccatttcctcacccatgaaagcgccctggggaaacttcgcgggtacgcaccagtggagttgacatccggttcttacggcgactggtgcccgggggaatatcgcaatatcgactatctgatcggtagcgactatgacgacatcctcgtcggcgacgtgctcggaggaatgacgttcactggccgcggtggcaacgataccttcgttgtgcacggaggcggtaatcgcatcgtcttcaacgacggggacttcgtcgatccggactctggggaaatcacgacgaaatacattcatgggctgaccacggctcgcgaggcccgcgatttcaatctcaagaactaccagccggcttatctgggaggctatggagggctgcgtatcgagcccgatgtactggacttttcaaacctggatggcgacctgaatactgaggggcaccaagccatgcggtttatcggaacagggcagttcaccgggcatgctggagaactcagatatgtgaccgaggaccattacggactggatttgcccgccactcatgatgaggacggcgttgggtggcgagccaccaccgtatgtttggagggagatagaaccggcggtgggattgcggacttcttcatcgaatatacaaactacgccgatccatctattccatatggatcaatgttttctgtgttggtgggcgttatttacccctatctcgatagtgacaatttcttcttcggctaagcgagggagcctcggaatcacggcttttcggagatagtgatgcggtcgggttttacatacaccggcttgttccagaccaaggaaga

SEQ ID NO: 18397 - DNA, 204 bp, Homo Sapiens
cccacgccccccaggacagtgtccccccgagtgactccgcagcttctgacacaactcccctgggggctgcggtaggcgggcctagcccggcctccatggccccaacggaggcgccctcggaggtggggtcctgagccgcacagctgagccgcctctgacccctgctggctgggcctgaccttcccgagcccgtgggggtggggg

SEQ ID NO: 18398 - DNA, 317 bp, Homo Sapiens
atcttgaaaatttcagacgatgaatgcatggagctcagtaagagctttcgagtatactgtattatccttgtaaaacccaaagatgtgagtctttgggctgtaatataggatacttggaccaaacactgtgacaaagcatagttcttcagttctgaaaatgttaaagtgtttgagtcaattaatatggacacaaatgacatgtgtttaatgatgacaatatcttacaaatacgcctttgataagtatagagaccaatacatctggtttcttccttgcacgccccactacggattgcaatcattgaaaacctaaagtat

SEQ ID NO: 18399 - DNA, 342 bp, Homo Sapiens
ccgctggcccggcacctcgaattcaccctcctcgcccacgtacaacgcaccgtgttcgccgagggtgacgatcacgtggcgaatgccgctggccaccagggttcgtgcggcagcgcgggccgagtccggcgagtccacggttttgccggtaatcaacgccagttcggattcgttggggaccaggaaatccagctgcgccaagtgctcagcgctcaacccggccaacgccggcgccgggttgagcagcacggcgatgccgtggcggtgagcgaattcgatggcgtagtagaccgtcggcaggttgatctccagttgcagcacgatcagcgtgcactcgcgcag

SEQ ID NO: 18400 - DNA, 827 bp, Homo Sapiens
caccacttcccggtaggtcagcaggtgcatgcggtggccggcatcggaaacccgcaacgtttcttcaataccctcgagacgctacactggcgcccaatacctcatgcttttgccgaccacgcgccctacagcgccgaggtcttgaatttcacaccggcgctgccgttggtcatgactgaaaaggacgcggtgaagtgccgcgcctttgccaggcccgactggtggtaccttgcggtggacgcggcaccgtcaccggcgtttatcgcctggttcgacacgcagttgatgcgtttgctgcccgctcgccttttgccttaaaacgctgctctccaggacatactcatggacaccaaactgctcgatatcctcgcttgcccgatctgcaaaggtccgctcaagctcagcgccgacaaaaccgagctgatcagcaagggcgccggcctggcgtacccgatccgtgacggcattccggtaatgctcgaaagcgaagcccgtaccctgaccaccgacgagcgcctggataaatgaccactgccttcaccgtcgtcatcccgtcccgctacgcctccacccgcctgcccggcaaaccgctgcagctgatcggcaacaagccgatgatccagctggtgtgggaacaggcctgcaaaagcagcgccgaacgggtggtggtggccaccgatgatccgcgcattatcgaggcctgcaaaggctttggcgccgaagcggtgctgacccgtgaagaccacaattccggcaccgaccgcctggccgaagtggccacctagctgggggctggcggcggacgccatcgtggtcaacgtgcaagg

SEQ ID NO: 18401 - DNA, 505 bp, Homo Sapiens
  misc_feature (162)..(171): n is a, c, g, or t
ccacgcgtccggagagggggagcatactatttgtataaagaactgtcaccccagagtgacatttattttccaagatgaccctgaactcatgctgttggtttcatatggtgtttgtgtgctttgcctagattcaaggcctgaggatttgaggaaaatcgggannnnnnnnnncctatttggttttcatgtaaaagttctaaatgtcacttattttgctaaataagaccctttcacaggatagggtgcgcaatacctgtccgtgtttccaagcaaagttcaagttcatgtcttcacaagtagatgagagtcacttccagtcgggggaagcccgcctgagcagtgttttgaaagtgcgtacattggaggactgccccacgtccgtttgcactctgccttgcaaaacttactgtggagacgtgccccttactggtctcagagcagagtttgtggcacaggaaaacctggccccctaaaaagaagttttggaattggaagcctgataatt

SEQ ID NO: 18402 - DNA, 698 bp, Homo Sapiens
ccccaagcgtccgctcttctccatttttccagaaaagggattacataggaaagtcacatacccaggggcctgcagcctgtgacttcagaactggaagtctaaaccctacagccccttcttcttctgagccacctactattgttgcagaattgtgtgactgagtcttgtctccttaaaacgaccgtaaactcttgagtgcaaggattgtattagtcagagtaaagctatgctgctataaaaaatagtccctacatgcaaaggttcaatacagtagatgtttatttcctgcttacaaggcagtcttcagcatgtgtatgtccatgtggtcattcagggatccaggctccttgtgttttctggctccacctcaccctagttcctaatcatcatccatatccacctgatggaatagaaaatagcgtgaggtgtgttcccaggaggctttgcatgggttagacctggaaggcaaacacatcacgtctgcttatgttccatctggaaaaacatttgagttgccacagcaaattgctagtgagaatgagagatggagttccctgtgtctccaagaagggtatgactttggcagagcagctcttctgttccctgacttctctttctcctgccagaacccagcaccgagagggaccatcagaggatgttccatgagacttggtgagggttgtggagaggttggctgg

SEQ ID NO: 18403 - DNA, 371 bp, Homo Sapiens
cacccacgcgtccgcctcccttgctattattacctgaagtctgtagaactgtttacagatatctccttgacaggtgtcctttatcttactttatctgtacagtaatcctgtgagaaagacaggacagaaaccactgtgcctattttacagatacgaaaactgagacacaggtaaaggggcttgtctgtagtcccatagctagcagatggctggagccaagactgaggctcgttcttcaatgctgagccagggctccttccgctgcaccacaagaacgctagaccactcgccaccagccttctcattccctcttcctccattctaatcatttctagctggctggcctccacagagcataggaaaacagccag

SEQ ID NO: 18404 - DNA, 808 bp, Homo Sapiens
ccttctccatgcccgtgcgcctgggcgccgagtacgtggaccacaacgaccagcgccgtccgcccgtgatgctgcaccgcgccatcctgggttcgctcgagcgtttcatcggcatgttgatcgaaaaccacgccggcgcgatgccgccctggctggctccggtgcaggccgtggtgtgctgcatttccgaaccttcggccgattatgcggctgaaatcacgcaaagcctgaaaaaacaaggctttagagtagagtccgatttgcgcggtgaaaaaatcactcgtaaaattcgggagcacagcctgcagaaggtgccgtacatcctcgtcgtcggcgacaaggagaagcaaaacggtaccgtcgccgtacgcggtctgggtggtctggacctcggcgccatcgcgttcgacgacttcgtcgcccgcctgtccgaagacgtatccacccgccgcgacgtcaatcaacccgatggcagcgctgcttaacatttgtaggagctttcaacatcgccactgaaaaagccaatcgcatcaacggtgaaatccgcgtccccgaggtgcgcctgataggtctggacggagaacagctgggcatcgtcaagattgccgacgcgttccgtctttccgagcaaaacgacgtggatctggtggaaatcgcgccgaacgccgaaccgccggtctgccgttttgatggactacggtaagttcaagtaccaagagcagaagcgccaagccgaagctcgttcgaagcagaaggtcatccaggtcaaggaagtcaaattccgtcccggccaccgacgagggcgact

SEQ ID NO: 18405 - DNA, 216 bp, Homo Sapiens
gggggggcccctttaaaggatccaagtttacgtaccggggctggcaaggtcaaagctcttctatagggcccccaaaattcaattccggggccgcctttttacaaccccgggactggaaaaaccgtgggtttaccgaatttaatcgccttggagcccttccctcttcgcccagctggggtaatagcaaaaaggcccgcacggatcgcccttccacac

SEQ ID NO: 18406 - DNA, 563 bp, Homo Sapiens
cgggaaggggcggcctaaatctttctaaggggtcccctaatttaatttcctggggggcggttttaaaaggccgggattggaaaacccttggggtaccccactttattcgctttgcgcgaattcgccttttcgccggtggcggaataaccgaaaaggccggaccgaatcgcctttcccaacggtgggccagctgaaaggccgatgggaaggcgcccggtacggggcatttacgcggcgggtggtgggggttaccgcaggggggacggttaattttgcaggggcctaacccccgtcctttcggttttctccctttcttttctcgcacggttggcgggttttccccggcaggctctaatcgggggctcctctttagggtccgaatttaggcttttccggacctcgagctctaaaaactgaataagggtatggtttcactgaggggacatccgcctggataaccggttttcggcctttggagttgaagacaaggttcttaaaagggaagtctggttccaaatggagagacctctaaaccctatctgggtttattgtttattttataa

SEQ ID NO: 18407 - DNA, 230 bp, Homo Sapiens
ccacgcgtccggaccatctctagaaaagaattgctacctcttgtatggaggtacaaaagactgacctcttacatcaaggaacttcctttcccagagctcctcatggaatcaagctgaagtcagtcttcttctgagagcacattcttactcagtttttttcctctgtcctacgctgcttccctcactccccttctcctaagagcactccatcaataaaccacttgcacgag

SEQ ID NO: 18408 - DNA, 530 bp, Homo Sapiens
ccctcttagctcaggttcagcaagcccagcagcgtcggggccaggtcgatctggctggccagcttcgcgttctcgccggcgtccaccagcttgggggcgtagatgaacagtgggatctggtagttcaccatcggcaggtcttccttgcccgcgctgccggctgtgtggtcggcgacgaagataaagattgtgttgtcgaaccatggcttctggcgggccgcctccaggaactggccgatggcatggtcggtgtacttcaccgcaccgtcgcgaccgtcgccggatttgatatcaatgcggcctgccgggtaggtatacgggcggtggttggaggtggtcatcagttgcagcaggaacggttgctgcttggcgtagtcggcatctgccagtttcagcgtctgtttatagaggtcttcgtcggccatgccccaggcgtttttgaagctgatttccgcttcaggcacgctgctctggtccactacgcggtagccgttgccactgaagaacgcgttcatgttgtcaaagtagcc

SEQ ID NO: 18409 - DNA, 674 bp, Homo Sapiens
ccctttaaatgtccaacgcgtcctcgcgcatgtcggcgatgggcgccacgtcgccgtgcccggcgttattgaccaggtggtcgaactgctcgcgctgccaggtctgctgcagcgccgcacgcaggcgcgccgcgaagtccacgaaggtggccgtcgcgcccgcatccagctgcaaggccaccgctcggcggcccagcgccacaatctcggcgaccaccgcgcgcgcctcggcctcgcgctgctggtaggtgatgatgacgtcgccgcctttgcgggcgatgttcaaggccgtgttgcggcccaggccgcggctggcgccggtaacgagggaaatcgtggtcatgcggggctccttggaagcgaatgacagggtgagggcattctgccgccggggccgttgcaagcctttgcccgaatcgcggcgttgtttgcctatttccccaatgccgctgccactgcgccgacggcgcacccgattgccgctactatggccgggtgccacggatttccgcccgaatcgcatgaacgactccttgctcgatagcgtgcgccgctacgtccacgcccatgccggccccttgggcgtggcgctgacgcccgtgcccggcctgaccaccatccgggccacatcccccagcggcctggactacgccatgtcccgccctattggcgtg

SEQ ID NO: 18410 - DNA, 648 bp, Homo Sapiens
cagcaataaggtttttttcatggttacaaaggcagatatggcaacaactgcggcaacaattgcggcgacgcccgccgaaaaacaaattccgctgattatgtcagagatacggacggcggccgaaaagctggcgaacatcgggccggcagtcagtgtctttggcagtgcgcgcgtcagccgcaactccccccactacaaaaccaccgtggcaatctcggccgccctggccgaggcgggttttgcggtcatcgcgggcggcggcccgggcatcatggaagccgccaacaagggcgcgttcgaaaccggcggcaccagcatcgggctgaacatcagcctgccgcacgaagcgcacaacaacgagtatcaaaccatcagtctatcgtttgagtactttttttcacgcaaagccacgtttttcatgcacagcttcgcctacgtggcgatgccgggcggcttcggcaccctggacgagctcttcgaagcgttgacgctgatccagaccggcaaggtcccgcccgcgcccatcgtgctggtgggcagcgagttactggtcgggcctggtcgaatggctgggcggccaggtgctgggcaacggcatgatcggcgcgcatgacctggatcttttcatcatcaaggacgatccgcgca

SEQ ID NO: 18411 - DNA, 563 bp, Homo Sapiens
caacaggccgggcgcctgaccctcgcagccaacgtcgcccaggcctacagcgacctgggtcaggcccatatcgtgcgcgacctggccaatgatgacctcaagcgcacccggcaaatgctcgacctgggcaagcgtcgcctgaactccgggatcgacagccagtaccagtaccagcaaaccgagagcctggaagccagctcccagtcgcaactgatcgatgcggaaaaacaactgcagagcgccaagatcgccctcgccgtgttgctcggcaaaggtccggatcgcggcagcgaactggtacgccccaacgtgctcaagcccagcgcggttgccgtgccttccgtattgcctgccgagctggtgggccgtcgtccggacctgatcgccgcacgctggcgtgtcgaggctgcaagcaagaacatcgatgccagcaagacccgtttctaccccaacctcaacctgagcgcgagcgccggggccgagtcgttgctgggggatgcgatgtttggttcggccagccgcttcttcagcatagcgccgaccatctcgctgccgatcttcga

SEQ ID NO: 18412 - DNA, 404 bp, Homo Sapiens
ccacgcgtccgcgcacctccccaaagttacctgctggctttgcagcgcggtagagacgttcccctcgactccttgggagcgaggagccaggggggtcccggcaggcactcgtccttgctccccccaccctccccagatctctatggacccgggagtccctcgctgagccccgcacccgtccactgcgtcgcgcacagccccgtgcccaagcggggagacggggacggcggggcggtggcagggagcgcagcgcgcaggcgcggctggtgctccccggagtgcccggcgctggacaaagggaggaggcggcggcaggagagggctggggaggccccctctgacatgcctccctgccaactgtaaccaatcttccagcccccctggcgagcccccgcagcctgtag

SEQ ID NO: 18413 - DNA, 781 bp, Homo Sapiens
atatcatattttttttaagaggccccaaaatttaaatgctggggcggtctttttacaacgcgtggagtggagaacacctggggttacacaatttatcccctttgggggacttccccttttccccaggtgaggaaaaagaaaaacccctgagtggcaaatggtaccccctctgtagcggccatttacgcgcggggtgtgtggtgtatacccgcaggggacacgctattctggccgggcgcttagcgccggctcttttcgttttcttcctttctttctccccacgttccgcggattcgccaaagagtactaaatggaggtccctataagtgtgcgattagtgtattcagcccctcagcgcagaaaatctgattaggacgtagttcagctagtgtccctacccctggtaaacggtttctcgccctggagtgtgagctacagtctttataatgatcgtcttgtacaatcggaaaaacatcacctgattctgactatctttagtatattaaggtattcgcctgattcggcatatgttcaatgatgacgtgataaacatattaacgcggactatcctaaataatgcctacgatttagttggccctccggaagtgggcgcaccctatattgtttattctaaatactcaaaatgatcgcttagggagaaagctgtatagcgcttcttttttggtagggggtggattcccattgcggccccctatcatactttggattagcatgctgatttgtcgctacaaagccgggaaaaaaatacagaaaattgggg

SEQ ID NO: 18414 - DNA, 323 bp, Homo Sapiens
ccacgcgtccgcagatcgaaaaatctccacaaattatgagaagaatgctgagggaagaaagaacataggtggaccgctgctgagtccaggcttacttgcagagatctatgctggccaggccctgtgctaggcagcagaggacatggaataaaatcaaataaggtcactgtgtgcaggcacctcacggtgtggtaaaggagcagccccatccacaggttctattaattccagcctgtgagaattggaaccacagggtgaattttggaggacaggcacttacactaatctggaagcatatatataaagagtacctacaaatcaat

SEQ ID NO: 18415 - DNA, 846 bp, Homo Sapiens
catgacgccttcgttctaaatagtttttcgaagtatttcggaatgaccggctggcgcctgggttggctggtggcaccaccggcggccgtgggtgaattggagaagttggcgcaaaatctctacatcagcgcaccgagcatggcacagcatgcggccctggcctgctttaccccggaaacattgaatattcttgaggatcgccgggccgagtttggccgtcgtcgcgacttcctgctgccagccctgcgggagctcggcttcggcatcgctgtcgagccggaaggtgcgttctacttgtacgccgatatcagcaaattcggcggcgatgccttcgccttctgccgacacttcctcgaaacagagcatgttgcgttcactccaggcctggatttcggtcgctatcaagccggtcaccatgtgcgttttgcctacacgcaaaaccttgatcgcctacaggaagccgtcgagcggattgcccgtggcttgcggagttggcaaggctgatgcgctttaatcctcccctcgaagaaggccggctgatccgccgctacaagcgttttctcgccgatatcgaaaccgttaccggcgagttcctgaccattcactgcccgaacaccggctcgatgttcaactgcatgctggaaggtggtcaagtctggttcagccgctccatgacccccaagcgcaagctgcccggtacttgggaaatcagcgaaaccccgcaagggcgcctggcgtgtgtgaataccgcgcgggcccatcagttggtggaagaggcgctgcggacggggttatcacgtaactcaatggttttaccgcgttgaaacgtgaagtggcctacggtca

SEQ ID NO: 18416 - DNA, 322 bp, Homo Sapiens
ccacgcgtccggtaattttaatttggcttctcatcaatataattactcttatgtctacaacagattgaggtgtgattatattgatgagaagccaaattaaaattaaaaatgtggcaaagacttccaattctagtcagttcttaatgtaattcctactgaagaaaacacctggaaatacaaaaaatgtggcaaaacttgtaaccaatgcttagcatttttgcacatgatagtatttatatgtgagactacttgtacaaacataaaaatatacaaaagctattgtctacttgaaatttatagttaataaaagcattataaatgt

SEQ ID NO: 18417 - DNA, 542 bp, Homo Sapiens
  misc_feature (93)..(101): n is a, c, g, or t
gggcacaaaaattaaaagggcgggccgttgttttagcgggggggtgactgggaaaaccctggggttaccccttttaattggcttgtggggggnnnnnnnnnggggtgccggtgtggaacgcacagggcgacaccacattttccttcccttgagagcggcgcattaaccgcctcgggagtggtggtctctctcgaagtgaccactaaaattgcccgcggctaggccctctgccagcgcgttgtgcccgtttcttttcgcctagttcccccgcctgtgcgtccatttctgactctcgcgctccgtttggttctgagtttgtgctttactgtacggttaaccgcttaggtgacttaggtgatggtccatggggtgcgcatcgagctagtagacgagtttacgcctgagacagtgaattcgcgctcgtatctatgtagtgcttctcccgaagagaagctttctccctagtggtgactgcgtctctatttgaaagaagatctgttcgattacaggcattatgtctgaattgactggtgtttttacat

SEQ ID NO: 18418 - DNA, 957 bp, Homo Sapiens
tgcgacgcttcgtaaagtctcatacggcctgcgggtcggggacccggtggctgtctggtgttctctcaccgaccctgagctgtgttgcatcggcgaaaaaccagccgagaaacccgcgatcctacggtggatagagtctctcggatcgttagggccgttatgaaattgatacccaccgttcgtctatcccccggcactcgcgaccacgcaccgtttctcatgttcaagcacggacatcccgcgcgccagaacggagagccagcatggaaattgacgagaaggcccctggaaacgtatcccaacagggcgtaacccgtggtacagacaatgaaaccgggcatgaccctcggcgcgatcaacctgaagtgcctctaccaccggacgatgacgcccctctggaggaggatatgtcggacgtagacgccgctgattctgtcgcgagtgaacaccccgacaactgacgcatccgaacaagcccgacgcgcaatgcgccgggcttttcggtgtcgagcggcgattacggcatcagcaccgaatcaaccacatgaatcacgccgttggactgcatcacatccgcaatgctgatgctggccttgccacccttggcatccaccacccacagcttgccgtcgtgcagcttgatcgtcagcgactcaccctgcacggttttcaacatcaccatgccgccgttcttcttggcgtcggccatcagttgcgcagaggtatgggtgccagggcaccacgtgataggtcaggattttcgtcaggtcagctttgtgctcaggcttaaccaagcgtatccacggtacctgcggggagcttggcaaaggctttcgttgggtcggtgcgaatacggtgaaacgggcctttgctgttaagggtatcaaccagtccggctgctcttgaccgccgctaccagagtggtgtgatcctttgagttgacggcattttcgacga

SEQ ID NO: 18419 - DNA, 948 bp, Homo Sapiens
  misc_feature (569)..(608): n is a, c, g, or t
  misc_feature (610)..(870): n is a, c, g, or t
ccacgcgtccggccttatcttgtacagttgacgtgggaatacaatgtgacccataaccagaaggaagccaatccgtagaaacagaaccagaaatgatggttatagaattagcagacaaggactttaaaacagctattaaaatgtgttgaaggattgaaaggaaaacatgaatatagtgagtaaagaagtgaaagacatataaagaaccaaatggaacttctggagctgaaaagtatactataaaaaatgaaaaattcattgaagaaataaatagcaaattagatgctgcagaggaaaatatcaatgaatttgtatccataacaatagaaattatccaatctgaaacagaatagaaaaaatggaaggaaaaaagcctcagtgaactgtgagacaatatcaagcagattaacctacttgcaactggagtcccataaggaaaggagagagagaaataggcagaaaaaaaattgaagaaataatggctagaaattttccaaatatgatgaaaatgtaaatccataaatctaagaagctcaatgtatccaaaacagaaaaaccacactaaagcnnnnnnnnnnnnnnnnnnnnnnnnnnnnnnnnnnnnnnnngnnnnnnnnnnnnnnnnnnnnnnnnnnnnnnnnnnnnnnnnnnnnnnnnnnnnnnnnnnnnnnnnnnnnnnnnnnnnnnnnnnnnnnnnnnnnnnnnnnnnnnnnnnnnnnnnnnnnnnnnnnnnnnnnnnnnnnnnnnnnnnnnnnnnnnnnnnnnnnnnnnnnnnnnnnnnnnnnnnnnnnnnnnnnnnnnnnnnnnnnnnnnnnnnnnnnnnnnnnnnnnnnnnnnnnnnnnnnnnnnnnnnnnnnnnnnnnnnnnnnntgagccaccatgcctgggcctaaagcaattataattaaattgttgaaaactagtggtaaagcattttgaaagccacta

SEQ ID NO: 18420 - DNA, 367 bp, Homo Sapiens
cgtctgttggggccgcagctgcccggtacgcgcgttaccgaaagtattcacaaagtggctgaacgcgtggtaacgctggtgtcgatggaactgccggacaacgtgcggttgattcgtgattacgatcccagcctaccggaactggcgcacgacccggatcaaattgaacaggtcttgctgaatattgtgcgcaatgcgctacaggcgctggggccggaaggcggtgaaatcattctgcgtacccgcaccgcgtttcaactgaccttacacggcgagcgctaccggctggcggcgcggattgatgtggaagataacgggccgggcattccgcctcatttgcaggatacgctgttttacccgatggtca

SEQ ID NO: 18421 - DNA, 916 bp, Homo Sapiens
cctgattctgttcacctcggcgggcgtgtccttgctgctggcgtgggcctcacgcggcttgttgcgccgctcccaggcctggcgccaaaccgcgcccggtcaataaatcatccataaaggaactgcaccatgttcaagcccctggcgttagccgctgctgtgctcactgcgttcagcctgaatgcctttgccgccaagaccgagttgaccgtgtacacggccctcgaagccgagcaattgaagacttacaaacaggccttcgaaaaggctaacccggacatcaatatcaaatgggtgcgcgactccaccggcatcatcaccgccaagctgctggccgaaaaagcccgcccgcaggctgacgtggtctggggcctggccgcttccagcctggcgatcctcgatcagcagggcatgctgcaaaaccacgcacccaaggacctgggcaagatcggcgcgaactaccgcgacgccgccaatccaccggcctgggtcggcatggacgtctgggctgcgaccatctgcttcaacaccgtcgaagccgaaaagcagggcctgagcaagccggtgagctggcaagacctgaccaagcctgagtacaaaggcaagatcgtgatgcccaacccggcctcgtccggcaccggtttcctggatgtgagcgcctggctgcagaccttcggcgagaaacagggctggcagtacatggacgacctgcaccagaacatcggccagtacgttcactccggttccaaaccgtgcaagctggcggcctcgggtgagtttccgatcggcatttcgtttgaatacccggccgttcaactgaagcgccagggtgcaccgctggacatcatcctgccgaaagaagcctgggctgggacatcgaagcgactgccgtgatcaaagcactgcccacgccgga

SEQ ID NO: 18422 - DNA, 787 bp, Homo Sapiens
cacccacgcgtccgggccaatgtataaaagttaaaaatataggtcttgtcagctttttaagcgtctgtcccactgactaccatatctctacaagagaatagatgaggaattgaggttatgtgggaagtacgtgtaagtttacagtattaagaaatgtacaataaaatttgtttctatgtcagcgaatattcttgactcaaggagtttgaaagtgtaaactcaaaggtctttcacatgtaaagaggaacctctccattctgtacttgtatagtcattacctcatatagatttaattttattaaattaaattttacttattttgggtttaaaaaaacttgggctgtgaatctcagttttaagtcatgggcaaatttgataaaaattcctttctgtctacatgtaatactgaaaaaaatgttgataaggtaaagctatctccatttagattgatacccattaaatagcatagtgctcccattaaactagcgacaaattcatttaattgtgagatatctagtacttatgctccatcctgtttatagggattattgatgtgagatttggtcagatgctttgatgtgatcttcattcctctgtatagtgggaaaccatgagacgtgcttagtcttcataaatcgatgctgcctccctagtggccattgctttcttttctacctgtccacaaacttcaaaaaaatagattttgggaattttgtcagggacacttatcaagccattaatacatgccagcagtatgctcaaagctgtgataggccagggaacagta

SEQ ID NO: 18423 - DNA, 739 bp, Homo Sapiens
  misc_feature (503)..(567): n is a, c, g, or t
ccccacgcgtccgcagagaagcatgagaccctggtggagcagaatgagatctaggactcagggttcatttccccatcccctttggagattttagaaccagagggccacccctcctctgtgaagcagttcaaactaacctcatgtatttctcttgcttatctatagttggccatcactgagacctgtgttcggtgggctctggctttggaagtccctgccatgccctgccctgcccttgggtttccttatctgtgcactgagggacttgaaccaggagactggcaagggtacattgggctttcctctgtcttgtccagttaggtctgtgagttagatcttgggtaatttttaggttaatattaggagtgtgtaaatgccgttgttgatatttaattcttaatatgtttagcctattagatttcctttgttatgaaagagtctcccagccagctgtgggcagcagtcataagaagtgagtggagggataaacctagtggtttatnnnnnnnnnnnnnnnnnnnnnnnnnnnnnnnnnnnnnnnnnnnnnnnnnnnnnnnnnnnnnnnnncacagtgaattattgagcacctgttgggtaccagccactgggcaggctgcctgtgcggcagtggtgagattttaaagactcagacccagcctttttgtgtagggatgttagctctgccagaagatcgtgctggtgaaggactccactcagcaagaccagagcagctaacaca

SEQ ID NO: 18424 - DNA, 490 bp, Homo Sapiens
  misc_feature (144)..(262): n is a, c, g, or t
  misc_feature (264)..(286): n is a, c, g, or t
cacccacgcgtccgggctcccaactgtctttccaggactagtagtgagcgggcaagccactctctgtatcatgcatggcagagggcagaggctcagggaaggggagaaagctagaacacaaagacacatttaaaacttctgcannnnnnnnnnnnnnnnnnnnnnnnnnnnnnnnnnnnnnnnnnnnnnnnnnnnnnnnnnnnnnnnnnnnnnnnnnnnnnnnnnnnnnnnnnnnnnnnnnnnnnnnnnnnnnnnnnnnnnntnnnnnnnnnnnnnnnnnnnnnnntttctgtatgatggtggtatacttgatgtctactcacatttcattgaccaaagaaagtagcatgaccaagcccaaagtcactggggtagcatttaacagacatttgcaaaaagtttctaatgaaagatagggcaaaaagcaaaattataagtataatagaaataaaggaagttggaaaaagcaaagacaaatctaaagaaagtt

SEQ ID NO: 18425 - DNA, 766 bp, Homo Sapiens
  misc_feature (352)..(374): n is a, c, g, or t
  misc_feature (383)..(544): n is a, c, g, or t
gtatgagccactgcgcccagtctgctgcctcttttcaatggtctggcctaaggaaattattggaaacatgtgcggttgagtgatatttactgggcacttccacatggtccatgtaaagggagatggttggggtgacaggcagttgagtctaggggaggcatgtacagatgtgctgtgcctctgggatatcagggtggcaggcagcagtctctacgtctggtcccaggctgcctgagaaagagcatgtgggaggcaaaccttgcgccctggcatggttgttaatgtttatatttaccctagcttgtgtggggtaggaggtttagggatcaaattccactctgtgtttagacannnnnnnnnnnnnnnnnnnnnnngagacagannnnnnnnnnnnnnnnnnnnnnnnnnnnnnnnnnnnnnnnnnnnnnnnnnnnnnnnnnnnnnnnnnnnnnnnnnnnnnnnnnnnnnnnnnnnnnnnnnnnnnnnnnnnnnnnnnnnnnnnnnnnnnnnnnnnnnnnnnnnnnnnnnnnnnnnnnnnnnnnnnctcaaatgatctgcccgcctcgcctcccaaagtgttgggattacaggtgtgagtcactgtgcccagccatgtgtttagacttttaactaatctcttttttagtttcaagccttatcgtccgcctctatagaccactcctgtgcctgtttcctgatccttcccaagggccattgtattccctgtctgctgcccctcttttggattctcctgcacatttttttg

SEQ ID NO: 18426 - DNA, 251 bp, Homo Sapiens
  misc_feature (158)..(166): n is a, c, g, or t
ccccacaacgtccggaaaaaaggtagttggacagaaaagggaataaaaacatgaagaagagtgaatagaaacagagaaagcaacggactataaagggaaggcaaaaaaagtgcacggggaagaagagcaggccgggcgaaaggaataattatgacagnnnnnnnnngtaaagaaagagaggggaaaaggagaaggaaggtggaaatgaataatagataaacgaccggatagaaatatagagcaagtggagg

SEQ ID NO: 18427 - DNA, 864 bp, Homo Sapiens
ttccagcccttcactcaccagcagcgcctgatgcaatgcaccggataccagccggcaaatttccggcaaggtttcccactcggcgtgccacaggcccaggctgcgttcgtgctcctggggcatggcgctgaacattgtcgctaccaggccgggcacgcgggtcgcggcgctgatcagcacggcagcgcccaccgggttgcgcttgtgaggcatggtcgaagagccgcccttgccgggagctgagggttcgaatacttccgccgcttcggtctgcatcagcaggctgatgtcgcggcccagtttgccgagactaccggcgatcaggccaagcaccgaggcaaactccaccagacgatcgcgctgggtgtgccaaggttgctccggcacgccaagctgcaactcggccgccaaggcttgcgccaccggcatcgcctgttcgccaagggctgccagggttccggaagcaccgccaaattgcagcaccagcaaacgcggcttgagttcactcaggcgctgccgacttcgggtgactgcgccgagccagccggcgattttcatgcccagggtgaccggcgtcgcatgttgcagccacgtccggccagccaaaggagttgtcccatagcgctgagcctgggcggcaagaatgtcacccaaccgcgccagatcgtgttcgatcaactcgacagcgctgcgcagttgcagcaccaggccggtgtccatcacatcctgactggtagcgcccagatgcacataacgctccgcgccagcatcttcgctggcgatcaatttgccgagggccttgaccaacggaatcgccgaattgcccgccgtgccatcgcctcgccgagggcatcacgtcgtaaa

SEQ ID NO: 18428 - DNA, 378 bp, Homo Sapiens
ccccacaacgtccgagaactgcttttatataatttttaaataaaacttttcaaacacaaaagagcgtaacataatgaaaggcatgtatccatcaaccagcatcaataattataaaatcgctcttttaatgagtataaaataagaactgaacttaacgtttaattggcagcgtttctccatttctgataataacagtgcaccctaaaatcagcagcgtcttagatttagggcctcagaaacaaggccacccacactggatccgaggggcaactgggcacctccatggacacccatgcttcataaagacagctgcaccctacactgggttggactgggacgttttcagctatccaaaataaaacgttggttttctaattt

SEQ ID NO: 18429 - DNA, 704 bp, Homo Sapiens
  misc_feature (56)..(116): n is a, c, g, or t
  misc_feature (137)..(453): n is a, c, g, or t
  misc_feature (529)..(538): n is a, c, g, or t
ccacccacgcgtccgcggacgcgtgggcggacgcgtgggtttttagttattttaannnnnnnnnnnnnnnnnnnnnnnnnnnnnnnnnnnnnnnnnnnnnnnnnnnnnnnnnnnnnaacaaaagttgcagtgaccgnnnnnnnnnnnnnnnnnnnnnnnnnnnnnnnnnnnnnnnnnnnnnnnnnnnnnnnnnnnnnnnnnnnnnnnnnnnnnnnnnnnnnnnnnnnnnnnnnnnnnnnnnnnnnnnnnnnnnnnnnnnnnnnnnnnnnnnnnnnnnnnnnnnnnnnnnnnnnnnnnnnnnnnnnnnnnnnnnnnnnnnnnnnnnnnnnnnnnnnnnnnnnnnnnnnnnnnnnnnnnnnnnnnnnnnnnnnnnnnnnnnnnnnnnnnnnnnnnnnnnnnnnnnnnnnnnnnnnnnnnnnnnnnnnnnnnnnnnnnnnnnnnnnnnnnnnnnnncaaagaagttccaagtacaatacaaagaaattccctcccaatttgagagtaagttgccgatataccctatgaccgnnnnnnnnnngccaatacttcagtgggtatttcctatgaacaacgacattctccggcacagccatcagactcaggaaattaacatcggtatgttattaccatcaaccctctgactgaattctagttctgccagttgtcccaataaagttcttagcaaaatggtctggtttagaaac

SEQ ID NO: 18430 - DNA, 360 bp, Homo Sapiens
  misc_feature (216)..(273): n is a, c, g, or t
ccccacgcgtccgaacttcggcagattgccaaagaactaaacattcaggttgctgattttgaaaattttattggatcactaaatgaccagggttacctcttgaaaaaaggcccaaaagtttaccagcttcaaactatgtaaaaggacttcaccaagttagggcctcctgggtttattgcagattaaagccatctcagtgaagatatgcgtgcacgnnnnnnnnnnnnnnnnnnnnnnnnnnnnnnnnnnnnnnnnnnnnnnnnnnnnnnnnnngtcaaatactgttctctgaaaaatgatgtcccaaaagtattataataggaaaaaagcattaaatataataaactaatttaagaagtg

SEQ ID NO: 18431 - DNA, 922 bp, Homo Sapiens
ccacgcgtccggtctctattaacctattatctatttatctatctctcatctgtccatccatcatcttgctgacgttagctctgggactcctcaagcctgtgtgtgatgatgagcgatcatccagctgtttgacactatgattctagtgaatttgcattgggcaacaaatgtttggatgagcacacgaataaacactatttatttgctaagtgttgtagggagcctgccttaaagaaccttatccatgtgaaaccaagacgtcccaccctccccttggcagggctgttatatgacaactctctgcaaaggccacctcccagtgcggtgggaaccagggccagtcccacacatgtgcacattctccaggtggcgtgcgaggctgctacgcttgcaggagggctctgaggtggccgtgtgcccggacctctgcagaggctacggtgacagagggctcagcagagttaccttccactgtgcacaggaaggaatgtgccctgagtgctgagctaaagaggaatacagggaggttttcacctgcgccgggcccctgtgccactaccatctattcattaacagatgtttattgagcagcgactataattcaggcgttgtgtgcgtgatggtagcaaaacaacaggggaagaaagtccatcgcctctcccttcctggagcttccatattggtgaaggagatggaaagtaaaatgaaaagcaaatataaaattacatattttactatgtgcaatgagaaaatataaagcgtgtggtgacagagaatggcaggaatggatacttagtgtcatcaagcaaggatttcagaagaatgcatcaacttggggcttgtgagaattaaagacagttttcgaagcactgaagtgaatgaattaatttgggcataggggactgggacagctagaggggtc

SEQ ID NO: 18432 - DNA, 347 bp, Homo Sapiens
gaaggggagggggcgcccggagtcttcaatggtgtgatcttggttcatctactggttcgtctttttatatgtgcatgttggggaaaatgtgggggtgcccactttaacgcgcctgggggcagatccccttttccccagttggataattggcgctactcgaaggcccgatgggaccccgctatagtcggccattaggcacgtggatgtgggtgtgtgtgcgcagcgtgatctcacacttgtgcgccgcgctagttcccaatcgttgcgctttcttccctccttttatcgcagctcgcccggactcctttgtaagcgtatatattgagggctcggtagtggttgctatt

SEQ ID NO: 18433 - DNA, 416 bp, Homo Sapiens
gactccacgctcaaacctatctcggtctattctttgatttataggaaatttgccgattccgcctattgttaaaaatgaacttattaacaaatttaacgcgatgtgtacctaattataacgcttacatttggtgcactttttcgggaatgtggccgaacccctattgttatttttctaaaactttcaaaaggtatcccccggagacaatagccgaaattgctgcataatcttgaaaagatgagtcagatattccactttccctgtcccctcatcctctctgcccggctttgccctccttttttctcaccccaccgcggggaattcaattagctaacatcctttggtgtccgagtgtttacctcaactgatatctacccccgcaaagatcttgtaagtattctgccccgaaaccgttt

SEQ ID NO: 18434 - DNA, 273 bp, Homo Sapiens
  misc_feature (191)..(227): n is a, c, g, or t
ggggggcccctctaaaggatccaagcttacttccgcgggcgggggacctcttaactcttctaaagggtcccccaaattcaattcccgggccgccgttttacaacgtcgggacggggaaaacccgggggtcccccaccttaacccccttgcaccacacccccttttccccagcggggttaaaaccaaaaagnnnnnnnnnnnnnnnnnnnnnnnnnnnnnnnnnnnnntgaagggcaaaggggaccccccctgaagcggcccattaaccgcggc

SEQ ID NO: 18435 - DNA, 325 bp, Homo Sapiens
  misc_feature (109)..(117): n is a, c, g, or t
  misc_feature (268)..(285): n is a, c, g, or t
gggggggcccctcaaaagaatccaaacttacttacccgggcaggcaagggctaactttttttaaaggggccccaaaattaatttccggggccgtctttttaaaacgccnnnnnnnnnaaaacccgggggttacccaatttaatccctttgcaaaaaacccccctttccccagtgggggaaaaaccaaaaaggcccccaccaatcccccttccaaaaatttgcccaccctgaagggcaaaggggacccccccttagggggccctttaannnnnnnnnnnnnnnnnnttaccccaagggggacccctacatttggcagcccctaagg

SEQ ID NO: 18436 - DNA, 736 bp, Homo Sapiens
cttttagactcggcctcgggtcaccttgaagctcatttgcttcagaaaaaagagtcggcgcctccggggattgaagggtcttccccctactccggaattattttcagcgggaacccacacgaaacggttcctcgccgattgcttttggatgatcgcttaaccccgcttgaaagaaacacctggcaggtatttcgcctactgatcaatgacgacggccttacggcgttccctacctatgaccaactgcggccatatttgggtatgcaacccggtaggcctgcctcgcgtgaaactgtatcaaaagcattagtgaccttacgtctcacccgttggcttagcctggggcgacgggtgcgcaatgatctgagtggacaagtgcaaggcaacgtctacctgcttcacgacgaaccggtcacaccggccgaagctatagagttcgacaaggactacttgcagctactcgcgcagtcaatgcagcaccagaccaaggtgattcgcgaagtggcagaaattgcctggaaggaatttgcagctgatcctgatgttggccaacgcttacctagcaggctggacatcatcgaatcccgcatgaatagccaggcctggaccaaagcgcagctccagtcgttcttaaagcgactgagttcggaatccgaactcagcaaaatatagctctatctccactgagttcggataccgaactcagtgaaaaaggcgaagagcgaatcgctttgga

SEQ ID NO: 18437 - DNA, 790 bp, Homo Sapiens
tctaaccgcatcatgatggccgagttcttccggatcaccacccacctgctgttcctgggtacctatatccaggacgtcggcgccatgaccccggtgttcttcaccttcaccgaccgtcagcgcgcctacaaggtcatcgaagccatcaccggcttccgcctgcacccggcctggtaccgcatcggcggtgttgcccacgacctgccgcgtggctgggagcgcctggtcaaggaattcatcgactggatgcccaagcgtctggacgagtaccagaaagccgccctggacaacagcatcctcaagggccggaccatcggcgtcgcccagtacaacaccaaagaggccctggaatggggcgtcaccggtgctggcctgcgttccaccggttgcgatttcgacctgcgtaaagcgcgcccgtactccggctaccagaacttcgaattcgaagtcccgctggcggccaacggcgatgcctacgaccgctgcatcgtgcgcgtcgaagaaatgcgccagagcctgaagatcatcgaacagtgcatgcgcaacatgccggaaggcccgtacaaggcggatcacccgctgaccacgccgccgccgaaagagcgcacgctgcaacacatcgaaacctctgatcacgcacttcctgcaagtttcgtggggcccggtgatgccggccaacgagtccttccagatgatcgaagcgaccaagggtatcaacagtattacctgacgagcgatggcggcaccatgagctaccgcacccggattcctacgcaagcttcccgcacct

SEQ ID NO: 18438 - DNA, 310 bp, Homo Sapiens
ccccaaatgttcgacggcaagcccgaccatcccgtgacccgcgcgctgctgccgcacctgcagagctgttcgatcacgcgcgaacgcctgctggcggtgatcgacggcatggaaatggacctcgaccagacccgctacctggactggcccggcctgcgcaaatattgctggcacgccgccggcgtggtgggcgagctgtcggccggcgtgttcggctataccgatccggccacgctggtctacgccgaaaagctcggcctggcgttccagatgaccaacatcatccgcgacgtgggcgacgacgcccgcc

SEQ ID NO: 18439 - DNA, 646 bp, Homo Sapiens
ccacgcgtccgagacagaaattacaggagatagggagggttttttagcatctctttcaaaagatgtatgtcagaatttcctttgcacaccaagaactggagcttagagccccactattctctaagccaggttctagtgccttacactccagaatgtcagatggtgggtgcagatgggaagaaagagaaaagttcatctcggtgtgtgggttcccatccgccccacatagcctctccttcttcggaacaatgggcgtggggtagaaagctctttcagtgaagggtgttctagcagctcagttaacactttactctccagtcaacacttgggacatataaaaatgccattgtaactactgtagagtcctgtgactcatcgtttgtgtttgtcagtgtgcagttcagcttagcccttccctgttcctgtgtagttacaatctggccctgaagacatccgaggcacttcagtaagtgggatcttttctagagatcctgggtgactttgggtgcacagggtgaccgagcatttctgcccctgtgaatgtggcactaacactgtgcactgtctccaccaagcaaggtttccactgagtttcttctcatgttactgggtttgtaaatgaataaacacattttaactactcttg

SEQ ID NO: 18440 - DNA, 904 bp, Homo Sapiens
cttgccttgcttgatcagctcgtccagggcgtagccgaccatgatcaccacgtcggcgtgttcgccacgggccaggcggttgggaatcgcttccggcgccttgcccatcgacgggccgaggatggtgtcgagggtatcgccgctctgggtggcatattgcgcacccagcaccttgtaggcagcggtgaagccgccggaggtcatgactttcagctcttcagcgtgggcgaccatccccagggaaccgatcgccagtgccaccagtgttttcaatagggggttcatcagcgtgactcctcaggcaacttgcagacgggcgctggcgcggcgatacagtgcgaacgtcgcgcacagggcgcacagtgcggcgaacatcagccagtaggccggcgatgccttgtcgcccgtctcgtggataaaccacgtggaaatcgccggggtaaaaccaccgaaaatggcggtcgccaggctgtaggccagggagaagcccgccacacgcacttccaccggcatgatttcggtcagggccgggatcatggcgccgttgtacatgccgtagaggaaggagaaccacagcagggtttccagcatgtgcgcgaagcttggcgcgttgaccacgtaggaaagtgccgggtaggcggtcagcacggtcagggtagtcatggcgatcagcaccggcttgcggccaaaacggtcactgagggtgccgccgatgggcagccagatgaagttcgaaacggctaccagcaaggtcaccagcagggcgtctgaggtggtcagggttaagcacgggtcttgccgaagtcggcgcatacacggtgatcaggtagaaaggcagtgggtggtcatcgccactatcatcatgccgccgatgacgatggtccagttcttccccagggtggcc

SEQ ID NO: 18441 - DNA, 771 bp, Homo Sapiens
ggggggcccctaaaaaggatccaagcttccgcacccgtgcatgccatgtggaagctcttctaaattgtcaccttggttcatttttttggcggtcgttgtacaatttcccgccgtggaaaaccttgtcgtttgcaatttattccccttgcagcacatccccgtttccccagcggggaaaatagcaaaaaggcccgaacgatcgcctttccaaactgttgcgcgatttgaatgctatatgtgacgcgccctgtaccggggcattagccgtggcgcgggtggggtttacagcttccgtgacccctacacttgcgcgctgctcaatcgccgtctcctctgtctttcttcgctgtctaaattgagggctcccctgtaagcgtctggaataattgtagatgtttcatgttttggccaactgctctctagcacgttatatgcgcattcggcgttggagtgcacgatctcattaaggacactgtatctaactgaactagatcagccctatgcgaattgtcgatgagatctaagggtactacgcgtatcaggacactgcctataagagcatgatgtagaaaattaagactgattctaagttatcataagcgtcaacttacgagaactgtcgcaggaaccggcacgaaaaccctatcgcttttttctacattaccccaaatcgaacacgtcgagcaatagcacagtagtagatagatatatgaagtgggaagtctgagttcgcttttccgcttctgctaccatttcgcgtctggacatccg

SEQ ID NO: 18442 - DNA, 356 bp, Homo Sapiens
  misc_feature (228)..(303): n is a, c, g, or t
cacctacgacgtccgagaattgtgtgaaattgaagtaatatacacattaggtggtctagatagatataaatggaataaaaaaaataaggggcggcgctctagagatcagcctacgttagcgtgcatgcgaagttcattactctctatagtgtccctaaaatccatttcatgggcgtcgtttacaacgtcgtgactgggaaaacccttggggtaccccaactttatcgnnnnnnnnnnnnnnnnnnnnnnnnnnnnnnnnnnnnnnnnnnnnnnnnnnnnnnnnnnnnnnnnnnnnnnnnnnnngcccaccctgaattggcgatggggacgccgccctgtagccggcccattagccg

SEQ ID NO: 18443 - DNA, 461 bp, Homo Sapiens
  misc_feature (377)..(410): n is a, c, g, or t
cacccacgcgtccgggagtgcacctgccccacgtgccaaaagtaggcaggatggcactgggagctggggcagggcatggaggggacagggcctggccgtgctgagctgtcccctgccgctctacaggcacagccgcgccttcctgcacgcactgctgcacagtgacaacacggccgcgctgcaccacctcacggtccacaacatcgcctaccagctgcagctcatgagcgccgtccgcaccagcatcgtggagaagcgcttcccggacttcgtgcgggacttcatgggcgccatgtacggggatcccaccctctgtcccacctgggccactgacgctctggcctctgtgggaatcacactgggctgacctggcattnnnnnnnnnnnnnnnnnnnnnnnnnnnnnnnnnnctggaagatactgaaggattcctttttgaaaggttttttttattgtaactt

SEQ ID NO: 18444 - DNA, 785 bp, Homo Sapiens
ctgacgctgttcgaccgcgagcgcgaacgcaacacgctgcccgaggtgctgggcgccgaggccgaggaatgggtcagcctgttctgcgccatgccgcgcacccgcttcgtgcaggccatcctgcaaggccagggccagggccccgagggcctgacgctggaaggcgccgacggccaggtcttcaccttcacgccgcgccaggtcgccgccttcatcgtggtatcggccgccgacatcggcgaacaatggcacagctggcaggacgagatcttcgccggctatccgcagcagcagcgccgcgacctcaaatcgcactgggccgcctcgctgtggcccggcccgctgaagccgccgtcgaacatcctgtcgatgctgtcgcacctgctggcgccgctgtcggcgctgccggccgataccggcatcccgctgccgcccgccttcgaccattgccgcgccacgctcagcccgcgcgacgaggccgccgccagcgcgctgtactggcaggtcgtcacccgcatgcatccgcagaccgaaatggacacggcgcgccacatgctggaagccgcggtggcgcacaaccccgtgggtcgccgagccgcgcctgctgctggcgcaactggcgctgacggcgggcgacttcgaggccgccgaaggccatgccgccgccggcctggccgcgctgctgcctggggcaccgcgtgggacaagcgcatctagtgggcgggctggatggcctgggcccgcatcgaaattgaaaacgcccgcgcgcgccgctggccggaaaa

SEQ ID NO: 18445 - DNA, 815 bp, Homo Sapiens
  misc_feature (41)..(60): n is a, c, g, or t
ccacgcgtccggactagttctagatcgcgagcggccgcccnnnnnnnnnnnnnnnnnnnngactaaccattatgcaaacaaggaagtatggactttaatgataaaaacaatttagtatcacttgataaatagtttaattgaagctattacacctcatgtatttcttttcaaatgtagacattgacatagaactcttactgaaatgcttttaatgtgtttacatttgtttttcacttagctgaatgcaatatccatacatctccttctccgggaattcaagtaaggcatgtctacaccccctctacaacaaagcatttctcacccataaaacagtcaaccactttaaccaacaaacacagaggaaatgaggtctctaccacacctctgttagcaaattctttgtctgttcaccagttggctgctcagggagagatgctctatctggctactcgtatcgaacaagcttgtcatttttcctttgacttcctttatgaagttctgaaagcataacatctaaaatgttatcaatcacacggatgaagaaggatttactcctctgatgtgggctgcagcacacgggcaaatagctgtggtagagttcctacttcagaatggtgctgatccccaacttttaggaaaaggtcgagaaagtgcactgtcgttggcctgtaataaaggctacacagatattgtccaaatgctgcttgattgtggagttgatgtaaatgaatatgattggaatggaggaacacctctgctttatgctgtacatggaaatcatgtgaaatgtgtaaagatgctcttaaaaagtgggg

SEQ ID NO: 18446 - DNA, 781 bp, Homo Sapiens
  misc_feature (53)..(62): n is a, c, g, or t
ttctccggtgtggccaaaaaatttaattttgtgggcggtgtttgaaaaaacannnnnnnnnnaaaattgtggcttttcccctttttatcgcccttgcgcttcacccccttttcccggggggcattataacaaaagaggcccccccggttcccctctcccaaatgtggagcaccctgagtgaaaaaggaaagccccgctgtagggcgctattagcggcggggggtgtgtgtatacgcaaaaggggcacgccacttttgcccgcccactagccgccgccccttgtgttttctctccttctctcctcccacgtttcgccgctttccgcggtagctttataacgggggtctcttatgagtctcagtattagcggttcccgcctctacacccctaaaacttggataggttagggttcaagagtgggccagcgccgcgcataacgttttgccctttagaggttagaattcctgttctgagtggcgaccgtggcgaaagtgataacccggtcagctctcctccgtggtatctttgattcataggttttcgtctaattgcgctattggtttaatatgatgttttatattaatttaaccgaattatactcaaattatgacgtatattttgtgtgcattgtcagggcaggtgcgggcaccttttttgtttattctctagcactgattatgtgcatccaggaattatctgctgatagtgtgtgtgatttttgagatgagagggagaaattaatttttgtgttccgtatctttttggggtgtctctctggttt

SEQ ID NO: 18447 - DNA, 505 bp, Homo Sapiens
ggggggccccttttaaaggggggtggccgacgttttactctttcatgactggaaaaaccctggtgttaccccccttttttttcttgcggcccatcctgttatcgccgggtgggggaaaaactaagaggcctgccccgatatcccctctccacagttgcgccccttgaatggaggatgggacccgctctgcttcccccacattatccccttccaaaagtgttggttacccccaacgtgaaagggacacttgcccgcgcccgagcgtccgctcctttcgcgttggtcccttcatttttcgcgacgttctacggcttcccccgtcaagctctcactcttgtgctcctcttacggttcctattttgcgctttacggcgcttttaccgggaagtactagattatggtgatcgtttatgtagcgggacatcgccctgataaaacccttttcgccctatgtcttttgtagtgcacgttctcacgatggagcgttgttcccaactgtataagg

SEQ ID NO: 18448 - DNA, 399 bp, Homo Sapiens
caacgacatgttcgattacccgttggccgcgccgctgatttcccaaggcactcgcaaactgttggcgaatctcagcgggcgcatggatttctcaccgagcattcacaccgaacacttcccggccctggtgaagatcgtgttgcagtccaatgccattggcgtgggcaccgaggaggcgtttgccgaggacattgccaaaggcaaactggtgctgctgcactggcgcaacctgccgcaaaacctcgagagcctgaatgcccgttgcgggatcgtcagccgcaccggctttcgcttgtccccggcggcgaaagcgatgatcgagacgctggtggcagtggatcaacacgaggtaagtgtggcggtctagcacactgccccactcacctcccacgtagcagc

SEQ ID NO: 18449 - DNA, 910 bp, Homo Sapiens
  misc_feature (277)..(360): n is a, c, g, or t
  misc_feature (652)..(710): n is a, c, g, or t
ggggggcccctcaaaaaaataaaatggagtcttccatcgtgttacaacaaaattgattctctgaagggggggcgtaacccatctttttggggaagctttttacctaacccccttgggccgccctgtgttgtatcaccctttccccgcctggcgtacccaccagttttcccccccggatggcccatgaaaagagctctgcacccgcattgtctattttgatatgcccctgtgatagcgcaatgaagacgccgcctattgccggcactctatcggggannnnnnnnnnnnnnnnnnnnnnnnnnnnnnnnnnnnnnnnnnnnnnnnnnnnnnnnnnnnnnnnnnnnnnnnnnnnnnnnnnnngttggttattttattggggggtcccctctagaggtcaaaatagggggttcctttgaggtttgaactaaagggcttcccccgggccacgccccaaatcggttttagggagggtccatcgttttgaaccgcctcttagacgaatttgtctaattaagacactcttccacccccgccctcacctaatcacccacaagtaaaacttattcttcctttatggtaaaaggaattgtagaaaatttgtcgggcatgtgagtgcttttttccttttttatggggatattttggaatgtannnnnnnnnnnnnnnnnnnnnnnnnnnnnnnnnnnnnnnnnnnnnnnnnnnnnnnnnnncccccccacttttttacccggtgggatttctctctattcacgcccagcaaatttaagactattctccctgatttgtggggctagaattctttggaatggggggaatacggttgatgtgagtttacacaagaataatcccgaaataattaaatatgttcaaaatggttttattgatttttataatataaaatgaggttgtg

SEQ ID NO: 18450 - DNA, 714 bp, Homo Sapiens
cccttaaatagccgatgcccaacgcttgggcgaacgtggcgtacagaccgacctgagcctgtcccagcgcctgggcctgcaatggtcgatcaccgccggcgcctcccaccgcaccatgggctaccgggagctggaagacgccgcctactacgattcacgggacgacgaaggccgacgcacccgctatcgcgaccagcagagcctggccctgggctgggcccatccgtggctgggcgccttcaatgccggcctgtcgcgcaccaccacgttcaacggcgaaaacagcagccgcgccctggcctcatggggcaccagcgtgcgcggtgtgtcgctgtcggccagtgccgaatggcaggtcagcggccggcagaataacgaaaacgctgtgtatctgaacctgagcgtgccactgggcgagaaccgccgcgggcgctcctgggtgcgcaactccggtggcgagcaccgcatcggcctgggggtgaacgagcaggtcaacgatcaactcagttatcgagtcagcgccgagcacgacagccgcgaccaacaagtggaatccaccctcggcgtgtcctatctgccgcgctatgcacaactggacatgaactacagccgctcggacgccgaacgctccagctaccagggcggtctgcgcggtgcggtggtggcccacagcggtggcgtgactttctcgcttacccggtgcgcgacaccttt

SEQ ID NO: 18451 - DNA, 564 bp, Homo Sapiens
cccccaagcgtccgcattgtagtaacacttggaaatgtgtgagattcccccttagtctggtcttcaaggagtttttaatgttctagccaggctaccctcagcttctagtaatctgtcaataccatttaagtgctcctcccacttgctgtccccagtagcttctcttccctgtgagctgtgactccttgtgtgttagcctgtgtttctcatttttaaggtggcagttttccctgtgacctcaattctctgatccaccctagaagggttgactttcagtttgttcagcctttttctagctgtgaggacaagtgatgactgcctagctctttccatgttgaaatagaaacccaaaagtttgtttaaagaattacttgttataaaagtcccccattgttaatgtacaactcaatgatgtaagttgatttatcgaattgtgcagccatcagcagagttctacttcagcatattttgtcacttcccaaattcccttgaacctgtttgtagtcatttcctaatccctggtcctcatgactgggtctgaatagaataaacatttggaaagcg

SEQ ID NO: 18452 - DNA, 950 bp, Homo Sapiens
ccaccgcgctgggattcggcatgagtgctcgggagatggacctggattaccagccgttccccctgagcaccctctatgaccctgaacatcccggtggcacggcgttcctgtcattcgtcaacgcatggatcgaactggccggcatgctcaacgaactgtcccgcagcatgggccagccggatttctatccgttcgtcctgccgccggcggtgattgccaagctgcacttcattcacctggtgatccagcaagagggcggcagggcggacgaggtgttgcaggcccagtaggcaagtgcttgaagcccttcatattttaatcccgcaggaacggttgtaacttccgatgagatcggtacaatggccccgcttgccgagaggcgagcgtcgttatggtgatcccatcggtccccccgcaacgattacccgtgaacctggtcagagccggaaggcagcagccacagcgggaacattgtgtgccggggtgtggctggtggggttgcctccataacgccacctccttgattcaaaaaaatacttttatgaagcccttcgctgacaatcgtcatctgcgaagcgatttctgctgttcgtccttcagcacagtgctcacaagcccgaaagcaatcgttaccggcaaaagactgtgagggctctttcacaacttcaagcttccactctggacaacccaaaaccaccttgctagtttgcgccagtcacatatttcaaaatatgtcgatggcacatggatgatattaaagtgatggcgctttatgggctcattcacctcaactaacaaggatgtcgggtcatgaaaagcctgcaagggttgcccacgcttatcagcgcttccgtcggtgcccccgggcaaagccccgcaacttgcccgccgacgttcagtgcatccagtatttgttcaacttgattcactccccagttgggtttcccctt

SEQ ID NO: 18453 - DNA, 763 bp, Homo Sapiens
cccggggcgaacggcgtgccggtgtagtccacgggtacgaagccgccaccgagggcgacggcggcaaccggcaatacgctgccggcggcttgggcgctcgggtcgttggcatgtttgctcaggttgatattgatgccgccgacggggataccggtctggtcatcgccaagcgtgccagtcaactgagccagggtgttgttatgcagcgtgccgttttgcagggtgcgcgcgacgttgaggttaacggtgccgccggcttgcatcgtggcggcgtagcctgggccgccgttgtcggtccaggtggtgacatcgcttgtgtaggagaagggccgcacgtttggcgagcggtttttgagctcttcaaaacgcgccttgtcgaagttgccggcggcggtggcggcattgaacgcaggcacgtcgatgtattccatgccttcccacacgtgatcgttcacatgccctggggtgttgatcacgagtttgcgttgcccggtgcgcgtgccggcgccctggttgagcaagtcgccagcggtgatgctcagatcgccattggcggccagcaggctgtagcggttctgcacgttgtcgccttgcagcaccatgtccttgccggcgacgagccgcgccgaggccgagtccttggttgccgtttcaaggtaagtctcgttgatggtgatttcaccgcgccgccaattgtcgtcctcaccgcagtgctgcatacacacccaggccaggctgccgggtggtgagggtttggcccagt

SEQ ID NO: 18454 - DNA, 690 bp, Homo Sapiens
cccgttcaaattgtgcgcggtggacctgctgggccaggccgaacatggccccacgtcgccggcggtgctgctgaccaccagcgaaacgttggcccgcgacacgctggtcgagatcgagcggcaattgaacctgctgcccaccgcgggtatcgcggcgcaggcctgggccgattgcggcgaggtcatcgtctgcgacagcgaggcggaaatgctggccgtggccgacgaactggcgttcgagcatgtgcaggtcatgacgcgcgatccggactacttcctgaagaacctgagcaatttcggcgcgttgttcctgggcccgcgcaccaacgtcagcttcggcgacaaggtcattggcaccaatcacacgctgcccaccaaccgcgcggcgcgctatacgggcgggctgtgggtcggcaagttcctcaagacctgcacctaccagcgcgtgctgaccgacgccgccagcgcgaccatgggcgaatactgctcgcgcctgtgccacatggagaacttcgccggtcatggcgagcaggccaacatccgcgtgcgccgctacggcaaccggccggatctgccctggtaccagcccgtggaggcccaggcatgatcgccttgccccagggaccggacttcggcttgcacggccggcgcgcgctggtcacgggcggcagcggcggcatcggcctggcc

SEQ ID NO: 18455 - DNA, 397 bp, Homo Sapiens
ttgtgggccgtgccgatgatgatgctgatcctgaccggcgacatccagaacatcgccatcggcatcctcaccgccatcttcctgatcggcgcctactacgcggtgctggcgccctacctgccgctggccttcccggtggagatgcgctacaccggcatctcgctcagcttccagctgtgtggcgcgatcttcggcggcaccacgccgctggtggggctgtgggtggcgcacaccttcggcctgacctggcagccgatggcgctgatgttcgccctcatcgccggcgccaacctgctgtgcgccatctacctgcccacgccggagcgcgaggccgcccgccagcgcggcggcgcgctgggcgccggtcagcatagccgcgcgctgtagcggcggcgcc

SEQ ID NO: 18456 - DNA, 406 bp, Homo Sapiens
tgatggcgaagattcgcgagatcaccgacggctacggttgcgacatttacattgaggccaccgggcaccacaaggcggtgaaccagggcctggcgatgctgcgcaaactggggcgttttgtggagttcagcgtgttcaacgacgaggccacggtggactggtcgatcatcggcgaccgcaaggaactggacgtgctgggctcccacctgggtccgtacatgtacccgcgcgccatcgactttatcggcaaccgcaagatcgacatgcgcgacgtggtcacccacaaatttgccttggcagacttcaaggaagcatttgcggtgatggagcgcggggacaagtcgcttaaagtcgtattggaaccctgattggcttaataacccagaaccctgtgggagccggggcc

SEQ ID NO: 18457 - DNA, 640 bp, Homo Sapiens
cggaattcccgggtcgcccttcaaacccaccaggtctgcccgtactccaacgccacccgtggcaacgtcgatgtgcgcctgcacgtgaccgtttgatccaaaccgcgcccacaaaaaagcccgactcatggtcgggctttttttgtcgtaccggtggcgcaagaattacttcttggcgcgacctttgtacgaaccaccttcacgggtgtcgatctcgatcaggtcgtcgatttcgatgaaatcggccacttgcagttcggtaccgttagccagtttggcaggcttcatcaccttgcccgaagtgtcgccgcgagcggaaccttcggtgtaggcaaccttacgcacgatagtggtcggcagttctacggaaaccagacggtcttcgaagaagatagcttcgcagacgtcttccatgccttcttccacgaatggcagaacggcttcgatgtcttcagcgttcacctcgtacatggtgtagtcggtggtgtccatgaacgtgtaggtgtcgccgctgatgaaggacagggtcgcttctttgcggtcgaggatcacgtcgtccagtttgtcatcggcgctgtagacgatctcggtcttgtaaccggtcagcaggttcttcagcttggtcttcatgattgcgctg

SEQ ID NO: 18458 - DNA, 482 bp, Homo Sapiens
  misc_feature (246)..(264): n is a, c, g, or t
ccacgcgtccgggaagagggtggtagaggaggtaagacagtagggaaagacaagggcccatgctcttagtggggaaaactcttggagccgttttctttgagctttgaacactgaaaccattgttggcagggttcagtcactgacagcacaagtttcactgaattgatccaagagtttagtgatttcaaaagccttggtctcaggagaagattaaactttcatattgggcagtggttcactttaaannnnnnnnnnnnnnnnnnnaaacaattttttaagaaatcctaataagtaacatacccaaaatgctctgtcttgagtcatgagaaccatcagttcttgatattgtctaaacttgcatctagagctacgttgtaaaattcttttaggcatgtgttagatttctgtgtaaactttgtttaaatgtaaacttcatactacattgtcagtttttgtcttaataaaactatagatttataatc

SEQ ID NO: 18459 - DNA, 512 bp, Homo Sapiens
  misc_feature (280)..(289): n is a, c, g, or t
ggggcgggccctataaaagattcgaagctacgtctccggtgttggaaagtgttaccttttttgagttggcggcgaattttaattcccgggcccgtctgttaaaaagggagtggatgggaaaatccttggctttcccaaatatacccctttcgaccaccatcccttttcccaagagtgcggaaccaataacaggtcccgcccgtttgcctcttccaatggttaaggcgccttgacgtggaagggcacgcctcccccgtggccgcgcatttagccacgcgcnnnnnnnnnntacccctagcgtgaccccttactttgcccgcgcccacccccccctctccttttctttcctccactccttgtctggcccgtcgcgctgtatttccgggcacgcttaatggggcgcttccttgtatgttcgcatttcagtcgctacgctccccataccgaaatagactagtagggggacgtccccctgataggcggtttccccgaattgaagttttatctccttt

SEQ ID NO: 18460 - DNA, 837 bp, Homo Sapiens
ccccacgcgtccggtgatcttaactattttattttttaactctagatttatccaatggtgtcctcccctccctctccctcagttcctctatgactcatctgctgattttatcttatctttttcctaagctgcttccttggaaggatcagtcccctcagtagaatgctttttggaaatgccattagggccaggcagtgtggggcaaagctggaaatgtgcgcaactttcaacttccaagaaagggagcatcagtggcctgagggggtgaacttttctgctgctaccaggagacctgggagatttaatcttaacttttctaaatgtctctctcttcccctctttactcatctgtcaaggttaccttctttctgacacttcattgatgaccttctcccagccccactccagacaaaattagccactcctttctctgtactgtcttatagagtacaccttctgctgtagcaaatagcatattacattttggttattcatgtacatgtcattttcaaatcgagctattcaaaggcaggaactgtcatcttaaaaccataatgtattgagtattttacatatattatctcattcagtttttacaataaacctaagagctcaggggggttaaatatcatgctccactgaaatgtaattactcagcaaaaatagggctttgaaactaggtcaggatttatatctatacctagcacagtgcttggcatcaggtgtgtagagggtcaataaatgctcaacaagtaagtaattaaatgtacaatctggtatgttacaagaaagtctttttgcccatctgatgaaaacaagtcctttcagttactcccc

SEQ ID NO: 18461 - DNA, 900 bp, Homo Sapiens
ctaaaacacccgccaatggcgccaccagcacccgcgggatccccgaggccgccaccgccaggcctacggcgctgggtagaaaggagctgtcgcggaacagatcggtcaccagccagacgatgatcgtgctctccagcacgaactcgccgaaggacgagagcgcctggcccagccataaaagtgaaaaattgcggctgatgaaaaaaccggcaaaccggctttgcccttgattcgtcctgaacaccatcccttccctgtgcgaaacgctgtgaaattttccggccgctgcgaattgttgtgaagccggcgataaatggccaattgcccatgctaacgtcggcttctatgtcatccaatccattgagggagcagcgccgatgtctactaccgtaacacccgccggtggcggaccgaccactcaaaaagcctcgacgtcggtattcgacgacaagttgaatatttccaagtcgagcaaggtgatcgccgattacatgcgccagtcgggcaaatcggcgattaccaagcaagagctttcgcaactggccagcaatgcctcgggcaaggtgcccgccgatgtgagcgctgctgcccagtacatggaacgccatcccgacgtgttcaccgccattgaaaccatgacgtggcgggtgccgataacctgtccggggtgtggaacttcgactgggcggccaacggtggcctgaacggcacggcgaccgatgcgatcgccaagatgcacacacctttgactttgcaatcgcccagtcggcgttgatcaccgagatcagcaccggcaaaagggccgagctgggattcaaccaagcagcggccgctctaaaggatcaagttacgtcgcgtgcatgcgacgtctagctcttctatatgtcacctaattcattc

SEQ ID NO: 18462 - DNA, 248 bp, Homo Sapiens
ccacccacgcgtccgcaagccagagccttgagttcctgggctcaggaagtggtctgaccaaacaaactccaatgcagtggccatacctgaagcccaaggaagtcataccattctagttcgtggaaacctcaccagccttcacagagactagccaatttatcataacaggggcaggagaaggggggcactgttacaaaatatggaaatctctttaacaaactccaaaacacagagaatgcatatttcta

SEQ ID NO: 18463 - DNA, 297 bp, Homo Sapiens
cacccacgcgtccgaattaaaagaagcattcaaatctgctttctaccctcattaacaattagcagggcactggccagagtttgtaccctgtgttttaccttaacaacattctatttgctctttgtatatttaagtgttgtaaggaaacgtgtttcaatcaaaactgaccatgagataaaggaaagagatgtggcttttgtgatattctatcacaaacacttattgtatctctgtaaaatacaatgtatgtatgcatgtaagtgtttttgtcctaatgttgctactcccatggcaaag

SEQ ID NO: 18464 - DNA, 831 bp, Homo Sapiens
ccccaaaacgtccggggattatcttcagacaaaataattcctcctttataaatggaatcactgcaaggtttttttgaaatataaagcaacaaattcttttcgatacacaacttaatttgcacccataacacatgcacgatacactgccaagacttgggtgatggactgacccatggtggggaggtggggagagtgtttgtgaaagacagagatatggagagaggcatactattttttacattgatggatttcctcccctagcataggagaaaagtagatgaatgagtatttcatgtgtgagagcctaaagaaagaggaaagaactgaatacatgtctggaaagaaagatttgagtctgaggatggcaaatagaacttcaccctgagagtgctccccaactctgtcagaggtctgaataatgccaggctggtggccaaatacagaaatgttgtaatggagcactgtatgaggaacaggaactatactctcctcaacagaaggccaacccagcgtttcagccctaagacaagttgagtggcctcagctagagaataggaacaataccttggttgaccttccagacttctcttaccaatataaatacgcaaccactgtgtgaggacaccttccagattctcaggtctttctccactcctaagtaaccaccagacacctatgccatgtgagggaggtagttgaaagaggaggggagagtttctacacccatgctttgtggagaactatgcatattagtaacacctggactggagacaaaggaatagtcactactgttgcaaactaatattttccacataaacccatatttttgtt

SEQ ID NO: 18465 - DNA, 435 bp, Homo Sapiens
  misc_feature (156)..(184): n is a, c, g, or t
  misc_feature (265)..(274): n is a, c, g, or t
ccccaagcgtccgggccctttcgaacttaatttcttggaaaacaatatttatagggcttaaagcccattttcatttctaatctaaattatgtgtgcctatctgaaaactttgggctctttcgtgtttctttccccaatttcagaggttaatgggcnnnnnnnnnnnnnnnnnnnnnnnnnnnnncattgattcggtctgtctatgttaggctaaaaaataaccttgtgtatgctattgttttaaagtgcattattttgtgacacnnnnnnnnnncttgtaaaaatgacttgaattgagaatatctggaagcctttttatttctttgaaagttctacctatgatatttctgatgactgccgcctctccatatgtgcagaactttgctactttggaaaaatggtgtctttataccccatttaaatgtccattatatt

SEQ ID NO: 18466 - DNA, 563 bp, Homo Sapiens
ccgttcatgcacaaggccgccacgtacttgccggtggagtccttgatgccgatggaggtgctcttgacctgacggccgtcggcgaactggttctggtagttggcgatcacctgcgggtactcgggatcggcgatccgcgccaggcccagctcggtggccgggtcacccggttgacgcccggagaggttgttgtggatggccatgattgcgtgctgcgggtcgcgcaggtcgtgcagcacgacctcgcaaaacgggctgaaggttttgctcaggccttcggcaatctgttcgagttggctgatcaaggcggcttgttcgggagtgtgttttttcattcagacaacatatccagtagtggatagaccgtcaatttggctttttgcggtgtgcatggtggatagcctgacagccttgctggatgtgggctgatatcttgggcgttagcttgatcggggtcatatccgttatttaggtaacggccgcttatggttccgctcttacagcggctcacttttgaaaagcgcaaaagtaagcaaaacgctcttgccccaccactcggcacc

SEQ ID NO: 18467 - DNA, 225 bp, Homo Sapiens
ccccaaacgtccggcttcatgaactgaaataggaaacacaaaggacaggcaggttgtggggaaaaggtgatgagtttagtttttaatcatggttagtttgagtagctccacgtaacgatgtctagtaggcagttaaatttatagatgaggaaaatagagaaagggccgggctgggaataatagacacctgttattttgaaatgcaagctcactttaatggttctt

SEQ ID NO: 18468 - DNA, 281 bp, Homo Sapiens
ccctaagacgtccgggagccaggggcccagaagattgagcttctattagcctcagagatggaattcgccgttttgccgcgatttggcgttaacttattgacccatggggaggagggtcacttcccgtgaaaagaaggcagagatgttttgctgtgcccagtgtgaggaagcgaaggaaaagaaagatcttttgaaaatgtgtacatctacttgcagcttgaaaattccaagtgccagacatttttcttggaggaaataaatgtcttcaatttattcatctt

SEQ ID NO: 18469 - DNA, 942 bp, Homo Sapiens
  misc_feature (74)..(87): n is a, c, g, or t
cacccaaaacgtccgaataattccttttcatatttattggctagatatctgtgagcaaattgtggtcatgtccnnnnnnnnnnnnnngctgacaaggaaattttcttccttactactaaagaaggaagtttggcgcattttgacttatttctttcagaaataaaaatatctctcagttaggcacatgtaacacttgatttcttcactcctctcccagaaagtagggcagtgaggactcttcatgtaactaaaggcaggacaattttcatgtgctagataaaagataagttgtaaaccacttttggtaaactctttttgtcctttttgggatattgttctgtaaccatgcatacataacacattacatatacacgtgtgctcacggacacttgccagatagagctggggtggagcacaagcctcaagtttcatggaagtgttttctgttttggagcagagaagtgttcttctaagccatctggctcctattagtgcaggttctgctgtcagcatttacttaaatagggagaggccctgtctatgtcaccctcgggaggatcactatttcatggctagattggtttaagtttttatttatctaccaggacaaaatggtaacacaaataaatgccttatgagatattttcagagtttagtcatagtctcttaaatataactccattgttcatttccaccatagtctttataaactaaagcaatcttggtagaccttcaaataatgtttgaagggcatcttctccaattatatctaggaatatctttggccaagtccccgatgcacatttcctacataatgtatctatacacaaaatatgtatagatatatatagcaacatgggacaaggtcatgacgatccacatgaccactggagaatgtaactctttaaaatatttctgttccgattttcccttttgttttgt

SEQ ID NO: 18470 - DNA, 472 bp, Homo Sapiens
ccctcaagcgtccagggtcatgctgaccttgtcgcgaaatgccgatacggcgggatcggtgagcgccagctcatgaaattcggtcagcccggccttgccatgcacggcaatcaaccccagcacggtgcccatggaaaacttggcctggtgcacggtctgcggcagcgtcacccggcccaatacgtcgatggcgccttggtgaacgcgggtttcgacgcgggtgatgtgctcatggctgatgccctcgcgctgcatcaggtccagcaacgcatcggcggctggatgggtgtggcggcacgaggcgtgaaacttgaacgaggtttccagcaacgcccagcgactgccgaggcgatccgacagtttgccggggtctgcgtcggtggacatgcccgccgccatcccctgatcaccttccagaatattgcgcgcaccggtcagcccgtccgccgtcaaatacgcggccaacaaacca

SEQ ID NO: 18471 - DNA, 216 bp, Homo Sapiens
ccacgcgtccgcaaactacaaaccttggggaaatcattctgttagtaaatgttattggccacacattccttcctgtggacttgacattttggaagaactctttgccagataatgagttcattttagttttatgctcccattgaaaaattttccactatttttataagctgttaatttcttgagtactttataacatgtctgtagcttggataaacc

SEQ ID NO: 18472 - DNA, 826 bp, Homo Sapiens
cacgtcggcgctggagttgcggtgcttggcgtcgaggtcgctgcgggtgtaaccggcggcaacaccggcgcgccaggcgtcatccagttgtttgtcggtacccagcaggaagccactgaggttgcgatccaggttggctgtgttgctgtcgccgcccatatgcccccaggtgcccagcacacgtgcccagccgaccatttcgccttggcaaccggcgctgctcaactggttttcgctcggtgccaggctgctgcggggatcgtccttacggtagcagccgggttggcgcaggcgctcattgaccgcgtcacggatgtaacgcgagtcttcgagcaaggcgctggcggtactggcgtggatttcccccgacaggttgtcgaacgcggcgcgagcttcggcgacactgccgttgagcagtgcgttttgcaccgccgcaccgcccaccgctgcgccactgcccagtgctgccgctaccgcccgctgattgccggtggccgccacgctggcgtagctgacattattgcggctgaccgccagcgcaacctggttcgggctgtagctgagcgcggtattgaggaacgccaggttctcaaggttggtggtagcgaacgttccggtgaccccgccgtcggcggtcaacaaggtgtaggtagtcggcccggcatacggcgccaggttgaccacattcagcgtgcccgccaggtccgccgtgcccgcctaccgccagggccccggcggccgatggggtgataaccaggtttcagcgcgccatcggtggcgtttggtgaagttgccggcgaccctcaccttgccactgtccggggcc

SEQ ID NO: 18473 - DNA, 262 bp, Homo Sapiens
cacccacgcgtccgataaatttgttttacttggttgcctactgtcctaagagtcttgcagccttaatggccattcattcattcagcaaatactgattgtttatcagatattaagcgtcatggtatgtatattacttgtttatgttgggaataacaactgcaaattgaaggtcttattttaaaattgacttgttaaagttaaatttgtcactgagaataatgggaggtggaaaaagttacagtttaaaaatgtttacaggcca

SEQ ID NO: 18474 - DNA, 970 bp, Homo Sapiens
ccacgcgtccggaaaaaaagactttctaatatagaaagacccagtgtgtgtaaaccatcccaagatgaaattgaatgcctatcgtgtgccaggcactgtgctcagacttatgaggaaacaggagggagttaagttggaaaccctgtgggcggataatacggaagacagactttacacatgtaactctaatgttgcacagacacacaaaaagctgcagaagcacagggcaaggaggggtgtgtgagaaaggcggcatttatgatttcctgtatcctaaagactcattcagatgtcagctaattaagattgaggttcctggtggagggaacttagaaagtgctgagcgtgtttggagaagagttaacagtccagttaactcttctgtgcaggatgcgtgtatgcatgtgtgtgtgtatagaagatatttaaggaaaggtaggtaagtccacagtgtggaaggtcttgaatgctgacattagacttttttctgtaggcggccaggccctgttgaaaatacaatatgtgggccataaaacactgaaattgagttgcagacttgaaggcctggatttcccaaccctgaaagtgcttcatgccaagtgacatcattcttcctgccggtctctttccacccactccaaccccagatcaggataccagcagagagaggctgtgagagcatgaagctgcaacaagtcagtaggggagcaaacaaatattgattcagatcacgccacagaagagacaagctggagcaagtgctgtgtgtccctcctgctcagtttgatcgaggtcactgggccgaattccaggaattctggggaatgagttggccctgtgactcagtcattaatcaagaccataaaaccaaggagaagaatatctgctttcaaaaaggttctgataataaagatgcagtacgtgggtggaggatggagtacagtgggaacccctcttctcacccagtaca

SEQ ID NO: 18475 - DNA, 472 bp, Homo Sapiens
ggggtaaaaaataaaaggaaacaagcttgcgtcgcccgagctctaaaatagtgtcgcggtgaataagggtcactgaactcggttccccggcgcccggtttagagagtgccccttaaccccatcccgcgtatgaccgatgaggaaataacccataggccctcccccatctgcctttccaagaattgcgaatgctgaatggcacagtcgagcgcctctgtcacggccgattaacccttacctttaccctaatagccacaccgtgaggtgcatattgtcaggcccctgagcgctcgtccttttcctttccgtcgctcctatctgcgcacgtcttcagagtctaaccgtgaagctctcagttcggtgccgcgttagagttcagagttatggcctcgcggaacctagacccagatattgtacaggtgtgaggctcgctcatgacccgcccttgatatacggttttcgacgctggaac

SEQ ID NO: 18476 - DNA, 221 bp, Homo Sapiens
ccccaagcgtccgggggaaccaccctcccttgctgcaccagtggccattagctcccgtcaccactgcaacccagggtcccagctggctgggtcctcttctgcccccagtgcccttccccttgggctgtgttggagtgagcacctcctctgtaggcacctctcacactgttgtctgttactgattttttttgataaaaagataataaaacctggtactttct

SEQ ID NO: 18477 - DNA, 786 bp, Homo Sapiens
ccacgcgtccgctgctgtgcttagagttttgatccatcagtggagggaaattgagtgaaaatgatccacatgccaatctgggctggcatctcatcgcttagcccagcgtttgtctcacatcttgtgtgtaatgccagcaactaaatctccaagctcgattagcaatggttacagcccagtgagctcacatccagaaacccccttgaaatgatgtttcatcagggagaactttaaccacaaaacctgcttctgaaccaactgaggaagacacctcaggtactgtgactctaattctggggcagttgttgaataaaatatgccatgactttatggatttattttctctctaagttgcatgagtaaaatgagtcttgtgattttgtaaaacgtagctgtgaaagagacctgaaaatttgagacttgctgggaagagttctttatgcactcaggtgtggaggacaggtgcaggggaaatttgttgtgtgatgctccagtacccattcctgtcttctccctttctccctctaactatatcttgaacatctctcttttctatatgattttggtgtggagttgatctgtcacaaagttcaaggattagactgtaatggacctaagccaatttatatcttctttccctagctgcagttattagtttgggtttagtcaaatgtcccatttcaagacaatgaaagggatcccaagacctggctatgtgctgttggaactgacattttcttttccctggagcatttagggttagcatgtgtggcttgaaactggggc

SEQ ID NO: 18478 - DNA, 369 bp, Homo Sapiens
ccccttttgacgttgaagtccagatcctaaatagggaactcttgtcaaacctagaacaaacctcaacatatctcgatctagttctttgtattatagaagattggacaatttcgcctattgcgcaaaaatgaggctgattaaactaatttaccgcgattttagcaaaatattaccgctgacatgaattggacacttatggtataggtgccgggaaccccatttagtaattttctaataacctcaatattgtagcctacatgggaaataactcggaaaaggtccaatgatattgaaaagagaagtctgattatctctttccctgatcctcctattccttttggcgaattttgcgtcctgttaggctaccaa

SEQ ID NO: 18479 - DNA, 695 bp, Homo Sapiens
cacccacgcgtccgggtttaagtaaaatagcacttagtgaagcaaggtacacaaataatactcaatgaatggtaagcaatattgttatgatgcatttatttttacagcgttatgtgacctttttattctctactccaacattggcatgtttctgttattcttttcagtattattgaatttattccccgaaggagagcggctaagagtattgcccagccacaggctctcaaccaccaacccgagcctcagattctcctcacacagccacagctgtaccacatggcccacgtggtatggtgctaattcctctgacatctaattttcactttttggcaatatttggtctcatcaagctttacacataaatattttcagcaaagtgctccaaatgcctttttcagaaatctgaatccacatgaaaacaatggcaacaagaaaaaggtgtaaactttccagaacaggcccagaatttgaaaatgtgataaagaggttattgtgcgcccgaacttttcacacaagaattggaggagatttaacacatggaataataaacagaggaaggcgggctaatgcagagcagatgggcctgcagggcagtgctcagcatttcaacatctttcccctggacctttggacccaaggtgattgcatgctggtgtctttagctaaaaataaagttaatgtctttggggcat

SEQ ID NO: 18480 - DNA, 430 bp, Homo Sapiens
agcatttaacgtccgttgcctcccatgctgcctgaagataaagaccctgaaagcttacgaggaaatatttcagtaaaagcagttaaaaaagaagtagaaaagaaactccgatgtcttcttgctgatttaccgctgccccctgagctaccaggaggagatgatctttcaaagagtccagaggaaaagaaaacagcaacacagttacatagtaaaaggaggcctaagtatgtgcttgctttctacctgctcttaaattgaccagcagtgattctgggtcatcagaagttcataaaacactaaattaaggtttaaaataaaaaatgtacttattctttcaacttaaatatatgaattctattagagttttgaaaaaaatcataattgcttgcattcctattcacaatgactaataaaaccaaatttaattttc

SEQ ID NO: 18481 - DNA, 773 bp, Homo Sapiens
ccacgcgtccgggtctttctctaccagagcgggtagagaaagaccatcaggtgggggcagggttaggtgtgtctgagctctgagtctccttgtggggtcttgcagtggctgctggggggataggggtgtggttctcaggccaatggagttacgttcccagggggattatggttgcctttgtgcatcatgtaggttgccaggagagtgggggaaagttgttagttacaggcctcacctggcttctctgcagcctgaatgactgggctcactcccaccgtgcccctttgacagcactgagtttgtttccaggcagtgggtaagcagggctgagaacttgccccaggctaccagcctcctggtttagaaagcaagcagggctttcagattttgcacctccctgcctgctgcagtttctgtgctgtgtctgcactcccgattcaaccacccccgaccccaacttctgtccaggaaactttgcactcggttgaaattgttacaaagttcagctggaagtttccttctctctggtcatttcccagttcctctggcagccctccccaaggatccctgtgagacaaagtcagaaatggcatccctggagaatgaaagtgcccacagggctcttctcgctgctgcttctacccctgtatttcacttgactctctaaattcatctcagctccaggtaagggtcaatccttctcctgtgatctggggatctgggactttcaggtttcccaattagggtatatgtttgggggcagaatatccccc

SEQ ID NO: 18482 - DNA, 878 bp, Homo Sapiens
ttcttcatgtaccgctcctctcatttctaatttttgtatttcttaggtctcgggtctgacgccctcgatccacagatgcgcgattagcgccagatagtgactgacaagtcaatcgtaaccttgtgtgtctactaccttcgtctaaccgcagttgatttggtccttgcagggtaatgagtttttcatacacccaaaaagaattgtttcatcctttttcatacgattcaggaataagactgtccatgggctatcaagccgaagaggcggtaaaactccattggggtattcctgaagagtatttctccacgcttttttagatcgttttgtattccccagacgggtcatacgtcatgcgcgatcaaaaacgcgacgccatcatggccaaatgcctatcgtctcgtcaatttgttacagtttttgtatcgatgaaactttcttttgtcatttcaccgaaccacctcagcctaacgggcgatcatgacggttaccgtatcggcatgtttcagagtatcggcagaaatgatgtcactttaatgtcgatcgtatcgacaaatcgacaatccggctggaagaccggtcagcatagtcgcgattgaaaaacacgcagaactgacagacgagaggtttgccctctcgtccagtcacgcttacaacgcctttttcgaaaatcttcgagttacgctgatagttgtacagcgacgcccgcgccgacggcaggcgatccaccgtactcggcacaaacccacgctcgcggaaccagtgggcggtgcgggtcgtcagcacgaacaacgttttcaaaccctggggccgggcacgggtctcgatgcgtttccgcagttcatcaccgcgaccgccatgacggtactccggggtcactg

SEQ ID NO: 18483 - DNA, 797 bp, Homo Sapiens
ccccgtggtcagcctgcacagcgtgatcgagccgaacaagctcaagcagttcaatcagcagaacagcgcgaccttccagggcatcccggcgccgggggtcagcctgggtcaggcggtggcgtttttgcaggcgcacagccaacagctgccggccagcttcagccatgactggcaggccgattcgcgccagttcattcacgaaggcaatgcgttgatgctgacgttcctgtttgcgctgatcgtgatctatatggtgctggccgcgcagtatgaaagcctgaccgatccgctgatcatcctgatcacagtgccgctgtcgatctgcggcgcgttgatcccgctggccctgggtttggccacgatcaacatctacacgcagattggcttggtgacgttgatcggactgatcagcaaacacgggatcctgatggtcgagttcgccaacgagttacagctgctataccgctgcacaccggctcaggcgatcattcgcgcggcgcgaattcgtctacgcccgatcctgatgaccaccgccgcgatggtggttggcctggtgccgatgctgttctcgtccggcgccggcgccagcagtcgatttggcctggggcttgtgatcgttatcgggatgctggtgggcaccttgtttacgctgttcgtgttgccgtcggtctacaccctgctgtcacgagcgcataagccggtaattgattgggaggtgatagaaaaaacagccgcaggcttcaagcctcaagcttaaaagcaaacgggcgtcctgaggacgcccgtttcagtcagtg

SEQ ID NO: 18484 - DNA, 384 bp, Homo Sapiens
gagccgaatgactgctccgtgctctttcaaatgggggggcagggtaaaattttttcgcccttcatgattgagaaaattcttgtgtgaaacccgtttgtggcaaacctgtacatccccaattcaacaccccttttattcaccagcgggttcacaaagatggacgttcccaaaggtgctccacacagatagcgcacccgaatgagccatgtaacggacccttatattgtcgcgcttgtgaagggggaaggtgggggtgcggccacatatggcgcccccctagtgagcgccctaatggccggcccctcttactttctccctctcttttctgccattctcgtccgagttctccttggggggctttctagggggcgcgcatttgggggg

SEQ ID NO: 18485 - DNA, 719 bp, Homo Sapiens
ctcttaggtgttttcaacgctgatggattgccggcggctgtcgttctgcaccacacggtcatcaatcccacgggccaggctccaaagccgctcgccgaagcttccaaattcacgcaccagagccagcttgttccactctcgcagttgcaggcagtcttcgatccccagccgcgtcagcttgtcggccgttaccttgcccacgccatggagctttttcaccggcagcgccgagacaaagtcttccacctgatcgggggtgatcacaaacagtccgttgggctttttccagtcgctggcgatcttggcgagaaacttgttcggcgccacgcccgcagaaacggtgatatgcaattggttggagacccgccggcgaatgtcctgggcaatgcgcgtggcactgccgccgaaatgcgggctgtcagagacgtccaggtaggcttcgtccagggacaacggctcgatcaggtcggtgtagtcacgaaagatcgtctggatttccttggaggcttctttataggcatccatgcgcggcttgacgatggtcaggtccgggcacagcttcaaggcgtgccgggacgacatggccgaacgcacaccgtaagcccgtgcttcatagtttgcaagtagcgatcacgccgcgacggtctgccgaaacgccaaccgccagggcttttgcgccagggtcgggtcgtcgcgcatctcgatggcggcgtataagc

SEQ ID NO: 18486 - DNA, 568 bp, Homo Sapiens
cacccacgcgtccgaaatacatcttttgaaaacacggccacctacttggaacattccatagtgtgacatagagtaactctgtttaggattatttcgttgatccccagaggccaattgcccagtgctcagtcaaagcccaaggtggaagacaagtgcttccctgatgagctggcctctctgcagactgctccgtaccctgtgctgtcctgcctcagatgcagagagagcacaaggctcctgctctcctcgtcctcggtgcacctgtgttcgtgctaccatcacagctgaatgcaatgaaaggcggtcctctgagaggagcagggtggagatgctaaagtggaggccccgtcccattgctgatagatcctcatctggcatgcgctccaccctccccattctctgctcccacgtatcgtagccccatcacagaagatgcgacatggaaaaacgcactgtgtccaccctagttcttaaatttgggcagggatttggggtgtatgttaagagtttttcaaatttgccagattgtatgcctatgttgttaaatacacaatgaatccctggtatg

SEQ ID NO: 18487 - DNA, 487 bp, Homo Sapiens
  misc_feature (154)..(211): n is a, c, g, or t
agctttaaagaacctaacaagccctcacccatcgcccttggcaaatggtacgcaccctgaatggggaatggaaccccccctgtagtggcgcattcaccccggggggtgtggaggttagccacagcgtgaccgctagctttgtcagctttcttcnnnnnnnnnnnnnnnnnnnnnnnnnnnnnnnnnnnnnnnnnnnnnnnnnnnnnnnnnncttagcggttactattgggcgctttttaggattccgatttaatgctttacgattcctcggatggttaaaatttggttccggtgatggttcacatagtgggtcatccccttaatagagagtctttctccctttgacggtagacttgttgttcttagtaacggacccctgtcccatcctggaccattattttgacctatctcggactattcttatgacttataatggattatgccaatatctgactattgattaatttatgacctgatttaacaaaaa

SEQ ID NO: 18488 - DNA, 470 bp, Homo Sapiens
cacccaagcgtccgaggaatctcacctttcataaaatggtggcatggatgattgcacttcactctgcgattcacaccattgcacatctatttaatgtggaatggtgtgtgaatgcccgagtcaataattctgatccttattcagtagcactctctgaacttggagacaggcaaaatgaaagttatctcaattttgctcgaaagagaataaagaaccctgaaggaggcctgaaacaaaagactttgtatggacggcccaactgggataatgaattcaagacaattgcaagtcaacaccctaataccagaataggagttttcctctgtggacctgaagccttggctgaaaccctgagtaaacaaagcatctccaactctgagtctggccctcggggagtgcatttcattttcaacaaggaaaacttctaacttgtctcttccatgaggaaataaatgtgggttgtgctgccc

SEQ ID NO: 18489 - DNA, 436 bp, Homo Sapiens
ccaaaaaaagtgctggtggtcacgtcgctgttcaacaagagcaacgacctgaccggccgtggcgagatctgggcgctggtggacatggccatccagcggcatcccgtctggggcatcggctacagcgccttctgggtgggcgagggcggtccggcgcagttcatcgccgacaagctgggctggctgccggggcaggcgcacaacggctacatcgatatcctgctggacctgggccaggtcggcatggggctgttcctgggctgcctgctgtggcacgtggtcagcatcatgcggctgttcaagatcgaccgcgaggatgcggcgatgcacctggccatctgcgtgacgatcatggtcagtaatttctcggaaagccagatcctgcgcgacaccaatttccagaacatcatgttcatctattcgtcgctggcgatca

SEQ ID NO: 18490 - DNA, 476 bp, Homo Sapiens
ccacgcgtccgccgtgggtggggtagataatagttttgtctcgccgcacccacaatttattgtaggaataatgaatccccaaaacgactggtaatgtgattctggctgcctttatggtagacactgcgattctgggtatacacccggttggggcaactcagggttgtacttgctgggccttcttccttttccccctttaatttggtttgtctcctgtatggactccccatgcaagctgcctgaatttgggcctgtattcatcccattccctattgaggataggttgcctgctcaatcggaagatgaaactatgcactttaatctgtccattggctataaatattgtccagtatgggttgggatgtcttctggctgtttagcttattcttaccaggattggatgtggaccgtaccgtcctttacccatgattcttatcaactagataatgtgttcaataccgattcttttggagttc

SEQ ID NO: 18491 - DNA, 702 bp, Homo Sapiens
  misc_feature (143)..(152): n is a, c, g, or t
ccttcgcgtccgcgggagcagggaacctgagacagggccactgcgggatcggacaaagccccgctttggagaggctgagctggagccattggcctccccaggggctttccacccacactgcaccataaccgccacacccttcnnnnnnnnnnagggtacagagggtctctaagcacaggggtgttcagagcccgaacaagctttgatcaggtttccctgcttccgacctgtcctgcctcagtttccccatctgtgatgagcaggtgaccacgttaactctcagggctgtttgaagtctcttggttgtaggccctcgccactgagtggcccaggtgtgagaggtagtctagagccctctgcggcctttgtggaggtccgttttcagcatgtggcctggtgtggctccctaggcctgaggcctcccactctcagtgccccctgcccccttgggaacccacactccaccccagctaagcacaacactgtggaccaccaccaatggcacctgagccaccttgaccaccattagtgtccccaccctcattactctgccgtcgttgcctgtccccaccacatcatctccctccatggctcccaccatgacgctggcaggtgcaagcggagagcacgagggcagcaggcctgggccttccgtgtccctgcgtcatccccagcctcactcccacccgtgcaagcctggcc

SEQ ID NO: 18492 - DNA, 736 bp, Homo Sapiens
ttggcctggccgtcatcttcatttcgcacaagctggacgaggtcatggccgtgtcgcgccgcgtcgcggtgctgcgccagggcaagctggtggccgagcgcgagaccgccgccaccacgccggccgaactggccgagctgatggtgggccgcaaggtcgccatgccgcacgccgaagccatggcggcggccggccaggccgcgccggtggtgacgctgtcgcaggtcaccgtgcgcgacccgcgcggcggcgcgccgcgcctggacagcctggacctggtggtgcacaagcatgagatcgtggccatcgccggcgtcgccggcaacggccagcaggcgctggtgtcggtgctgaccggcctgcgccagcccgccgacggcaccatccgcctgggccccgaacacgccgccgcgcccaccacgccggccggctggaccgccgcccacgtgggccgcattcccgaggaccgccacggcgaaggcatgatcggcgacagcccgctgtgggaaaacgccatcgtcgaagacctgaaggacccgcgcttctcgcgcttcgggctgatccgcgccaaggccggccgcgcctatgcggcggcgctggccaagcatttcgacgtgcgcgccgcctcgctcgacgtgcgcacccgcagcctgtcgggcggcaacatgcaaaactgatcctgggccgcaccttgcgcgcgaaccgcgcttcctcgtcgccaaccagcccactgggg

SEQ ID NO: 18493 - DNA, 712 bp, Homo Sapiens
cccttgcagctctcgcaacacgcgggcgaccttgtcgtcaccggcatactggaacgaatccttgagcatcttggcgatttcgccgtcggtcaggccgtaggacggcttgacctggatgctggcttcaacgccggaggccagttcgcgagcggcaacgctgagcaagccgtcggcgtcaacctggaaggtcacgcgaatcttcgccgcaccggccaccatcgccggaattccgcgcaattcgaagcgcgccagggaacggcagtcgctgatcagttcacgctcaccttgcagcacatgaatcatcatggccgtctggccatctttgtacgtcgtgaagtcctgggcgcgggcaacggggatggtggtgttgcgtggaatcaccttctccatcaggccgcccatggtttccagccccagggacaacggaatcacgtcgagcagaagcagttcgccaccatcgcgcttgttaccggcgagggtgtcggcctggatcgcggcaccaatggccaccacttgatccgggtcgatttcagtcagcggctggcgaccgaaggcttcagctaccgcctcacgaacacgtggcacgcgggtcgaaccgcccaccatgaccacggcagccacgtcttccaactcgacaccggagtcacgtacggcgcggcggcaggctttcaaggctgcgggcgaccatcggctcgatcaaggaatcgaacgc

SEQ ID NO: 18494 - DNA, 211 bp, Homo Sapiens
cccgcatcgagcgcggcgcttttctggttgatcgcggcctccagggcccgcacccagtccgtgcggccggcgccctgttcgagcacgcggtagccgatcatcgccgcgaacagcaccatggcgtcggtgtcgtcgccctgcgcggcgggcgcctggccgatgaactgttcatacagcctgcccgcgcccgcggcgtaggcctgcgccacgg

SEQ ID NO: 18495 - DNA, 900 bp, Homo Sapiens
ggggggcggggcgggaagatacaaatcatctctcttctgtggtgccacctatattcatttcaggggcgtctctttataccatgtcgtggggggaaatgtcctggctttacaactgggaaacgccttgcatcaccccccttattccccttgtggcaaatcacaaattagccccgtgcggatttcgctacaaaagctgtgcgcatcctgaatggcaaaggtgacccgtcctgaagcgccaattgaacccgccggggtggtgtgtttaaacggcgcgggacgtgttggtttggcgcacctgacggcccgttttttaattctctccctcctttccgccgggtgcgtatagcgatcatatgaggtctttgcgcgtccgatcctaagaatttaggatagtgagacggctcaagctgtgtcacgtcgcatgtatagatgttgttctctctcgtcggatgagagctcttgcttctagagcgtatgtttgtactactgtgaaaaacactccagctccacgggtatcattgcttagtactaaatgtatctgtccatttcgttctttattggatatgcagagctctgcctaacagattatgagtcgacattttaacatatttcacgccttatattaaaggtgtattttcgcggaagtgggcggcactctctttgttttatttccaaacctttaagtgatggtgtctcataaatacaaaaccgtaatatgctacaaataagcgggggcgcgttgtgttttgaaattggcagatgcgctatttcccttctccggccccgccccccggaggcgtcatcaacaatcgttttattaaacagatcaacatgtggggagacagtggatatcctgagtgtcacctggttgaatatactcgagtattttccccccagaaa

SEQ ID NO: 18496 - DNA, 402 bp, Homo Sapiens
actgaaacacactccaccctatctcggtctatcttttgattataagggattcgccgattcggctatgttaaaaatgagctgattacaaaaattaacgcgcgatttaccaaatatacgctaccaattaggtgccactcccgggatgtgcccgaaccccatttgttattttctaaaacattcatagtgtacgcccatgaacaaaacctgattaatgctcaatatatgaaaaggagaggtagagtatcaactttcgtgtccctaattctcttttcgcgcattggctttcttgttttgcacccaaaagcttggggaatgaaaagtctgaaaatcattggtgcccgaatggttactcccactgaactccacgcgttaaaatctggagattccccggaaaagcgttcc

SEQ ID NO: 18497 - DNA, 331 bp, Homo Sapiens
tattaaagggggcgcgctaacaacaaaactcggtgtaagtggccgaatattgggacaggcgcgccgtttcccaatttttgcgctgggaaacacttcgcctttcccactgatgcgcattagcaaaagtgccccttctatcgcgggataaaaaagagaagagccggaagggataacgctacttgctgtggccgggccatagggcggaggggtggggcggtaactcgccacgtaaccgtcacgtggctagggctcaggccccggggactgtactttgtgcttttcctttaggcccggtcttggggtttccctcttagttctaaaacggggtgcc

SEQ ID NO: 18498 - DNA, 234 bp, Homo Sapiens
  misc_feature (171)..(186): n is a, c, g, or t
aaaagggaaaaaatgggaaaaaccctggggtaccccaatttaatccctttgccataaccccccttttccccaatgggggaaaaacgaaaaaggcccctctcaatcccctttccaaaaatttggggagctggaggggggaaggggaccccccctgaaggggccatttaggcnnnnnnnnnnnnnnnntaaccccaaactggacccttacctttgcccgcccctaatggcccgttc

SEQ ID NO: 18499 - DNA, 338 bp, Homo Sapiens
  misc_feature (93)..(101): n is a, c, g, or t
  misc_feature (179)..(216): n is a, c, g, or t
ggggggggtaataaaggggaccaaagtttatttcccggggcggaaaggtccaaggtttttaaaaggggacccaaatttaattttcgggggaannnnnnnnnaaggccgggatggggaaaacctgggggttaaaaaatttaacggctttggaaaaaatccccttttccccacggggcgtnnnnnnnnnnnnnnnnnnnnnnnnnnnnnnnnnnnnnntttgcccacccctaagggaaaaagggaaccgccctgaaggggcccctaaagcggggggggtgtggtggttcgccccagggggaccccaaaatttgggagggccccaaccgccccccctttgc

SEQ ID NO: 18500 - DNA, 899 bp, Homo Sapiens
ccacgcgtccgctcatctcttctggagccccttcccacaggcaaggggattcagagggagcatgttggcctggccgccttcaggcttccagagtcccaagtgactttccttgatgtccttctctccatcctctgcacagaggcagccttccctcctcttatccctgccatggggtttgggagggggagcctcaaactctgacagggaggagtcggagtccccagctaaaattctctgggtctagaaacaggtgtaaagcgattctggggatgtgatttgggagaaaagcacactttccacacagaggcggtcaggaaaggagcggggaggggagagtggggcacaggcagcgcctcccgtctatgcgcctgtgtgcaaagtggcacaatgccccccttcctattggcagtgcagcccctggccagcaaccactcgcacctgggctgggggcctttgtgtagggcacacctgtgcagccacacctacttgtagagcctcatagactcagctgtggacaaaagcctcacgccccaaacagggaaatgggatctcaaggggaagaagctggggaggcctcacaccctgcccccatttcctcctatgtgggggaggggagcagcacgaactcctgaagacttgggagcgtcagcagcttctgcggaaggggtggggctgagggtggagagaggaagggaaggaagaaaaggggagccttcctggccagggtaaccggcactaagaggcctcactccaagcccccgaggagcctgtggtggggctggagacccgggctcagcccctccaccacccttaaagtcctcagaaggtgggaactgaactgggcacaggctgggaaaccggctgtgcgctgggcacttggattttgccagctgccctgt

SEQ ID NO: 18501 - DNA, 286 bp, Homo Sapiens
  misc_feature (201)..(230): n is a, c, g, or t
tattccttcgtgtctgccaaataaatttaattggccttcgttttatttagcctggatggggaaaaacttgttgttccccaacttattccccttgtttgaaatccccttttttttcgcggggtgaaaaacaaaaaagccggcccccatcgcccttccttacaaatgccccccctgaagggcgaatggaaggggccccccctnnnnnnnnnnnnnnnnnnnnnnnnnnnnnntggtcccacggggacggacacctttgcttgcccccaacctcccgccccttcctttt

SEQ ID NO: 18502 - DNA, 270 bp, Homo Sapiens
  misc_feature (147)..(204): n is a, c, g, or t
ccacgcgtccgaaataaaaagtttcaaaaatctatctgaatttggaattcttctggtttgttctttcatgtttaaaaatgatagccaaaatgtaaaaatggctgtaatatttaaaacttataacatcttattgttggtaatagtgcnnnnnnnnnnnnnnnnnnnnnnnnnnnnnnnnnnnnnnnnnnnnnnnnnnnnnnnnnnggtatattatttaaggaatatctcttgatatagaatttttatattaaaaatgatttttctttgctt

SEQ ID NO: 18503 - DNA, 322 bp, Homo Sapiens
cttaaaagatgtcggaggccttggcgccgtagcccttcatgtcggagcccggcgtcaggctgcgcttccacgagaagatcacgtcatcggcggtgaacggcgagccgtcgtggaacttcacgcccttgcgcagcttgaagacccacttggtgggctcggggttttcccagctctcggccagcagcggcgtcagtttcaggttgccgtcgtagccggccagcgtttcgtagatgttgccctggaaacccagcgtgaaggtttcgttcaacgccatcgggtccatcgatgtggcgtcgccttgataagaccagtggaaggtctt

SEQ ID NO: 18504 - DNA, 767 bp, Homo Sapiens
  misc_feature (613)..(626): n is a, c, g, or t
ggggggccgcttggggggatcttcaaaggacttcgcgtgcaggcaacttcataggtcttctaaaggggttaaaaaattcattcaacttgccttccttttccctttttttaacggggaaaaccggggaaatccccgctttaatcccctttaaccacatccccctttcccgcctggtggaaagggcgagaagggccgcagagatcgcccttcctcgcctttcccattttgaatggcgaagaggaggcacttggaagcgccctattacgcgcgcttgtcgcggtggttagtgctgttttgacccctacgtttgccttcccttgcaagccccctatttgcggtcctttcttttttttccccttatgtcgccgggtttccccggcttctctaattgagggggatcgctgtggcgcccttatagtgtgctatttgggggtaagtgtggcactcgtgtgcaaacccggtttatcaccctttgacgtcggagtccattttcttaataggtgaacctctatctttgtaatttatggaattttgcggaatttgtccgcaatttcccaaattttaagcttatatttgtgtggtttttgcgggatgtgggagaacgccattagcnnnnnnnnnnnnnncaaaaatttcacttcttgccccccgccgacaaagtctaaatatgtggaaaagaagaaagggaaattaaattttcccgccctcttttccctttttcccattttggcgcgaggggggccgcccaaaaacccggtaaaccggag

SEQ ID NO: 18505 - DNA, 848 bp, Homo Sapiens
  misc_feature (69)..(203): n is a, c, g, or t
  misc_feature (277)..(305): n is a, c, g, or t
gctgttaagctttgttaaccaagaccgcatctctacaaaaaattgaaaagtagctgggcacagctgatnnnnnnnnnnnnnnnnnnnnnnnnnnnnnnnnnnnnnnnnnnnnnnnnnnnnnnnnnnnnnnnnnnnnnnnnnnnnnnnnnnnnnnnnnnnnnnnnnnnnnnnnnnnnnnnnnnnnnnnnnnnnnnnnnnnnnnnaacaaatgaaagcagtggttttcaacatcaactaaggatcttattagaaatgaagactgcaagccgcacacctnnnnnnnnnnnnnnnnnnnnnnnnnnnnnacaattccctggtccccagataagtaattcttaagtattctatcttaagtagacctaaagccgtattttgaccctgtactagtatgttattttagtataatcattactgaattcatcatacttttacagtaaacagtacttactttgagtaataacacattacacttaatagtagtgaactgcatcctcgatatcaaaagcgacttttgatgtagttcactctggacccgtacaggaacaccagccttgcagattctccacgcaatggaaactggctataaccctacctagatctgaaaagtgaagggggatcaacctaaaatatgtagctttgtaaacagttttatatcctgcatcttagggggaaaatcagttgacgcagattgaaaacaagttgttccataagtttattatgaaaaacagtagccctcctaccctgcctttaccccactttccttgcctcacagtagtctgtccaactcttgggctgatttgtttgtatttacctccatgtctcaatatgaacatgttttcatgactatt

SEQ ID NO: 18506 - DNA, 731 bp, Homo Sapiens
tgggccgcagcggtttgcatcgccagctcgcgcaaggccatgaggttggtctgggtgaagaacgcatcgatggcggcacgggcctgttccggcacgtagaccttgccgtcacgcagacgctccagcaattcgcgcgatggcaggtcgatcagcagcagctcatcggcttcctgcaagacccagtcaggcaaggtctcgcgcacttgcacgccggtgatgccgcgcacctggtcgttgaggctttccagatgctggacgttgactgtggtgaatacgttgatgccggcagagagcaattcctgaatgtcttgccagcgcttttcgtggcggctgccgggggcgttgctgtgggccagttcgtccaccagcaccagtttgggcttggcggcgagcaggccgtcgaggtccatttcctccagcatcacaccgcggtattcggagcgcagcagcggctgttgtggcaggccgctgagcaaggcttcggtctcggcgcggccgtgggtttccaccacgccggcgatcagccgcacgccctggcgcagctgggtgtgagcggcctggagcatggcgtaggtcttgcccacgccgggcgcggcgccgaggaagactttgagccggccacggccgtcccggggtagatcggctaacagggcatcggcgcggccggagtcgctcatgcgggcggtcttccttcaggtgttgatgtggtgatagtgatgccgtcatcgcgg

SEQ ID NO: 18507 - DNA, 270 bp, Homo Sapiens
ccacgcgtccgatctttgaaggttttggttgtttacctaatctagttgtacttttcttaaacagaggaaagttatctttgattagaaataagcaaaactaatctatggtggaaatttagaatgcacacacctataataatttcaatattaagtaaaactacttctctgggtgtcaaaacatacacatatctatacataatggatgaaactgacatcagccaacagagtgcagaatggatgcatttggggccaaacagcttgagtttcaac

SEQ ID NO: 18508 - DNA, 332 bp, Homo Sapiens
  misc_feature (268)..(285): n is a, c, g, or t
ggggggcccccccaagagaaaaaaaatttaaataccgtttggggaaaagtaaaaaccctttaatggggcccccaaaatttatttccggggcccttttttaaaaacgccaggaggggaaaaccccggggtttaccaattttatcccctttgcaaaaatcccccttttccccagtgggggaaaaaacaaaaagggcccccccgagcccctttcccaaattttgcccaccctaaagggaaaaggggaccccccttaaagcgcctcattaannnnnnnnnnnnnnnnnnttaccccaaggggggcccttaattttcgcagcgcccaaggccccctc

SEQ ID NO: 18509 - DNA, 389 bp, Homo Sapiens
ccttttactgttcgacctggcgcaggccgctgaagacgcggtcgatctcctggtacagccgcatgccgcgcgcggtcagggccagcttgccgcgcacgcggtcgaacagcgtcagcccggtgtcggtctccaggtgcgccagcagcttgctgacggcgggctgcgacacgcccagcgcgatggccgcctggctgacggtgccgtgttccaccaccgccttgaaggcctcgacctgccgcaggttcagggtttctttcatgccataaccaaaaagggcggcaaccggtttgccagtcgcgaaggttatagcgcggccggacacgatgcaaggacgcccggccatggcgcatgactacgacgtgatcgtggcgggcgccggcatggtcggc

SEQ ID NO: 18510 - DNA, 337 bp, Homo Sapiens
taataataataattacgtttttaaaaaggaagaaagaaattgatacagagagacacttgataattcttacgcttcataatatttaacaacatccgttgggtcttctccaagattgtggtcaaaataacatgtattcagccatctggtgagtagagctttttggcattgccttcttattaagttgactagcgttggttttgtatgttgctatgtgtctacggttttcttgatcatactggaaagactaggacagagatggactttgcggacggaaaattctgtcaccctaccccgtacatggtgattacaggatggccttacggagctaaatacccta

SEQ ID NO: 18511 - DNA, 813 bp, Homo Sapiens
cccacctggtggcagaccgaaaccggcggcatcatgctcagcccgctggtcagcgcacaacggatcaagcccggttgcgccacccaacccatgtttggcgtggtgcccgtactgctggatgagcaaggcaaggaaatcagcggcgccggcagcggcgtgctggcgattaaatccagttggccggggcagattcgcagcgtgtacggcgacccgcaacggatgatcgacacctatttcaaaccctatccgggctactacttcaccggcgacggcgcccggcgagacgaggacggcgactactggatcaccgggcgtatcgatgatgtgatcaacgtgtccgggcaccgtatcggcaccgccgaggtggaaagcgccctggtgttgcatgatcaggtcgccgaagccgccgtggtgggctatccccacgacgtcaaaggccagggcatctatgccttcgtcacgcccatgaatggcgtcgagcccgacgaggcgctgaaaaaacacctgctggatctggtgagcaaggaaatcggcagtttcgccaagcccgagctgattcaatgggcaccggccttgccgaaaacccgctcaggcaagatcatgcggcggattttgcgcaagattgcctgcaacgaactgggacagcctgggggatacttccaccctggccgacccgagcgtggtagatggcctgatcgacaagcgcctcaaccgataggaacccatggaattcattcgcagccgcatcgaaaaccagctgatgagcctgaccggcttgtcgctgggtcaactcgacctggaaacccccaaagg

SEQ ID NO: 18512 - DNA, 437 bp, Homo Sapiens
ccatacgtccgcagggaccttcagggcccgcagaccctcccggcgccttgagacccgaggcgcccctaccggcccccctccccggttagcgggcggttgtaaggtctccggcgggcgctgcctgccttcctcccagagggtgtttcctagaaactgataaatcagatcgtgcctctttacccttggctttcgaagcaaattgatgttcacgtctgacgtgggcgcgggctgcgcagggcggcgccagaccccagccgcctcccaggggctagactgagcccggcacaaggggtgtgaaatagaatttattgtggctctgattatgtacacgtgagatggcctggctgggccggccgggctcacatggtttgtacaataaatacatctgtggggcgggctctccgcagccgggaagggccaccgccacggttcagtcc

SEQ ID NO: 18513 - DNA, 294 bp, Homo Sapiens
ccaaatcccgctggcgccattgctggtggggctgaccttgaagctgtcacccgccgccatcggccctttgccatccagcgccagggtgaaaccgtcaatcaccggcggcggcgtggtggtggtatcgaacgagcccatggccttgccatcggaacgcaccacgttgtactggttgccgctggtaaacgtgaccttgtagtcgtaggtggtcagcttgctgctgtcggcaatcgacacattcaggttgccggagccggcgctgttacccgcggtcccctgactacgctgggagat

SEQ ID NO: 18514 - DNA, 499 bp, Homo Sapiens
ggattccggctaatggtttaaaattgagctgattaaccaaattttaccgcggatttaacaaatatacgctaacatttaggtggactttccgggaatggtccgccgaacccttattgtattttctaaatactccattagtatcgtcatgaacataccttgatatgcttccatatatggaaagagagagtagaaattctacattcccgtgcgccttatctttttggcaaattggctctcgtttttgctacccaaaaccgtgggaaaaaagaggtcgagaactgttggggccgatgggttacctcaacttgatccccacccggaaatctgtagagttcggcccggaaactttcctatgaataacctttgagttccgtaatggccggttataacccttagaccccgggggggaaaactggggtcgctttactctttcttaatagggtggtggtaattttctcccccttccccaaaaaccccttttctaaaaggtggtgaccat

SEQ ID NO: 18515 - DNA, 848 bp, Homo Sapiens
cccttagcggttgccgcccatggcaaacacctcaatacacgcctgcttggtcgcaaagtcccccaggtcaaaaccttcgctgcgcgccacatcggcgaccgcgcgcatcatgatggtggtggagatcggcagctcgacaaacagcgccgcaaaaccgaaggctccgccgatcgcgcccgaggtcgctgcgaaggccttgtgcagccgggtcgaggctggctttttcgggctgttctccaggctcttcagcgccgcgccggcggaggagtgcagcgccgccgccacggcgccattgatcctttttgaaaccacccccggcaaagccttcaccgcactttcaatgggggagccgatcatgccggacagcctggcagtcagggagggtgactcgagcaagccgacggcccgcttgagatcctggtagtcctcggggttgtctctgatgctcacaggcgtctccatgaagtttttccggttctcataaaacaaagacccgcaagaaaggccatcgtgccgtcacgctttacccattctttacctgtgcgtgtgctgcgttcgccagcgggtcggttacgctgccattcatcttgaactgaatgacggtatgcatcgaatgagccttcaaccgcggtactggctggcggtgggcgccctggtgggcagcctgggattgatcgcagggtgtgcgggcgatccgccaaacccgcgagccgctttcagcgagcgggtcgataaggaaattgagtaccgcttatcaaccgtcccactagacacgggccggctgggacgcgaccctgtcaaagtcgattagcaatcgggtgaaatgtggcgtgggttggcgcccggtg

SEQ ID NO: 18516 - DNA, 754 bp, Homo Sapiens
ccacgcgtccgctggaaatgactgtaaacagaaacaaagctaagccatggtaaatagaacattaaatgcccaacctaatttattttgctaagagaaactgatgaactaaaagagaaacaactattgtctacattttagatatgggggaaaaaaccctgagattactaattatgtatcaccatcctcttaatgtagatcctgaaaatgatggtatcaatataatacatacagtggattcaccttttaaactggatctattacctttgatatttgtcttacactgaaaaattctgacatcttcaggaaaccaatatgatggataagctaaatgttgacttaaaatagttaaaccccttaataacatcctttagtttctattatttcactgcttaagttcagcatctgaataacaaaggtaacataagtagtacttaagatcccaaaggcccattacattctatcaataaagacaaaacaaaactacatgtttactgaaaatagtctttttttctttgctttccagttttacacttttgttgaacacaaaaaagtggacaagatcaaataactagatggtaaaacactgattttttaaaaatcacatctttaaacccgtgagaatcacaattcaaagtatggccactgggggcaacctgtaaacctacaaccttttcttaacactgacactatgtgactgatttttcttaaaacacaaatgccattaagaaagtatttttttgttgacacattctgc

SEQ ID NO: 18517 - DNA, 953 bp, Homo Sapiens
cccctgcacgaagaccgaatcgccaatggccgtcagcacgccatcggcgtacacctcgcacaccacgcggctcttgcggcccacgtcaccttcgactttcgcgcgcaaggtcagcggtacgcccatcggtgtcggcttgatgaatttgatccccaggttgccggtcacgcagtcgatacgcggcaggctgccgggttcgcgttgctcggcccggtagtggtaggccatggcggtccagttcgagtgacagtccaccagcatcgcgatcaagccgccgtagaccaggtctggccagccgcagtattgggcgtcgggctggtgctcggcgatcacgtggatgccgtcggcgtcccagcggctcttgatgtgcagcccgtgggggttgcggctgccgcagccataacagacgccttcgggggcggtggtgtcttgcagggaaagcgcgggcatcgtggctccttgttgtttgagttccgtcgaggcacgagcctaatgccaggcacgtgaataaatccagcacctacgctgttagcagtgcacagcgtgttcattcccggttgagaatcccatgaaacctcgattgctagcggccttccttaccctcggcaccttgtccagcgcgtatgcggtggaatacaccgacgtgaatccggcggccagcaccctcagcttcacctatgaccagatgggccagcaggtgtacggcacgttttggcagctattcggcgaccctgaatttcgacacgcaaaacccggccgccgccagcaccgtactgaccatccaactgccgagcatcaatgccggcagcgacgacgccaacaccgaactgcccagcccggctgggttcgacatgaccacttacccggggggcacctttacctcgacccacatcaccgacctggggggcaaccgctacttgttcacggccacctgaccctcaaggccaaacccg

SEQ ID NO: 18518 - DNA, 587 bp, Homo Sapiens
  misc_feature (276)..(290): n is a, c, g, or t
  misc_feature (310)..(323): n is a, c, g, or t
ccccaaaacgtccgattttgcttttgtattttagttaaaataatccatggggatgtgtagcccccccgtgtgaggatgacatcaccacatttctagtttcatggagctcaagatgtcttgtgtctgtgtggctagatggcctctgcttggtaatcttatttttaggcctaaaattcccacttaaatccaaagtaaaaatggttatactgaagcataaaccttgcctgtgtaattttaaaaaattaatagagctgtgcaaaccctgttatttttgtnnnnnnnnnnnnnnntacatatctatatataatannnnnnnnnnnnnnacatatgcacacgtctctgtgtatgtgaagtaggggaggccctgggggatgacctcccagcctttatgatgcttttctctatgctgctggacttcattcttactggtccacgcagatgcaggcggcctgaggccagtgctgtaccaagtagaagacggttcctaaggacagagtttgtctgttttctaacaaagaaaaattctacaaaggagaggttgggcgttacaaaggcattgtgaatctaataaaaggaaagtgtcgctt

SEQ ID NO: 18519 - DNA, 890 bp, Homo Sapiens
catgtgaaccccaccacacccaagcgcatcgcgaccatgccggatgcgggcggcgcgcgccaagtgtcgtacctggcggaaaactgccgggatttcgggattgagctgttggatatcctcgacaagcgccaaggcattgagcacgtgatcgccccggagcagggctttatcctgccgggcatggtgatcgccgccggcgacagccacaccaccacctacggtgccttgggcgcattcggctttggcatcggcacctcggaaatcgagcatttgctggcctcgcaaaccctggtctacaaacgcctgaaaagcctgcgcgtgaccgtggacggcgaactggcccacggcctgacctccaaggacgtgatcatggcgctgatcggcaagatcggcgcttcgggtgccaccggctacgccattgagttttgcggttcgaccattgatgccctgagcgtcgaggcgcggatgaccatctgcaacatggcggtggaagcgggcgcccgtggtgcgttcatggcgccggacgaaaaagtcttcgcctacctcaagggcaaaccccgcgcgccgaacggcgagttgtgggagcgcgccctcgtgggttggcgccaactgcactcggatgccgacgccgtgttcgacctcgaagtgcaactggacgccaccgccctggagcccatggtcacctggggcaccagcccccgaccaggccgcgcccatcggcgcccgcgtaccggacccgcaagacgtcagcgaccctgatcctgcgcccaggacatgcgccgcgccctgaaactacatgggccttgaagccggcatgcccctgagcgagatcgtcatcaaccatgcgtttatcgggctcctgcaccaacgcccgcatcgaagacctgcgg

SEQ ID NO: 18520 - DNA, 772 bp, Homo Sapiens
  misc_feature (530)..(597): n is a, c, g, or t
ccacgcgtccgccacatcctgctcatgtccctgacccaacactgcgttttgggaatataaagcctgtattgcatagacctcacaatcatatttattatctgcatggtacaatatggagccatgtctcacgccataaagttcctggttctggtttcatggccagcatcttctgccattttaattttaaaaacagggtaattcctcatttctaagaacaaactagtcatttttccacccacttaattatgtagagttagtgctaaaagaaaataatatttatgaagtttcctgggcttcctttttatccaaaagatacaatcgactttgaagcctgggtcatgcatactaccaatgagagggacaggtggtccatgccctccccgggggttgtggagggcctgctgatatagaagatgtggcccatgtttattttgctttgtatgtatataatggtttattgcaccatcaatatcacatggaaaggtatattcttgagccccacccaagcctacccagtcagcatccctagnnnnnnnnnnnnnnnnnnnnnnnnnnnnnnnnnnnnnnnnnnnnnnnnnnnnnnnnnnnnnnnnnnnnctggtctgcactaagtagtaaaaataaaagtccacaatcttgcctgtgaactcactgtgttaatccaagtccctggacttcattcctcacttctttagacccaagtcttctgttttcttcctttaccagactgttgtctggcttagcatatccagtatatcccagcagatgttac

SEQ ID NO: 18521 - DNA, 822 bp, Homo Sapiens
cccccacgcgtccgggttcctgagctcagcctcaggggaggggcaggagtgcagtggggtctttgccagcctcccactcccagggaggtgggcctgagcctggaaacccaggaggaggtgtgagaacttagcttgctgttctcaggctgggagcacagaggtctggaggaggcacgcctgcccctgcacttgtcaccccgggaggcctgcggggcccaggaggggagccagtggtccctgcctgtccttcacagtgtccctgacccagcgtgcctcacactggcagggtcagcaaaggtctggctgcagtcaggtcctctgttcctcgcgctggcggggtcagcagacgtctggccgcagtgaggtccactgttctctgcagggctgtgggctgcatactggccgagctgctggcgcacaggcctcttctccccggcacttccgagatccaccagatcgacttgatcgtgcagctgctgggcacgcccagtgagaacatctggccggtgggcgtcctgggcagatgcccacgccctctgcgcctcagctcctgcctcccatagggcttttccaagctgccactggtcggccagtacagcctccggaagcagccctacaacaacctgaagcacaagttcccatggctgtcggaggccgggctgcgcctgctgcacttccctgttcatgtacgaccctaaaaaagggcgacggccggggactgccttggagagctcctatttcacgagaagcccttaccctgtgagccggagctcatgcccgacctttccccaccacgcacaagcgggcccgcctcagccacct

SEQ ID NO: 18522 - DNA, 580 bp, Homo Sapiens
  misc_feature (219)..(243): n is a, c, g, or t
ccccaaagcgtccgcttatggacaaaattaatacattctatgacatttttttctgatttgtcctgcagtgctcattcatcactccaaaaacagcaggccatctttttatgcaaaagtcagcgtgacaatatacttcactggtgtacatcgtttactttttaactggcttcattttaggaataataaattcatcagaatccttggctgaattaaaatggnnnnnnnnnnnnnnnnnnnnnnnnnacccagacaactctagaaatgcggaccaaactacttcattttctcaaagggcataccttgtgcattgtggcttatgatgagccatattaattgcctgttaaatatacactagcttgaacttagatgttaaatgttattattaccagcatttgtccttttgtgaaatcagtatcaaaatacttgcactctttaacacattctttataaaatgtataaattattcagaactatttaaaataaagaggagtgttattgcatgctgataatcattttgagtttgcctcagtagatactaaagcaaattgtttcagtttttttaaatgccctttgatgtttc

SEQ ID NO: 18523 - DNA, 829 bp, Homo Sapiens
gggggcgcgcccctaaagaattcttctttattgtcccgtgaatggaagtccttggcttttttttaaggtcccccaaattatattatctgggggtttttttaaaattacgtgatggggaaaactctcccctttcccccatttattgtactttgcgaaaaatccccttttctcggcctggcgaaatatcaaaaaagccgcactgggataaccgctctccaccatgtgcccacctttaaaggcaataggagcgcgcccctgtaccgacccataacagccgcgcgtgtgaggtgttaaaccgcccgctggacctcctattcttcccttcctctcacggccgctcctcttgctttctctgtcttccttttacgcaaggtctcccgttatttctcctaagtattgaattaaggggtcttctctacaatcttcgtgatggatgagtgtttccctcattgagcttgcacccgaataacgattattcgacttggatactagagtcgacaatcctctaaccgatgctcgtctctcattagaacacaacgaatctcactgagttcttccttttgaattatagggatggttcgactcagctcaagggtataaaacgctgatataacatatttctagcgattttacgagtatccgctacgatctgcgttgctcttttgtaaatgcgtgcgactctattgttttgttgcctaaccatgaaattggtcccgtcatggaaaaaaccatgatatagttcactatatgtatacagggaggactatattccatttctgcgtcgtgctttagtattttgggccatttgcatctgatatgtcaaccccaa

SEQ ID NO: 18524 - DNA, 410 bp, Homo Sapiens
ctttaaaaagcgcgtggacaggtcgtgccaggtgtggctggccccagcgcgcagggccaggccgcgccactgggcgccgccgtataggcccaggtggtagttgtcgctcgatcccgatgattgccggtctttgacattgaagccggtgcggctgtagccggccaccgcgcccagtcgccagtgctgcgataccggggcgtcggcgccggcgagaaagccgccggtcgagcggttcagccgcgcggcgttggtgttgccgcgggtctgggcccaggcgcctaaggcctggttccacagcgccgcgcgctcggcgccggccgccagcgcgcgcggctggccgttttcgtaagccacgcctggggcggcgccttatccgccgccatcgaatgcggcgcggacgcggtcgttga

SEQ ID NO: 18525 - DNA, 758 bp, Homo Sapiens
ccgtagggcagcaggtcgtagctgccggattcttcacaggtctcgacgatgccgacgcagcgcgggcgcgggatgccctgcttgtccagcgccatgatggcggtgagcgaggcatacacggcatagccgtcgtcggcgccgccgcggccgtagagcttgccgtcctcgtacttcggggtccaggggccgaggccggcgcgccagcccgagaattcaggctgcttgtccaggtggccgtacagcagcacggtgtcgccgttgtcgctgcgggtggcgggcgcgtcgaagaagatcaccggcgtgcggcccggcaggcgcaccacttccagcttcaggcccgagaccttctgggcttcgacccactgcgccgcgtcacgcaccacgcgctcgatgaacgcgttcttttcccagtcggcatcgaacgccgggctcttggccgggatggcgatgtagtcggtcagcgcggggatgatctcgttgtcccacttgtcgtccacaaaagcctgcagagccttcggatcgagggtaggaggaagtgcgtcgtcggggatgcgtgcgttcatggcgcgggatcctgtggtcggatggcagaagaatccgccattttatgcctgccgggcgcgctcggcatcttttgtccctgtttcctgcccggccaccggaaaacggtgccgggctggcgcgccgcccccgccttccccctagcgcgccgcgtaggcctccgatccgggctcacaccctggcgcgccagcggcttg

SEQ ID NO: 18526 - DNA, 918 bp, Homo Sapiens
cacactgcgttctgctcttgcagcgcctgttgaacggcagccagcggcaagccgagggtggcgagcttgaggttggacagctcgatccagatcttctcgtcctgcaaacccagcagttcgaccttgccgacatccggcacccgttgcagctgaatctggatacggtcggcgtagtccttgagcacggcatagtcgaagccgtcgccggtcagggcgtagatattgccaaaagtggtgccgaattcatcgttgaaaaacgggccctggatatccggtggcaaggtctggcgaatatcgctgatcttcttgcgcacctggtaccagaggtccgggatctgcgcggaatgcatcgagtcacgggccatgaaggtgacctgggattcgccggggcgggagaaggaaacgatgcgctcgtagtcgccggtctccatcagtttcttttcaatacgctcggtgacctggcgtgacacttcctgggcggtcgcccccggccaattggtcttgattaccatggccttgaaggtaaacggcgggtcttcgctttgtcccagtttggtgtaagacaaggtgccgaccactgccagcaggatcatcaggaacagtacgatctggcgattacgcaacgcccattcggaaagattgaaacccatcggggactactccttggccgccagacttaccactcggttggagcgatccaccgggcgcacttgctggccctcatggagtacatgcacaccggcagcgatcacccagtcgggtagggttcaggcctttccagcaccggcacggtcttctcgccaaagggcaccgatgcgcaccgggtgtgcgcttgagggtgttgtcgggttgtaccacccagacgtaggacgccccgttctccgcgctgagggcagacagcggcaccgccagggggaa

SEQ ID NO: 18527 - DNA, 799 bp, Homo Sapiens
gggggggcccccctgaaggatcaaagctatctcttctatgctggcaactaaattccttttcttggggggccctttaattcatttctgggggggaagttttaggcgttcgggacggggaaaaccttgggtttacccacctttttccccttgggggaaataccctttaggcccgctgggataaaacttaaaaggcccggcgcgatcgcccctggcaaatagtagccgccctgtaagggcgaatgagacgcggccggtgggggggctatacgcgcggggagcgtgagggttgccagcaccgtgaccccgcatctgtcggtttctcaccgtctgttccttccgttcgttgcgcttctttctcaagctttaaacgggtttctccgtaaggtctcaaattgggcgctcttgagctcgaatctaatgctttagggagggtgagcgttcaaaattgattagcgtgatggttacacgattgtgcgctcttccagataggagtgctttccctattgaggaggatgcacgattctgaaaggaactctggttacaacgggaaacattagatctatacgggattttcgtttgatgtcaagggatatagcaggattctggcttactgataataacgacactgattacaaaaatatggcgactattaaggagtatttcgctgaatgggggggacttctgggaatagtgcgagacctattagttatattctaaagaacaaaatgtagcgctgtggagaaaaagcaaatgagagctctgattattaaatggcaggtctcgtatctacttttggggc

SEQ ID NO: 18528 - DNA, 424 bp, Homo Sapiens
cccccaaacgtccggaggctgcgcagtggtccgggacaactggcacgagcacatctccatgccgctgcagacagatctgagaaagttccggtcctataaggggacatcagtgcgagacctgctccgtgctgtgaggaacaagaagcaccactacagggagctcccagttgaggtgcgacaggcactcggccaagtccctgatggcttcgtccagtacttcacaaaccgcttcccacggctgctcctccacacgcaccgagccatgaggagctgcgcctctgagagcctcttcctgccctactacccgccagactcagaggccaggaggccatgccctggggccacagggaggtgaggtgggctggatgccacacagatggtctccgtgctggctcactgaagagctgagcctgtggctggcctc

SEQ ID NO: 18529 - DNA, 651 bp, Homo Sapiens
taaaggcttccttaaaaagagaggggagggtaaaatctcttgtatagtgtcacttaaattccttgagggggacccccctttttcaggccgggggtgggaaaaaccagggggtaacccattttactcgcctgggaatacatcccctgttcggggactgggacactacctaaaaggccgcaaacaatctcccttcagtggggttgccccgctggatgggcgatagggccgcgccttgaggggtaccattacccgcgccgagttgggtgattatgcccgaaagggttccctacttttgccagctccctatcactcgtgcctttccttttctgccttttctgtctggcttatggcgcgtgtctttcccaatagagtgctataggggcgcttcgcccccataagagtgggttgggggtgtgtgtaagtgtgtggcgccttcgccatgagagaacggtctctcccctttgaggttgagctcctgttattaataggagaatctctgattcgagaggaaagaaagcacaactggagatgtgtctatagtttgaattgagagggagatagagcaattccggcatattagttaaagatttatttgtattaacagtatattgcaacgccgttttagagaattttctcgcgtattattttagg

SEQ ID NO: 18530 - DNA, 204 bp, Homo Sapiens
ccatcttcggcaaccgcttcggcggcgccgaggcctacggcgcccaactcatgcgcgtgctgggcgagcgccacgacgtttccgtggtggcgcgcgacttcgacagcgacctgccgtttcccttcctgcccgtgcgctttcccggctggctgcccagctggatgcgggtgctgtatttcgcctggaaggccgatcgcctgacgc

SEQ ID NO: 18531 - DNA, 867 bp, Homo Sapiens
ttcgtcggcggcctgttgcatctgttggcagaggtcggagatttcgtcgaggtcggcttttttcaggagcaacacggctttttctgccagcaaaccttccagggcgacccgtgcatcgcgaatctcgcgcagccgttcgaccgtcatcatgcggacccgcagacgagaagtttcggtgacttcaaaggcgttttcggcgctgaggcgctggagggcttcgcgcaccggcatggggctggagccgagggcttcggcgaggccgcggatggtgagtttctggccgggctggaaacgaccactcatcaaggcttcgcggatctggcgatagacctggtcttgcaaggtatcgcgggacacctggcgcaaggtgggaaggagaagcgggccatctgtcatgagtcaaaacctgtgttgtcgttcttatggctccaatatgtgatcacaaatcaaatatgtcaaatagtttcccgttgacggtatcgacgacgctgactctaatgagccctttctccagcaaggaccgctgaaccatgaaatttgcctacaccatcgtctacgtcccggacgtcgctgcatccctgcaattcttcgaaaaagccttcggcttcagtcgccgtttcctgcatgaatcggggacctatggcgagttggataccggtgataccaccctctcttttgcagcgcatgagttgggcgagatgaacttcaagggtgggcatgtggaggcgcatgcttcacgccagccgctggggatggagttgggattcgtaactgaggatgtgccaaagggccacgccagagcgctggccgagggtgcgacagaactctcggagccgagcaccaagccttggggtcagtggtgtctta

SEQ ID NO: 18532 - DNA, 708 bp, Homo Sapiens
ccgaattggtgggccgctacctgatcagcaagcgcgctggtgaataccgcgtgctggacgacaacttcggcaccgaagactacggcgtcggcgtgcgcaaggacgacaccgaactgctggccaagctcgacaagaccctggactcgatgaagcaggacggcaccgccggccgcatcgccacccagtggttcggcgccaacatcgtcaagtaagctcccgggaaacgcccggaccgcggcgcggtccgggcgtttttcagtccggcgcttttccgcgccggcacgcccgctcctgattcctcccgtcggcaagacgctcacccatccgcatggactacgtactctccctcctgggacccctggcgcaaggcgcgaaagtgaccttgacgctgttcttcatcacgctggcgctggccgtgccgctgggcctggtgctggcgttgctgcggatctccaaatggggcttcgtcagccagctggtcaatggctacatctggctgatgcgcggcacgccgctgatgctgcagatgctgttcatctacttcgcgctgccgttcgtgccggtggtgggggtgcgcctgcccgactttccggcggcggtggtggcgttcgcgctgaactacgcggcgtatttcgccgagatcttcccgcgccggcatccagtcggtcgatcgcggccagtacgaaggcatcaaggtgctgggcatga

SEQ ID NO: 18533 - DNA, 396 bp, Homo Sapiens
tggagctgatgtaccatatgttaacgcgaattaacgagatattatcgctaaatattagtgcactttcggggaaatgtggcggggaactttagttgtcattttcgaaaggtgccatatgcatccctctgagcaaaaccttgaatatgctccataaattgaaaaaggaagtaggaaaagtcactatcttgtgcccttagtcccctttggcgctttttgctgcctgtctgcttccccaaaccgcggtgtgaagatagagagtttgaaatcgtggggtgcgaggggttacatccgagtgaaatctaaggctgaagatcttagaggttcagccggaaaaacgtttacatggtgaacgatttaaggctcgtctagggtgcgccgttataaccctatgaaacc

SEQ ID NO: 18534 - DNA, 644 bp, Homo Sapiens
ccttgctcaaaagtaccgggaggccggcgaccaccgcttcgatcagcaccatgccggccgcctcgttgtacgcggggtggatcaacaggtccgcgcccagcagaaagcgcgggatatcgctgcgccccttgaagaactgcacctgatcgcccaggcccagcgcagcactctgcatttggaatactttggggtcgtcctggccgattacaaataaccgggtgcgtttcttcaggttcgacggcaacgcggccacggccttgaggctgcgatcgacgcctttggtcttgaagcccgagccgatctgcaccagcagcaaatcatcttcggccaggccgaattcgcgacgaaattcatcgcggacctccgcagcgttgggcggcgcgcggcggtcgcgggcgatacccggcggcaacaagtgaaaacgctcggcctgggtcccgtaatactgggtgaacagctgctgctggtgctcggacagcaccatgatctgcgtcttggcgtgcttgtcgaacaccgcgcgctcgtattctgcaaagtgcttgtaccgaccgaaccagcggtacatcgggttgcgcagggtttgtgccttgtctttctaaaccctgtcggcggagaaagacaagtccagcccccggcattttggt

SEQ ID NO: 18535 - DNA, 823 bp, Homo Sapiens
ccctcacggcaaaggaagtcggcgtggaaagcagcctgctgtcgccggcggaggtgatcaacctgatcagcgaggaaggctacagcgtcaagctcgcctgactttctgatagttagcgagctaacttaatgttcaaggcacccatgcccggctagactgtcgggctgccgactcacctgggtgcctgatgaaccttcgtataattctgattttgggggccttgagcgcgtttgcgccgttggccatcgacttctacctgccgggttttccggccatggccgtggcattcggtaccgacgaaaaacacattcagctgaccttggccgtgtacttcacgggcctggcaatcggccagttgatctatgggccgctggcggaccgctttggccgacgcgggccgctgctcagcggtgtcaccctgtttaccctggcgtcgttcgcgtgtgcgtacgcgccttccctggagtggctgatcggcgcgcgtttcgtccaggccttgggcggttgcgcaggcatggtgatctcccgggcggtggtcagcgataaatgcgacgcggtgggctcggccaaggtgttttcccaattgatgctggtcaccgggctggccccgatcctcgcgccgttggcgggcggggtgatggtcggtatctggggctggcagtcgatattcctggcgctgacggcattcagcgtgatggcggccatcgcggtagcggtcgggctgccggaaaagtttcccggcccatcaaccgcgccagccgctttcgggcgcgtgcgccagtacggtcggttgctgtcggaccggtgtactgggctatgcctt

SEQ ID NO: 18536 - DNA, 786 bp, Homo Sapiens
ggatccaactaaattcaattcggtgggcgacgttttaccctcttcttgaggggcaaaaacctggaatttaacgggctttatttttccgcgtttatacgggataagccggggggaaacatacttaatacgccttgaaccatctcccctctcaccaatttggcaaaatgagaagaagatcggtagggattaggcgccacgtggacgctccccttgacaggcgccgagtggcggtgtctttcgctttttgacctttctttttgccgacgtcttacggcgtgccccgttcagttcttctgcttggattcccgttaggtgtgcgagtttctgcgttacggctccaaaagcgagaaactttgaggacgctgatggttcgcttatcgggccttcgccctgaaaaacgtgtataagggcatggatgatggaggtggccgtcctactggagaccggtgttcaaccgtgtacttgatctcacgtatcttagtctgtctattggttccaacgtggataagccgaacacgctccggcttatcattgagatgtataggagtatgcggatgcgggctattgggaaaaatcgctgagaataactggatcttctcgagtattgttagtgttaacctcatttgtttaggtggctctttgcgtggatatgcgcgagtacccagattatatccttgtgtaatgtctacaatatgtaaccgaggagaagacaatactcagaaatcgcggacacatatgacaaatatgaacgaagatactctaacgtctggcgacccatatgccctt

SEQ ID NO: 18537 - DNA, 266 bp, Homo Sapiens
ccacgcgtccgcgcaagaccatgccgaagtccgtcgtgggcctgcatgcagccagtaaagatcccagagaagttcgagaagctagagatcataaggaaccaaaagaggagatcaacaaaaacatttctgactttggacgacagcagcttttaccccccttcccatcccttcatcagtcgctacctcagaaccagtgctacatggccaccacaaaatcacagacagcttgcttgccttttgttttagcagctgcagtatctcggaag

SEQ ID NO: 18538 - DNA, 774 bp, Homo Sapiens
ctttaaagggctcaccattataagaacactgcctatgacccttccccattgacctggctggcccctcggtggcgccggcgcaggttatccgcaagcactacgccatggagatggcggtcgagcgcacgcgcctgctttaccagggctccctgctgcctaccttattaatgctggtgaacggactggtctgcgcctggttactctggagcccgcagcgttacctgctggacagcatttggctggtgtggctgctgacgctggtggccctgcgggtgattcaggtggcggcgttcgattcggccatgccgagtcgtcaggcgctgccgatctggcgccgcatgttcatgctgggctcggccgtcagcggcctgacgctggcgagcgctgccatcgccctggtgccggtggacagcttcgcgcaacaggcctgggtgttcggcttgctcggcgcggcgaccttgtccgcgagtgtggcctacgctgtcagtctgcctgcgtttctgtcgtttgccttgccctgtctggtgccggccatcctctatttattctggaccggcgacccgcagcagcagggttggggctttttgggcctgattctgctggcctccctgagcctggtggcgtggcaggtcaaccgcctgatccagcgcgggctgctcaggcgcttccagaaccaggcgttgatcgagcacctgcaacaagcgcagcagcgcagcgagcagtttgaatcacgaactggtgcgtgaagtggagcagcgacgccaggtcgagcaa

SEQ ID NO: 18539 - DNA, 909 bp, Homo Sapiens
cctggacctgaacctggaagacttcgtacagaaggtcaactcggacctggtgggcaaagtcgtcaacatcgccagccgttgcgccgggtttatccacaagggcaacgccggtgtgctggtggcggaaaacgccgcgccggagctgaccgacgcgttcctggccgctgccccgagcatcgccgacgcctatgaagcccgcgactttgcccgcgccatgcgcgagatcatgggcctggccgaccgtgccaacgcctggatcgccgacaaggcgccgtggtcgctgaacaagcaggaaggcaagcaagctgaagtccaggcaatctgcgccacaggcgtcaacctgttccgccagttggtgatcttcctcaagccggtactgccactgctggcagccgacgccgaggcattcctcaacgtgccgccactgacctggaacgaccacacgaccttgctcagcaaccatcagttgaatgagttcaagccgctgatgacccgtatcgatccggtaaaagtccaggccatgaccgatgcttcgaaagaagacctcgaggccagcaagactgacaccggcgatgcagcacctgcgggcaatggcgagctggcgaaagatccgctgtcgccagaaatcgacttcgacgccttcgctgcggtggacctgcgggtggccctgatcatcaaggccgaagccgtggaaggcgctgacaagctgctgcgcctgactctggacatcggtgacgagcaacgcaacgtgttctccgggatcaagagtgcctatccggatccgttcaaactcgatggtcgcctgaccatgatgatcgccaacctcaagccacggaaaatgaagtttcggtatctcccaaggcatggtgatgggcggccggccctggcggtgaggagatctacctggtt

SEQ ID NO: 18540 - DNA, 287 bp, Homo Sapiens
  misc_feature (195)..(207): n is a, c, g, or t
tccataaaaagtccgcaaaattctaaccactcgatgtcaaacttaaaatagaggcaaagaagatgtcagattttctgtaaataagtcatttaacaaagttggcaaaataatcccaacacagtattatatcctaattacatttgctataattataaagatatacagtaaataattgattttaaagaagtactcccnnnnnnnnnnnnnctgatacttttatattaaagtttaaggagagtcagatattctggaatttgttaaataagaattgttaaaatgtttcttgt

SEQ ID NO: 18541 - DNA, 401 bp, Homo Sapiens
tcaagaaagctgcgcgccctggccgtggccagcgccgcgcgcgcgccggcgattccggacgtgccgaccttccccgaggccggcgtgcccgactttctgatcacgccctggttcggcgtgatggcgccggccggcaccccggccccggtgctggacacgctgcacgacgccttcgcccaggcgctgcaggcgcccgaggtggcggccaagatgcgcgaactgggcgtcgagaccgccgccggctcgttcgccgacctgggccgcttcgtcaccaccgaaacggccaagtggaaacaggtctttgagaccaacctcatcaaggtcgaatgatggccgctgcctctgacgactgcccggcgctggcgcctatccgcctgcgcgacatgggcgcgttccacgtt

SEQ ID NO: 18542 - DNA, 404 bp, Homo Sapiens
  misc_feature (68)..(174): n is a, c, g, or t
aaggggtttttcgctctttgacgtaggagtccacgttcttaatagtagactctgtgttcgtacctgannnnnnnnnnnnnnnnnnnnnnnnnnnnnnnnnnnnnnnnnnnnnnnnnnnnnnnnnnnnnnnnnnnnnnnnnnnnnnnnnnnnnnnnnnnnnnnnnnnnnnnnnnngtgaaccaattattacgcctacattttaatgtgccacttctcggggagtgtgcgcgcgagctctaattgttatatttctcatacatctcaatatgattccgctcagaaacattaacctgattaagcgtacatatatggaaaatggagagttagattattaaatttctggtcgccgtatttccttattgccggcattgctctctgttttcgcccacaaaaacgctgggaaa

SEQ ID NO: 18543 - DNA, 520 bp, Homo Sapiens
ccttgaaaagccgaggggaaacactgatgccagcggcaagcccccgacaatcggttgcagcacatcgatgccgcagctgaccttcggaaagaactggatgtacacgtgatagccggcggcagcgacacccccgagggcgctgagtgtcaccagtgcttcaaacaccgtgacgctgcgggaggtgcgcatggcggcaccgatgaaggcgaagatcgcgatcagcagcaaggcataacgttgcaggatgcacagcgggcacggcgcctcgcccagcaccacctgcatgtacagcgccccgccgatcagcgccaggcaaataatgcccagcagtaccagaaagcgtcgctccctgcccaaacgcaattcgtcgatcatccccgtttccctttagccaatgttggttgtgccaatggccgcaagtttacacgtggacggtgaaagttgagctgttggcgtgaggaggtttaaacaggaggcattaacaggagattaatcagggaaaatggagatcaaaatgtgg

SEQ ID NO: 18544 - DNA, 767 bp, Homo Sapiens
agactaaaaaagtccgatttttcctttaaaaaattataatacagccctgctccttgtaaattatttctctgaagcgtcctcccagaggacaagtgtactttctcaataatgttatgattcttaatgacgattggcatgaaccgtacttgaagcatttgttgtattgtccacttcttgatgtgcagagaaactttgagtcattttggacattaggtgattgatgaattgtgtggtttcagttgcgttttgtttttaactttatagctggaaggggagggtaatgtttatatggaaatgttgcaaatttttaaaatattttaaaatttctaactgctaacacatattctgatcaagccagaagtttatgtgatttaatatatctgtgtagtttaactagaaacgtatatatgtagtttgggccatttttatttctgtaactaaattgtggggcaaaaaatatgatttgccaatgtaaaaattttttcctttaagttactaaccaagaagctaggtaagataagaaatgaccaaacaaaaataatgataagaaggacagctattatatgataaactttagacttgaaaattaggtaataaagttaatttcttcagaatatcctaaaatgtaagtttgtaaattgataaagttcagaaaaacttatccatctttctactcatcaagatagcaaagtaagtttttcacaaattaagactgagagttacgtattttttttgaagtggtaatcttgctctcatctatttttaaa

SEQ ID NO: 18545 - DNA, 505 bp, Homo Sapiens
ggataaaacgtccgccccagtcctcactgtcctgttttcttagccactgagggatctgagtaggtctgggatggacaggaaagggcaaagtagggcgtgtggtttccctgcccctgtccggaccgccgatcccaggtgcgtgtgtctctgtctctcctagcccctctctcacacatcacattcccatggtggcctcaagaaaggcccggaagcgccaggctggagataacagcctcttgcccgtcggccctggggtaccatgtggccacaactgctgtggccccctgtccccaagacacttccccttgtctccctggttgcctctcttgccccttgtcctgaagcccagcgacacagaagggggtggggcgggtctatggggagaaagggagcgaggtcagaggagggcatgggttggcagggtgggcgtttggggccctctatgctggcttttcaccccagaggacacaggcagcttccaaaatatatttatcttcttcacggg

SEQ ID NO: 18546 - DNA, 204 bp, Homo Sapiens
ctgatcgccctgatcggggtgttcctgctgatcggcatcgtcaagaagaatgccctcatgatggtggacttcgcgctcgaggccgagcgcaatcagggcatggcgcccaaggaagccatcttccaggcctgcctgaagcgcttccggccgatcatgatgacgaccatggctgccatctttggcgcgctgccgctggtggtggcc

SEQ ID NO: 18547 - DNA, 615 bp, Homo Sapiens
gagtctaaatcaaagataaacatcaaaatccggctggaagcccctccccaccattttggaggcgcaaaacaggcgttgtactgatcatgctcattgcgatcggtgccttttacggggtgcgggaacatttcacccacgtttatccgtatttgccctacctcatcctgttgatctgtccattgatgcatttttttggacatggacatggcggacatgaccatggcgatcaggcaggaaccaacaaggaagagaaatagctatgcccactccaccgagccaccacgatcacggtcccgcccacgctgcctcacccaatgacgggggtctacgcgacccggtgtgcggtatggcggttatacctccaagtaaatttggcgagtcttaccaaggacagaggtatcaattttgtagccagaaatgccaagagaaatttcgggcagatccaaaacgctacattggtaatcatcccagcgctgaacccagcagcgccgctatagaggccacgctacatgtagccactgagtttacctgtcctatgcacccggtaataaagacagtcagggcccggcaattgccctaaatgtggcatgacattagagcccgtcatgcccgcgc

SEQ ID NO: 18548 - DNA, 778 bp, Homo Sapiens
ccatcaatcacgctgccagtgataaacccgttctccatcgccagtacgtacccggcagccacttcttcggcctgccccactcgccccaccggcaatgccccgcccgccttggcaaacattgccagtcgctgctcctcggataagcccgaatacgcctcggtatcgatcaccccaggactcaccacattgaccctgcgtggcgccagttccttggccagttgcttgcccagcgcttcagtggccgcattgatcccggtcttgatgaattgccctgcaaccgttttgcgccccaactgtcccgacgtcagggtgatgctgccgtgctcggcgagaaagggcagcgccgactggatcgcccgcagcgaaccccagagttttacgttgaagttgtcttgcgccaggttcaggtccgtctcgatcaatgccttcgcctgtaccgcagggcctgcggtatagaccagatgatcaaacggccccaccgtttcgaacaaccgctgcaacgaggccgcgtcggtcacgtctacctgctcgctgcgcacaccgttctccacggttgaagacaagcgtcgcccggccagcaccacgtgggcgccgcgtgccacggcctgcttggccacggcggcaccaatgccgctgctaccgccgatgacgatgatggttttgccgctgaggggagaaatcatgaagaactacctggttgagaaaatgagctttcatcttcccagcttggcaatcgttgaaaaatcccggtaaaacgacaagatctttaaaggatttt

SEQ ID NO: 18549 - DNA, 618 bp, Homo Sapiens
  misc_feature (359)..(432): n is a, c, g, or t
cacccacgcgtccgcaggtatttatagcagtgcaaaaacaacctaatacagactgcttgggactgggctggcttttttggcctgctgccagcgatgggccacaggtgggagactcactgagttaagggcattagaacttggtgggtcctgctattgcctgctatgctgtggagctcaggctgcacctctttttaccatgtgggctctttgatgtggtagaggcgcctctgtccctccccagaatgttgccctggaggcccgctgatcaccgttggggccagtgcttgtctcagctgttggagagcctgaatatgtgcttgcctgacccagctccacccagctttccttcctcaatctgnnnnnnnnnnnnnnnnnnnnnnnnnnnnnnnnnnnnnnnnnnnnnnnnnnnnnnnnnnnnnnnnnnnnnnnnnngcctcctcgttaacaaaagccaagcataaatcctgttgccaccactgcagctgcctctttcctgcaagtaccacttcctggccaggagatgaacttgcgtagcccatctgctgagacaagtgcacaattgcacagtgctacggcaggagacaagctttccatgacctcagttaccatcatccctca

SEQ ID NO: 18550 - DNA, 302 bp, Homo Sapiens
ggggggccgtgcaaaaagatcaaagctttcttcctcggggttgcaacgttttggctcttggcattgttaccaaaaattcaatgacggggccatctttgtccttaccctagatagggaaaacgcgggacttcccccatttaatggctgtgcaacaaatcaccatgtccgcagctggcgtactaccaaaaaggtccccaccattaacgcttacagggattcgcccagcatgaatggatatgtggacgccgcgtggaggggcacattaagcgtggcggggttgcttgtaaccccctgagtgcccg

SEQ ID NO: 18551 - DNA, 440 bp, Homo Sapiens
ccgccggatcatggtgctgcagtcgtggcgacgattctcggtgatgccgggctgaaaaagcagtgggccgaggaagttgaagcgatgcgcgcgcggattgcgcagctgcgttccgggctggtggaggcgttggcgccccatgggttgtcggagcggtttgcgcatatcgcggcgcaacgcgggatgttttcctataccggcttgagtgcggaacaggtgaagcaactgcgggagcagcacagcgtgtatatggtcagttccgggcgtgcgaacgtggcggggattgatgcgacgcggttgacgctgttggccgaagctatcgcggatgtttcccacatctgactgaagaaaccggctccaaatgtgggagttatgcgcgatagcttcggcctacagcgtcaaccgcgtcgcataaatccccgccacgttcgcgcgcccgg

SEQ ID NO: 18552 - DNA, 271 bp, Homo Sapiens
ggtggttaaaaatggctgctctggggactggagggagctgggaggatgagacaccatcctgcaaatcaggcctggatgaaatggggctgcagggctttctgacaggcacatctgacctcattctgcccctgctcacacagcctctgtggctccctattgccatcaggggagagtcccagctcccctgctccactggattgagtagtgtctggcaagaattcatgtctgagaattcatattcatattctgagaattcatattctgagaattc

SEQ ID NO: 18553 - DNA, 444 bp, Homo Sapiens
  misc_feature (287)..(336): n is a, c, g, or t
ctcctctcctaccccccccggcccttctccctgcctgcgcgcccttcagtaggtgaaaaccaggttggagatgctggactcgagccagtctcccgaaatcatctcgctcacctcgggcgtgcagtaatccgggaactcgaagtgcaagccggagccgggctcgaagttaaaatccaggtcccggtcgagcgccgacaacaaactgaagctgcccagggacatgctctcaaagtttgagctggggttcaggtcgagcaggtcgtcttcaaactcgtcgtcggaggacnnnnnnnnnnnnnnnnnnnnnnnnnnnnnnnnnnnnnnnnnnnnnnnnnncgcgtgcgagggcgcgctggacggggcgggcgaggcggcgcgcaggctggcgtagccgcggtggtcggcgggcgagcggccggcggcgggggacaaggcggcgctgct

SEQ ID NO: 18554 - DNA, 301 bp, Homo Sapiens
  misc_feature (143)..(205): n is a, c, g, or t
  misc_feature (247)..(261): n is a, c, g, or t
gcttaagttcccgtggaatgcaaatttaaactttttttatatgggaccaaaattttatttccggggccccttttttaaaactccgggaggggaaaaaccctggtttacccaaatttaacccctttgcacaaaccccccttttnnnnnnnnnnnnnnnnnnnnnnnnnnnnnnnnnnnnnnnnnnnnnnnnnnnnnnnnnnnnnnnaaaggggaaagggaacccccccggaagggccccttaaacgcnnnnnnnnnnnnnnnttaacgacacggggaccccaaaattgggccgggccaaaac

SEQ ID NO: 18555 - DNA, 677 bp, Homo Sapiens
ccctgttcccgcactactcatggcgcgttggaggcgattgagtgctgcctggtgctggcggagtgtatttccaatgcgctgcgtggggattcgaaagcgcaggtactaaaggttgactatctggacttgagcgaacccaaagttgtggacattgctgatgggcactacctcgataaggcgcgcagcgacatcgttggttctggttacgcggtggcttcgcttgaagctgcgctatggtgtttttatcacaccaacagctttgccgaggccgtgctggctgcggcaaacctgggggatgacgccgacactactgcggcgatcgtgggtcagttggctggtgcgtattacggcgtgcagggcattccaatcgagtggttgggcaaggtgtggcagcgtgaagaaattcaggagactgccgatgcgttgtttcaggcggcacaaggccaggctgctgcgctctaggtatccgtcagcccttcaactccgccaactgtttccactcaatcgaaaacctcgccaggtatttgcgtagtcagtcggcatcgtttggttgcgccttggcttgtcgggaaacaccgaacaggcgtcgtccgggcatcggaaatgctgtcggactggaggcatgtttcgatcacggcgttgagttgcactggtcgaacagggtccagttcggtatc

SEQ ID NO: 18556 - DNA, 365 bp, Homo Sapiens
cactgaatcacactcagactaatctcggctaatctttagatttataagaaattgggcgattcgtgctatggtgtagaaattgagctgattacccaattttaaggaaatttacccaaatagtcaacgctaccatttagtgaactttttcggaaatgtggcgtgacgctatttgttgattctgaatactccaatatgtgtcgctcatgaacaatacccgtaaaatgctcatatatatgaaaacgaagaaatggatatccaaatttacggtacccatattcttttatcggactgtgccctctaggtttggctcccgagatcgctggttaagtaataatgctgaattccttggggtaccaaatgggtta

SEQ ID NO: 18557 - DNA, 200 bp, Homo Sapiens
attctggtgggcctgaacaaactggcgatcaacaaacttagcctgcccgagtcgttccaggtgccggtggagattctcagcaagcacatttcgctgatcctgcgggaacagcccgtggtcaacgacctgctcgaacgcatcgccgccgtgccgctggccgatcatctggacgacctgaccaaccagctcaaccaggacca

SEQ ID NO: 18558 - DNA, 469 bp, Homo Sapiens
gaaaacaggggcggcccccttaaagagaggggcggtgtaaaaccgtgggcgttgcacaattttactctctttatagtgggcacaatttcgttttccgggggccttatttataaagccgcggattgtgaataccccgggggtttccaaatttaaaacaggaagaggagtcgcacgattctctcttctatttttttcccgcgccgatggtgagatggcgcgcccctgttactgccaatatatccgcgccgggtggggtgtatccccagcttgttcctatacattggcgggcggttagcgggcgtatcttttcattttctgctcttctgttcccccaatcgcccgattttaccgttaaggttataagaggggggctccatttagggtcgtattgtttgatttagggactccccccaaaaatggattttcgtccagtttgcttgagggcccctcccatggagacgttttttcc

SEQ ID NO: 18559 - DNA, 728 bp, Homo Sapiens
ccccacgggccggagagcgaggccgcgctggattggctggccccgccctggttcttcgcggtgcagggcaaccacgaggactatgcggtgcgtcacgtgcgcaccgggcaggtggacgtggtgaactggcgcggctacggcggcggctggttcctggacctgccggccgaccgccagcaggtctacgccgaggccttcgggcaactgcccatcgcgatcgaggtggaaacctcggcgggcccggtggggctgctgcacgcggactgcccggtgctgttctggccgcgcctggaatcggcgctgcaggaccgctacaagcgcaccagcgcggcctgccagtggtcgcgcgagcggctgcggcaactggaccgcaccggcgtgcgcggcgtgcgcgccgtggtggcgggccacacgcccgtggccgcgccgctggcgctgggcaacgtctatcacatcgataccgagggctggaaggacggctacttcaccttcctcgacctggaaacgctgcaggcctggccgcgcgcggtggtgaccgagccggatacggaagcggtccgctgacgcgggcccgcgcgcgctcgatccggccgcgcctaccagcggtaggtcgcggtcgccagcaccgtgcgctgatcgccatagcggcaggcgcccgcgctgcaattgctgagataggtcttgttgccgagggttgcgcacgttcagcgcccaggttccagccctgt

SEQ ID NO: 18560 - DNA, 533 bp, Homo Sapiens
ccccaaatccggatgggccagcaacagactcagcaggcgcttgcccagcgacggcatggtgcggcgtccttcgaagccgccgacgtcatcgcgcttgcccttccagttgcccttgccgcctttccagtcgcccttgcccttccagtcgctcttgcccttccaatcgcccttgcctttccagtcctgcttgccggcgccgccattccagccaccgcccgattcgccgccctgcgacgaaaactggccatagtcggcatactcgccatcgtccgcgggaatgtcgtggaaatcgtggccggcgaagtcgtagccgccatcgtgcggggcgccgtcgtgcggcgcctccgtaccggaggcggccacgatgcccgcctcaccggcgttcggcttggcgggcgcgccgaacggcttggcgggctgctgcgccagcacctgtgccatttcctcgggcgtcagctgcaccttcttggccatctcgcgttcgatctgcacgcgcagcgcgcattccggaatcgacgccagcagcggcttgg

SEQ ID NO: 18561 - DNA, 593 bp, Homo Sapiens
  misc_feature (228)..(240): n is a, c, g, or t
cacccacgcgtccggatacagtaaggtgtaattacagaatttacgaaatgtaaatgacctctacagagttttatggaatacctggtactaacgtaggcagctgcaaaaccacactgagttacagctgtcagccctcctcattcctaaataacttgccttacatatcagccctcccacttctgaagttcaaattagtgcctcggaaatgtagaatttattatttgtcannnnnnnnnnnnnagcatagattgagaacagttgaactcttaaatcctcagatgccaggggtctgctctagcatcagtaagtatttagcagaaactaactccgtaatgaatggaattcaattccacacatggtttgttcaagcacacttaataagtagcctattttttaaatgtctttttaaaatgtaaatatttggatgaagtttttctttgttttgatatattcatttgctacaccaactatgttttcagaattcatcttttgaacaacttggtttcagaatatgtaaaatgactttaaggatcttgtgtatcaaacctatccccggatgtgtgagaataatgtgttcataaagcatggatctc

SEQ ID NO: 18562 - DNA, 276 bp, Homo Sapiens
ccaagcttgccagtcgtgcttcggcgcgtcatacccgaccctcgcgccgagcagcgtgtaggccgccgcgtagtaggaattggcatagtccactgccacccgcgatgagtgctcgccattgaggctggtgtagaaaccgctgggatggctgtagcgcaattgcgcctggtagtagtgcttggggatgccgggcaaggtgttgtcgccgaagcggtcgtcgttgcggtagtggaagtcgccgtaggtgtagccctggcgcagggctaattggccggt

SEQ ID NO: 18563 - DNA, 440 bp, Homo Sapiens
ggggggcccctaaattgggtgcgcgggccgtagttttcaacgttattgagggggaaaaccctggcgttacccctcttattggccttgcaaattatctccctgggcgcggctggttaaaaagcgaagagggcagaaacgatgcgctttcccaaaaattgcccttcctgaatagtccctgtgtggtgccttcacacattgtgaccgctacacttggaaagggctaccccccgctcctttgccttattcccgcggtgtggggcgtattcacaagcgtgaccctacaagtgcgaaagcgggggctcccctcatgtttccgatttattgctttattgcccccccaggtggagatatttgctgagggtgatggtagagggagggcgcctttgggcgtgaaaacttgttttttgcattgcactaggagtaaacgatcttatgaggga

SEQ ID NO: 18564 - DNA, 460 bp, Homo Sapiens
cgtgtcccgcgtcctcaacggttccgacgacgacgcgcgcgccgccgccgcgccggacacggtcaagcgggtccgggcgctggccgccgaactgcaatatcggaccaacccccacgcggccagcctcaagacgcgccgcagccgcaccatcggggtgctggtgccgcgcctgtccgacatggtgctggccaccatctacgaaggcgtggacgaggccgccgccgagcacggctacctgaccttcgtctccaacacccaggacgagcccgacaagcagcgcaagctgatcgacatggcgctggcgcggcgcgtggacggcctgatcctgggcgacgcccacagccacgacggcgcggcgcccaatccgctgctggccgagctggcgcagcgcgacgtgccgttcgtgctggtcagccgccacgccgacgaccactgcgccgtgacctgcgacgacatcgag

SEQ ID NO: 18565 - DNA, 545 bp, Homo Sapiens
ccacgcgtccggagtttgaattgtgtaacatctttgatcagtgggtgtatctgtaatgaaggaggttcaagaggctgtgctttccaagtgatagtctataggagtgtttaatttcttgcagctccatctggttgctgcatttgaagcatggcattaatttgtatttgccctgttctttgacctaaagttgaagggtttagagtttttaacctgatctgtagagcagagaggttgaaagcacttaactcttgtttagtatcctcattgccttgctgcctgggtatctggcccctttccataaacatttcttttcagttcatgtagtttcaaaatatattactttcctggattctcttcttcactagtgactaaatactgggaacctattttctcaatcttcctccatgttgtgttctttgtattcttgagatgataatatattatgtatttgaattcctgaaaaatggaaaatgtttaagatatatgtatataaagtgtatgctgtattggtgcaataatggtaattaaaaatatgaaaaaagtga

SEQ ID NO: 18566 - DNA, 634 bp, Homo Sapiens
cctcgcgtccgcggacgcgtgggcggacgcgtgggcgaccatggctgctggactcttggaggagcagtggcctggcctggcctggctgcctgagggggctggagctcaaggggcggcagaaggaccccaccccgagatgtcccaggtgtcactgagctgtgcaggcctccccggcagcaggtggcggttgggtctgtctgaagcacatggcccgcgcccgcgtgttatttctgcctctgctggtgccatccccccaccccattcccctcgcttgcctgcgtcctgtgccagtgcacacacccatctcctggccacactctccagcctgttcaccttcctgagtgaacccaagagcccgagtggccccagggggaggggtgtttggagctgggagcacgggagtggggaggtgaggatggggctagaccccagccccgggctctgaccacctgcccttgcctgcaggattgtcccagcctccagccaccacttcctgctgaagcacctcgtccccggcgctgactatgacctctgcctgctggccttgtcaccggccgctgggccctctgacctcacggccaccaggctgctgggctgtgcccatttctccacgctgccggcctcgcccctgtgc

SEQ ID NO: 18567 - DNA, 926 bp, Homo Sapiens
ccacgcgtccgcggacgcgtgggccctgcccccagctcatctctgccaccccaggccattgagctgacctctgcgcggctgtggttgacagtgcctggagttggtggagcactttggccccaatgagctgcggaaggtgctggtgatgctggcagctcagagccggcggtccgtgcccttgctgcgggccatctcctaccacctggtgcagaagcccttctctctgacgaaagatgtgctcttggacgtggcctatgcctatggtgagccctttggacagaacggtggagagaggggagcgctggccctgcagatgcctgcagccgtgtcaaattcagtacctgtcctatgcatggtaggcactggcccagaaggctgccacagaaacactgtgactcatgggccctgttcctgtgtcccaggctcagggataaatttggttacagacatcaaatatctagacctcgaggctgaggtggggtggagctgctgggtgattgctgactctctccagctaaaccctgtgatctgctctgtcctgaaggcaaactcagctttcaccagacccaggtgtcccagcgcctggccaccgacctgctatccctcatgcccagcctgacttctggtgaggtggcccactgtgccaagtccttcgccttactcaagtggctcagcctgcccctgtttgaggcctttgcccaggtgagccagggcctggccccaactcagagaagctggcttcctggccatctgctgggaaccattgccttagtcgggaaagtaaagccagtctgaaaatgctcacttgtgggggcaaatacatatttcttgcattttggcttattttgaaagggctgctattcagttctcaaaaaagtgttttgagaactgtttcctctgtttctttcactgaccattataaagtg

SEQ ID NO: 18568 - DNA, 891 bp, Homo Sapiens
tggccggccaggccgagttgtacagcctgatcacccgcctgcgggaccgccatggctgcggcgtgctgatggtctcccacgacctgcacctggtgatgagcaccaccgaccaggtggtgtgccttaatcgccacgtgtgctgctccggccacccggaacaggttagcggcgacccggctttcgtcgagctgttcggcaagaacgcccagagcctggcgatttatcaccaccatcacgaccatgcccatgacctgcatggcgctgttgtctctgaccccgccacaccccatacccacgttcatggagatagctgcaagcatggctgattttctgctctacgccctgctggcaggcttggctctggcgctggtggcgggcccactgggctcgttcgtggtctggcggcgcatggcctattttggcgacaccttgtcccacgctgcgctgctgggcgtggccatggggttcctgctggatgtgagcccgaccattgccgtcaccgtcggctgcctgttgctggcggtgctgctggtgaccctgcaacagcgccagccgctggcttccgatacgctgctgggcatcctggccccaagcaccttgtccctgggcctggtggtgctgagcttcatgcatgaagtgcgtatcgacctgatggcctacctgttcggcgacctgctggcgatcagccccaccgacctggcgtggatcctcggcggcagcgcggcggtgctggtgctgctggtgacgctgtggcgcccgctgctgggcgatcaccgtccacgaagaactcgccactgtcgaaggtttgcccgtggccgcgctgcgcatgaccctgatgctgctgatcgccgtggtgattgctgtcccgatgaagattgtccggcgtatgtt

SEQ ID NO: 18569 - DNA, 276 bp, Homo Sapiens
  misc_feature (213)..(228): n is a, c, g, or t
ggggggggcgctctaaaagaaacaaggttaaaaaagggggggagggaaattctaagcttttttaagggggcccaaaattttatttcgggggcggcttttttaaaaggcgggaaggggaaaaacctgggttttcccaattttattcgttttggaaaaaatctttgcgaacctgaaggggaaaagggaaccccccctgtacgggccatttaaccnnnnnnnnnnnnnnnntttcgccaagggggccccctacttgtgccagccccttaaccccgcttc

SEQ ID NO: 18570 - DNA, 934 bp, Homo Sapiens
atcatcaccggccagaaaagcatcctcagctacctgctcaagccgatccttcgggcgcgggcagaggcgttgcacgagcgctgatcccgactgcacgcccggccgtcccttgtgggagccgggcttgcccgcgatgaggccctccaaaacacccaagcgccatggcctgtacaaaagccatatcgatattcattaacggtatttaaaatgccgttcttatgactataaagtcactctcctgaccgtccgggagtgaactcatgtctgccacctctactgttccaacagcgaacgacactgcacaaacctttgagatccgtccatttcccggcagcgtcggcgccgagatcattggcctggacctgacccgctcggtcagcgaccaggactttgcccgcatccatcgagcgcacctggatcatcacgtcgtggttttccgcgaccagcgcatcacccccgagcaacagatcgctttcagccgccgcttcggtgtgctgcaaatccacgtgctcaaacaattcctgctggccaaccacccggaaatcctgatcgtctccaacatcatcgaaaatgggcaatccatcggcctgggagacgccggcaagttctggcactcggatctctcctacaaagagctgccgagcctcggctcaatgctccatgcccaggagctgccgtccgaaggcggcgacaccttgttcgccgacatgcacaaagcctgggaccaactgcccgagcacctgcgaaaggctgtcgaaggtcgcagcgccgcacactcctacacggcgcgctatagcgaaaccaaattcgaaggcaactggcgcccgaccctcacccctgagcagctcgctcaagtggcagaagtggtgcacccgatcgtacgcacccacccgggaaaacggccgcaaagcgttgttcgtcagtgaagggtttc

SEQ ID NO: 18571 - DNA, 803 bp, Homo Sapiens
gcaaggccggcagttgcgccttgatctgcttcaccgtctcgatgatgttggcaccggactggcggttgatcaccagcagcaccgccgagtcgttgttgaagaagccgctgttgtagcggtcctcgacgccatcgctgatcttcgccacatcccccaggcgcagggccgcgccattctggtagcggatcagcagtggttcgtagtccttggccttttccagctggtcgttggcctggatctgccagttgcgctcactgtcttccagcgagcccttgggccggcgcacgttggcattggcgatggtgttacgcacatcgtccagggccacgccgtactggtcgagggccttgggttcaagttcgatccgcacggcgggcaaggagctgccgccgatctgcacttcacccacccccggcacctgggacaggctctgggacaggatagtggaggccaagtcgtacaactggcccttgggcaacacgtccgacgtcagggacagcaccatgatgggcgcctgggacgggttgatcttcttgtaggtgggcatgctgcgcatgccactgggcagcaggttacgggaggcgttgatcgccgcctgcacttcccgcgccgcgccgttgatgtcgcgattggagtcgaacgccaggatcacccggggtcgaaccctggctcgacgaactgctcatggtggtaatgcccggcaattgcgccgaaagagcgctccaaacggcgtggccaccgtagacgccatccacctcggggctggcgccgggcaagctggccgacaccacgatcaccgggaa

SEQ ID NO: 18572 - DNA, 950 bp, Homo Sapiens
  misc_feature (538)..(594): n is a, c, g, or t
cacccacgcgtccgaaaaaataaagctggggtagaagacagctctaaaagaaaaggcacattcaaaggagtggctttgtgcccatcaagaaattcttcgtttgtaacatacctgcacacacagcttttgagaaacagttaattagtagtgccttcaaaccttaaaagtacaaatgtttctgtgtgtatatgtgtgttttaaaacattgggtgttgaattctctattaatctgctggggctgccatacaaaataccacaggctcggtggctttaaaccagcggtccccaacgtttttggcaccagggaccggtttcgtggaagacagtttttctacagactggggtggggaatggttttgggatgaaactgttccacctcagatcatcaggcattagattatcctaaggggcatgcaatctagatccctcacatgcacagttcacaatggggttcacactcctgtgagaatctaatgctgctgctgatgtgacaggaggccgagctcaggccgtaatgctcccttgcctgctgtgcggnnnnnnnnnnnnnnnnnnnnnnnnnnnnnnnnnnnnnnnnnnnnnnnnnnnnnnnnncctgctttaaaccacagaaatttattttcttacattctggaggctggaaaatccaagatcaaagtgctggtagattgcttcctagtgagggcattctccctggctagcagatggctgtcttctggctgtgtccttgcatggtggaaaaatctttctctccccggcaccccccgacccctctcttcctgtaaggctatcaatgctattggattatagccctacccttatgacctcatttaatcttaattacttccccaggccttatcttcgatacagttacactgagcactagggcttcaacatatgaatttgagtaagaggaaaccattctgtatatagcaaattctataactacc

SEQ ID NO: 18573 - DNA, 458 bp, Homo Sapiens
ccacgcgtccgattgaaatagtaattctgattcaagatctttgagaaattaccacacggctttccaaaatggctgaactaatttgcattcacaccagcagtgtataaacattcccttctccaccaccttgccagcagctgttattttttgactcttcatataatagtctttgggctggcgtgagatggtatctccttgtggttttaatttgcatttctctaattattagtgaggtttagcattttttcatatgcgtgttggctgcatgtatgtcatctttggaaaagtgtccatgtcctttgccctctttttaatgggttaggtctttatttttggtaattaatttgtttaagtaccttatagatgctggaagtagacctttgtcacattcatagtttgcaaatattttctcttgttcagctatgttgtatttttttctcatgagtttcaaataaaag

SEQ ID NO: 18574 - DNA, 646 bp, Homo Sapiens
cacatgaagttcagctcaccttcacgggagttgacgcgtgtcagcaccagtggcggtggttcattaaccaaggcttcggtactttgcggggctggcaggctgtccagaagcctggcaagttcggggttgcccaacgcctcgcgcgtcgcccgttgccaggcgatggtgcggatttcttcagcgttgatcaaatgatcacccaggccgccaggctgtagcagggtgaccagcaaattcaatccatcagccgcctccggtttgatccccaccagctcgaacagcacctgggtactggcgttggcggcgagcacttcccaatggctgcccagcacgatcgccggcgcaggattgttcgcgtggagcacatggctgatcgcctcgcgaatggcctccatggagggcgaggagagcggggttgcctcataacgcggggcgaagccggcggcgaggaacacgctgttgcattgctccagcggaacctccagcgccatcagcaaattatgcaaggtgcccgggctcggcttggcgcgtccggtctcgatgcagctcaggtggcgttgggaaaccccggtgatcagcgccagttccagctggctcaatctggcgtgccgacgcagcaacgcgcagttgcgtgccggcggtagtg

SEQ ID NO: 18575 - DNA, 890 bp, Homo Sapiens
cactagaactggcctcgacctcgatcagcgagcggatgacgccgttgcgatcgatgcgcggcgtgatccgcagcgatacgccgtagggcttgaacagcgtcgtgggattgccgcgcgaatcggtcgagacatagggcacttctccgccagccaggaacgtcgcgctggcgccgctgcgggccagcaattgcggctgcgccagcatgacggcctcgccgctctgggccagcgccgcaatgcgggcggacaacagggcattgacgccgaaatagccggcggcggacgacagcgcccccggcgcatcgaccccctgttcacccggccgcgcgatgcggccaagcgacccggcatcccatgccagcgccgcattgaggccgccctgcgtcatgccatcccaccgcaccccgatctcgcgcaacctcgacgaggggatttccaccacctgcacatccagcagcaccatgctgtcccagcccacctggcccgtgaaatcgacgacctcgggataacgttgcgccagcgcggcgatccggtcgcggtcgtcatcggacaggtcatcgccctcgatcacgatgcgtccgcccaccgccgaactgcgcgccccgggaatgcgcgccagcaaggattcgatttccgcccgcaaccgcggggcgcccgccggcgccacttcgaccgagtaggtcctgacgccgccgtcggcccacacctgcaccgacgacatgccttcggcgcgcgcgaagaccacgacctcgcggccctcggtggcgacggcgctgagcacctcgccgttgccgatggccacctgcgtcacgcccggcgccgccaacacgcggcctctctccgacctgcatgtcgagcgtctgccccggcggaccatgcgggtaacgcgg

SEQ ID NO: 18576 - DNA, 895 bp, Homo Sapiens
cgcctcagaactgccgcatggcgctaaattcctcggcttcgaatagggagcaagttatgcctattgccaaatttgaaatgcctgatggtcgcattgctcgttttgagatgcccgagggggcgacgtcggagcaggcccaagaagtctttgcgcaaatggcgaaaatgagcgccccagcccacgaatcccagaagaaagcttcgctcccagaagttggcgctttccgcgcaggactgagagggatcaatgatgcgctgacattcggatttgcagatgagatttctggtggtctcgcggcgactcttgagccgctgactgggagcggaaaccccggcaagacctggcgggagcgttacgaccagaacgtggcgggcgagcgtgcgcttgacgcagcgtctcgtgaccagcaccccgttgccaacatcggcggcggcttggtcggagggatcgtgcccatgattgcaaccggcggaacgtctgctctacctggcctggcgagaaccgctaccgctgcagctgcgccaactaccgctcaagttattgggcgctcagcagccaccggtgccgcctatggaggcatgtatggtctcggatcggggcagggtaatcttatagatcggttgccgagtgcagtagagggggcagcgctgggcggcgccgttggaggtgcactgcctgtggttgctgtcggagctggagcggttaagcgagcgcttacctcgtccgaaacctccgccaatcgtcagttacaacgcgctctggaacgtgacggtatcagtttggatgagtggcaacggcgcgtacagtcgttgcgggaaagcaaccctgcgacgctgccggttgatgccggagggaaacgttgcggggctgctggagcgtgtagccaacaccccag

SEQ ID NO: 18577 - DNA, 974 bp, Homo Sapiens
gggggggcccctcaaaaggatccaagtttacttccccgggcttgcaacttcatacctcttctatagtgtcaccgaattccatttccctgcccgtcgttttacaacgccgtgactggaaacaccttggcgttccccaatttaatcgcctgtcacccactccccttttccccagcgagcgtaataccgaaagggcccgccccattcgccctcccaaaaagtggcacagctggaatgcctatggggacgcctctggtacgggcgcattaggcgcggcgggtgtggtgtttaccgccagcgtgacccttacattggccggcgccttagcccccctccctttctctttcttccctccctttcgcgccactttcgcgggttttccccgtagagtcttaattcggggcctctctttaggtttccgatttagggcttagcggcacctcgaccccaaaatctgtatcaggttgatggttacgttatggggccatcgtcttgaaaatgggtttttcccccttagacgtggaagtcacttccttatagtggatctctgtttcaaacttgacacaccctccacctattctggttctatcgtttgatttaaaaagaatttagcgcgattccggccattggataaagagagatctatttagaatatttcagcgcgtaatttgacgaaatatacgcgctcattattgggttgacagcttccggagaatgtgcgcggatctcttattgtatctttcaatacttccaatgatgtacggcactggacattaacccttgaaattgctcaatataattgaaaagagggatttgatttccacttcccgtgctccttatccttttttgccgattttgctctcttgtttgccacacaaacgtcagtataagtaatatcgtcgaataacgttgtgccagagtggctcatcaaactgaatccacggcgaagatctggaagttagtccccaagagatgtt

SEQ ID NO: 18578 - DNA, 440 bp, Homo Sapiens
  misc_feature (166)..(228): n is a, c, g, or t
  misc_feature (269)..(285): n is a, c, g, or t
  misc_feature (300)..(381): n is a, c, g, or t
gggggggccccccaaaagaatcaagctttagttcccggggaggggaagtccaaactttttaaaaggggccccaaaatttaattcccggggccccgttttaaaaagccggggcggggaaaaccctggggttaccccatttaatccccttggaacaaattcccctttnnnnnnnnnnnnnnnnnnnnnnnnnnnnnnnnnnnnnnnnnnnnnnnnnnnnnnnnnnnnnnngaaggggaaaagggaacccccctggaacggcccattaaacnnnnnnnnnnnnnnnnnttaccccaagggggnnnnnnnnnnnnnnnnnnnnnnnnnnnnnnnnnnnnnnnnnnnnnnnnnnnnnnnnnnnnnnnnnnnnnnnnnnnnnnnnnntcaagcttaaaatcgggggcccccttttggggtccaaattaaggctttacgggcccccc

SEQ ID NO: 18579 - DNA, 540 bp, Homo Sapiens
  misc_feature (180)..(243): n is a, c, g, or t
ctggaagcggcgtatgcggcccggcccgatctcatcatcgtctcggccaccggtgccgactcggcgcgcgagcagctcgatgcgctgcgcgccatcgcgccggtcatcgtggtcgattacagccaccagacctggcaggagctcgcggtgcaactgggccgggcgctcggcatcgaggcnnnnnnnnnnnnnnnnnnnnnnnnnnnnnnnnnnnnnnnnnnnnnnnnnnnnnnnnnnnnnnnnatccccgaaggcgccgtcaacatcgtcagctacaacggcccgggcaccaacaatcccatcgccacgccggccagcccgcatgcgcgcctgctggcctcgctgggcttccggatcgaggcgcccgatccggcctggcacgtggcgctgggcgcgccgggcgatttcgtctgggcgccctacgaggcgctgacgcgcctgacggcgcgcaccaccttcgtgctgcgcgccgacgccgcgggcgccggcgccctgctgcgcgatccggtgctggccaacctgccgtcggtgcgggcgggg

SEQ ID NO: 18580 - DNA, 357 bp, Homo Sapiens
cttgctgcgggtattcaaccgtatctactcgatgtacccgaagcaggaagcccgcggtgaagtgctgctcaatggcgaaaacatcctcgcccccggctactcgatgaaccgcctgcgcagtcatgtcgggatggtcttccagaagccggtgccgttccccatgtcgatctacgacaacatcgcctatgccgtgcgccaccatgaaaagctgtcgcgccgggaaatggatgatcgagtcgagcaagccttgcgcggcggcgcgctgtgggatgaggtgaaagacaaactcaagcagagcgcccagagtctctcaggcgggcagcagcaacgcctgtgcatcgcccgcaccattgcgct

SEQ ID NO: 18581 - DNA, 916 bp, Homo Sapiens
ccgccatcggttaaatcgacaatcacgtcctggatcgggcgatcgtagtctttgggattgatgcaatcggtagcgcccagttgcttggcgatttcaaacttggccgggttgatgtcgatggcaatgatgcgaccggccttggctttcactgcaccgatcactgcagacaggccgattccgcccaagccgaagatggccacggtgtcgcccggtttgaccttggcggtgttgatcaccgcaccgataccggtggtgacgccacagcccagcaggcagactttttccagcggcgcttctttaggaatcttcgctacggagatttccggcagcacggtgtattcggaaaaggtcgaagtccccatgtagtggaaaatcggctggcccttgtaggaaaagcgcgaggtgccatctggcatcaggcccttgccctgggtggcgcgaatcgcctggcagaggttggtcttgcccgacaggcagaatttgcacttgccgcattccggggtgtacagcgggatcacgtgatcgcctaccgccaccgaggtcacgccttcgccgatggcttccaccacagcgccgccttcgtggccaaggatcgatgggaagataccttccgggtccgcgcccgacagggtgtaggcgtcggtatggcacacgccggaagcaaccactcgcagcagcacctcgcccgccttgggcatggccacatccacttcaacgatctcgaggggtttcttggcttcgaaggctacggccgcgcgggacttgatcatccggtttctccatcgggttaaaaacgtaaggccagcagtgtaaaacatgcccatctgattaatattcagacaaaagcaaaacatttattgccgtacagggataatcagcatgttgggaaaaccgctgggaaggcatcgacgagttc

SEQ ID NO: 18582 - DNA, 980 bp, Homo Sapiens
  misc_feature (124)..(145): n is a, c, g, or t
  misc_feature (598)..(763): n is a, c, g, or t
ccacgcgtccgggaaattagcataaatgccaatcactctactggattctaggacagatttttggaattcaggctatcagatttctccagccctattcactttccctgaactagaaaattcagcnnnnnnnnnnnnnnnnnnnnnngactttgttgcagaactttatatattgtaacttattagggtccagatttgaaataggtactctctcttataaaagtgttgatatgaattacattgctaagaatattcctgagcataaaactttgtgtgtatctctgattattttgctgaagtaaattctagaattggaataaaggagttttttaaaagaactttttttaaggtgaaacccggtaagtttactgctcggaattttccctaggaaatttttggtgatagaaacaaagatttcagggatgttcttaacaatattatttataatagtttaaaaattaaagcctgggcacaatctaaacacttaacacaatgaaattacttacattatcatatatttagtgaagagattatcatatattcaatggagagacaacgtaatattttagaaggcacattttggagtaagaaaccataatgnnnnnnnnnnnnnnnnnnnnnnnnnnnnnnnnnnnnnnnnnnnnnnnnnnnnnnnnnnnnnnnnnnnnnnnnnnnnnnnnnnnnnnnnnnnnnnnnnnnnnnnnnnnnnnnnnnnnnnnnnnnnnnnnnnnnnnnnnnnnnnnnnnnnnnnnnnnnnnnnnnnnnncaacaatattgatattgtggttgttatgaacagtcatattctcaataaacttatacatttaaaggaaaatgccatagcataatacattttacagacagggtacaaaactgtattttattgtgttacaaattttataaatatgcatatatgcaaataggacaggtaacctacactaaaatgttaccaaggtagttgaagtataggaaacgtttatttt

SEQ ID NO: 18583 - DNA, 464 bp, Homo Sapiens
  misc_feature (98)..(114): n is a, c, g, or t
tttatcttcaaaacaccaaattgtctttagaaaaattaatgtgattacaggtagaggccttctaggtgagacacttttaaggtacactgcattttgcnnnnnnnnnnnnnnnnngtaatcttttagcaaccgcagtattccttcactatttcgcttcctgcattagaaaattttacttacagtcaaaagtgcagatttatactcctgacgtgtctcattcacggttaaataagaggccataggacttttggtaggtttaaacttttaattctgtatttcatgattataagtcttgctagaattttttctaatctttagtagatttgataaaataatgattcacagaatttattaacagaatgaaactaagccatgtatgagggtaatcgagatgaggatattaattctaaagaaatagggggatttttaaaggattaataaaattcttaaatgttaagtagaag

SEQ ID NO: 18584 - DNA, 384 bp, Homo Sapiens
ccacgcgtccgccagaacaaaacaatatacaaaagagagagaaaatcccacacctcttggtaactggaaaggctgaggccatgggtgagagcacctcccatttccctgggaaaggagaataagtaaaacttgaattccttcaattagagactcatctaagaatcctttctatcttcccactctgttttgaagtaggacagggggcccagcatcacagacgacaaggttcttaccttgtagttctggtctcatttgtttctgtatttatcaagcctggtacataaacacagtaggtaggtggatggatgaatttgctgtccggtcaagacttcagctagcacattcctaattgacctgcctttacatatatggtttctaaaacac

SEQ ID NO: 18585 - DNA, 351 bp, Homo Sapiens
tcttctagagtgtcccctaaattcaattcgatggccttttttttgccgcgacttgacttggaaaacctgggggttatccacctttatccccttggagaaattccccctttccccccttggattaatcttgaaaaggcccgcaccgattgcccttccaaaaaattgcaccacctagaagggtattgggactcgctctgtagcggcccattaaccgcgggggttgtagtggttacacccacaagacccctaccctttggagggccttaacgcccgcttcttccgttttctgcgctttctttctccccacgttccccgggcttttcccttcaagctttaaattgaggggctccc

SEQ ID NO: 18586 - DNA, 356 bp, Homo Sapiens
cacatgcccacccccggcgcacgttatcgcgacgctcattcggggatgtccggcgcctacgggccgcaacgccaaatcctgcaggccatgaccaaaccggcctgggccttcgatgtgggcctgctggggcgcccccacgacctgggcaacatctccaaatacctgggcaaacccacccaactgaaggactacatcggctggctggccaacaacttcgacccgtccatcagctggaaagacctggagtggatccgcgagttctggaaaggcccgatgatcatcaaaggcatcctcgaccccgaggatgccaaagacgcggtgagctttggcgccgacggcatcgtcgtctccaacca

SEQ ID NO: 18587 - DNA, 732 bp, Homo Sapiens
ggggggggccgctcaaaaggatccaagtttatttacgggggcgggggaggtcaaaccctttttattgggccccctaatttcatttcagggcccgtctttttcaacggctggggcgggaaaaaacagggcgttacccatcttatttcctttgagaagaacccccttttcgccgagtgggagaataccagaagaggcgccccagttcccctttcccaagagtgtacccgcttgatgagcgatggggacgcccctgttatgggcccattaaccggcgcggtgtgggtgtttaccgccacggtgacggctgcttttgccggcgccttatcgcccgctcttttcctttttgtcctttcttttctcgccaggtgcgcgggttttcccggccaagtttaaactggaggctctctttagtgttccattttagtgctatagggcactccgacccagaaattggtattagggaagtgttcacggaatggcgatcgcactgaaagagggttttcgctctgtgagtggaactccggtttaaagggggactctgtttccagcggaagaactcaaccattgcgggtcttttttattttaaaggatttgcaatatcccccttggtagaaagaactgattaaaaaattttacggcgattttataaattttacgcttacatatagtggctatttcggggaatgggcccgaaaactatttgttattgtcaaaacatacaaatgtgtcgcc

SEQ ID NO: 18588 - DNA, 800 bp, Homo Sapiens
gcgacgcccaaggcgccgcagcctgtgccgaggcccacttgcgcgcggcagcacggcgtttgcacctggaattgcccgccatcaattaaacgatccaaacccttttgaagcgtgccgtcgggcacgccgtttttttaacaaaaccattagtctgacaacctgataagcagactgaaatgcgtaggtacctaaaacaatgatttatgacttttgcatcatcggcggcggcatcgtcggcctggccaccgcaatggagttgctcaagcgccagccgaacgcttccctggtaatcctggaaaaggaaagcctgctggccaagcaccagaccggccataacagcggcgtgatccatgccggcatctactacgcgccgggcagcctcaaggccgacttgtgcaaacggggcgccgaagccaccaagcagttctggaccgagcacgggatcaagttcgaggtgtgcggcaagttgctggtggcctcgaccccgctggaagtgcagcgaatggaagccctgtacgcccgctcgcagctcaacggcatgaaggtcgaacgcctggacgccgaccagttgcgccagcgcgaaccaaacatcgtcgggctgggcgggttgtttctcgacgccaccggcatcgtcgattaccgcgaagtctgcgaaaccatggcccgggtcatccgccgtgccggtggggaaatctgcctggaacgcaccgtgacctccatcgtcgaggacactgacaaagtcaccgtcagcactcggggtgaaagctggcaaggccaagcactggtggtgtgtgcaggtt

SEQ ID NO: 18589 - DNA, 939 bp, Homo Sapiens
ccacgcgtccgtaaatttgaggtgaagtgttttcctttattccagcatcctctccccttcagaagaattgtatgtatcgtcgtaacagcatcgtcctgatccatcaggtaaaagagaggatgctacctagtggagttattcttgcagccccactcatgttgacagcgagcacattcatgaagatataaaagccagtccttcatgtttatattgcccaacaattagattggcagtttttagacaaacaatgtttcaattgaccatttcaattttctatcaaattttcccctgaggaggacatgtccctctgcattgttggccgtttgaggctgtaaagtgtgttttcttgtgtaaagtagtgtgactcggcagtccaaattggtgcaacctcttcttttctggtccttgtatagcccttgaagcattgacatctacccctggttgagcatagcccaatccagagtcagtgattttcctgtcaagatccattggcagctcctttggggttgctggtatcattctggcttgccaggtattatgatcaaagccttcccactagagaatctgtcacatctccatctgctgcctctgtctgttttcttgaccaacagtgaaaaaagagattatgagaaataagataaattaccaaaattgtgaacaaaagagattatcactaatgacccttaggaagttaaaaaacattataagtgaatactctgaaaaacctgaagccaataagttagaccacttagataaaaaggaccaattcgtgcagagatagaaattgccaaaactgacccaaattaactggaaaacctgaagagactgtgaactaagtcagaaattgaaaaccttctcaaaagaaatgcaaagcccagatatcttcactggtgattctatcaatattttgaaagctctttcagacagaagagagaggaa

SEQ ID NO: 18590 - DNA, 750 bp, Homo Sapiens
ccacgcgtccgtccaggtagattttgctattaggtgctatttggttcctggtacagagctaaaacccttggaatttcctaagtgataagagctacaggagcatcttttgttatatgtttccccccctagttcctgaaatagctctagagaaatacaggtgaataacatcctttgttattcatatcaagcccctatcaaccataccccagtttctatttatgaagtggcttttgggaagtccctaaagacaggagtggggaaaggctggttgtcagggggatgggttgaaactttcatcttccccccttgacctccagggagggatgagtggctgaaaattgtgtaaaatcaacaatggccagtgatttaatcaaccatgcctatgtaatgaagccacccgataagccttaactggaactttttggagagcctccaggctggtgaagacattgaggtgctcagaaggtggtattccagagagagcacagaatctctgttccccttcccacattcattttgctatgcatctctcccatctggctgttcttgagaggtatccgtttataataaactggtaacctagtaagtaaactgttaccctgagttctgtgagccattctagcaaattatcaaacctaaagagttcatggatacgtgcatttacagatgcacagtcagaggcacagatgacaatctgggcttgccattggcatttgaatgtgttgggaggcagtcttacagaatgagccc

SEQ ID NO: 18591 - DNA, 252 bp, Homo Sapiens
ttgcccgaaccggacgggccgatcaccaccagtacttcacccttggccacttgggtggtcacgttgtccaccgcgcgcacgacgtggccacgggtgtcgaagacttttaccagatcgcggacttcaatcactttgcgcgagcctccgctcaagccggctggcgattttcgacagcggcaggttgatcagcaggtacaggcctgcgacgcagaacaggatttcaaacggcgagaacgaggtggtaatgacctc

SEQ ID NO: 18592 - DNA, 324 bp, Homo Sapiens
  misc_feature (55)..(71): n is a, c, g, or t
  misc_feature (74)..(107): n is a, c, g, or t
ccacgcgtccgcaaacaccttcagggaaggggagcctggttcttctcgttttccnnnnnnnnnnnnnnnnnctnnnnnnnnnnnnnnnnnnnnnnnnnnnnnnnnnngcacaatgaagtttcagcttctcaaccttctcccctacccagggctgtggacccaaactggccttgagccacagtccctctttccctcctcaccctcttccccctgcgggctcccgggtctgtccatttgttactgtgctgtgctggggattggcgccgaggtggcgtgagattccacttgtgtagaactttgttgagtaaagatcagtttcttgtg

SEQ ID NO: 18593 - DNA, 294 bp, Homo Sapiens
ccacgcgtccggtgattatcatcccagcgataattcctcctttatgcctggaatcactgttctgtttttttgcttccccttctcctgattcttttgctccccccccttcctttgcacccctaccacctgcacaatacagtgcccctacttgtgtgatggactgacccatggtggggaggtggggagagtgtttgtgattgatgaagttctgcacacaggcctcctatttttaaaattgagatatttcctcccctcttgctgaaaactcggcttcgaacgattatttcttgtggg

SEQ ID NO: 18594 - DNA, 980 bp, Homo Sapiens
cacccacgcgtccgaaaataaaagctttaaaaacagcactcttttaaaataattctaaagccattagcttggagaaaattcctcctagtattcctgaaagggaagtaatactgtcaatatttgccagaacagtgtacaaatggaagactttgtccaaaacctcagttgaagtaggcctagagttcaggtcccaggtgtgaggatccacctcagaaaaacaccttaaagggaggaaagggaacagtttttggcttttttgtaacacagcatcatctttgttgtctcacagcctctgctttggttcagttcactataaaacagtttgcctaacttttaggtttctttatttgattcttttaggcataaattgatttggaaatatgaaagaataaggttgttctcaaacatgaaaatcatattgattgaagaggtgcctaggcacatgtgatttagtcagtaagattggagccaagctctacttttctcagtgttatatttggttatgaatgcatttacctcaggtatttaatatatttgctttttaatatatgtcatatagcaaactggattaataaatagaaacacatagtgtagtctttaagcatatgtgtgattataaaaataaatccattttgcattcacagaatagaaaataccctttaattagtgaaattgattacatatcgtatatagtaatgagcttcagctagatgcaagccctcattggatcaaagtcagtttagataagggcagctgaaggtcacagagggagatgcccagcacttcatttgcataaaaaattactgttagaaataggacactgaggcagctctagcattttgatctcttggcctttgtcatggagattcctagtagtgaagggagtaaggccagtgtccagataatgattaactgttttaatgggcattcattcattcattcacactaactactcatgcagaaaaaggggttatgtaaaa

SEQ ID NO: 18595 - DNA, 410 bp, Homo Sapiens
ggggggccccctcaaaagaatcaaaacttaaggggcggggatggaaaggttatagcttttaaaatgggtccccaaatttctattcctggcccttttttttaaaaggcctagaggggaaaaacctggcgttacccacattaagcgccatagcaacaatccccccttcccacaggtggagtaaaagaaaagacgcctcccctgtgcgcttttctaaaaattttgccatccctatatggcaaatggacacccccctgttaccggccatataagcgcgcggggtgtgtggttactccaccgcgggactgtactttttgcaagcgccttaccgccccctcttttcgcgtttctccatcaccgtgctgcacgcccccttaggtttcgatataggctttagccgcatctcgacccaa

SEQ ID NO: 18596 - DNA, 819 bp, Homo Sapiens
ctggcttcgacccgtggcacttacctgccgattggcacgccgaccgacaacaaccgtttgtacttgctggatggtgcgctggagttggtgccccaaggtgcggtcggcgagttgtgcgtggcggggaccggcgtgggccgtggttatgtcagcgattcggtgcgcaccgcccaggtgtttgtgccgaatccgtttggcgcggcgggggagcgcctgtatcgcaccggcgacctggcgcgtcggcgcagcgatggtgtgttggagtacgtcgggcgtatcgaccatcaggtgaagattcgcggttaccggattgagttgggtgaaatcgaagcgcgcctgcatgaacaaccggaggtgcgggatgcggcggttggcgtgcaggagggcgtcaacggcaagcatctggtgggttacctggtggcggcggatgcgcagttgaatccaggcgagcgccttgatcggatcaagcaacgcctgcgggccgagttgccggagtacatggtgccgctgcattggctgtggctcgaccgtttgccgctgaatgccaatggcaagctggatcgcaaggccttgccggcgctggagattggccagttgcacagccaggattatctggcgccgcgtaatgagctggagcagacattggccgggatttgggccgaggtgctgaaagttgagcgcgtgggtgtgcaggataatttctttgagctgggcgggcattcgttgctggccacgcagattgcttcgcgcgtgcagaagacactgcagcgggatgtgccgttgcgggcgatgttcgatgcagcacggtggaggagttgg

SEQ ID NO: 18597 - DNA, 348 bp, Homo Sapiens
cccataaatcggccccaagccctgggacgcgcgccagcaggcgctggcgcggcaactgctggaggcgcacaccacgccgcagcaggccggcgaggcggcgacgcaggcaggcgtccgcaagctggtgctgtcgcacctggtgccgggcgatgcgccggccgaccattggctgcatgcccgcgagaccttcaagggtccggtggtgctgggccaggatttgatgcgtattcccttgaagcaaccataagcaccgccggaggcaagatgaagtctttgcgtgttgatacccaccgacgcgcggcgcgcgcgtgcggccggatggcgctgctggcgacactgttgctgggc

SEQ ID NO: 18598 - DNA, 457 bp, Homo Sapiens
cgcgccagcggcggcggcaccgacgccgccttcgccgccctcaaggcccgcggccccgtcatcgaaggcatgggcctgagcggcttcggcgcccactccaacgacgccgagtacatccagatcccctccatcgtcccccgcctctacctggccacccgcatgatcatggacgtctcccaggacaaggccccgatgaaataggcgcccggcgcctgcggcggcgcaaccctacgaaggccgcccctgcccccaagcaacaggctccccgcccgcaaatcccacctcccgccccaggatgcgcccacgcgagcagccaccacgtatgtccgacaaggccgcgcagggcggccttgtcggacgggcgccagcaaatccttcaagcgccgccatccttcccacgaagtccaagcacaccccccgccccagcgacgcctcgagctttccccaccgcgagcgg

SEQ ID NO: 18599 - DNA, 859 bp, Homo Sapiens
  misc_feature (123)..(138): n is a, c, g, or t
  misc_feature (147)..(511): n is a, c, g, or t
  misc_feature (556)..(727): n is a, c, g, or t
ccccaagcgtccgatcagggcaatcagtttcctggctgttttccccaatatcaacccgggcttacagaagacagtcaccacagagctcctgccaggagttcactcattcgtgcatttcttccnnnnnnnnnnnnnnnngagatggannnnnnnnnnnnnnnnnnnnnnnnnnnnnnnnnnnnnnnnnnnnnnnnnnnnnnnnnnnnnnnnnnnnnnnnnnnnnnnnnnnnnnnnnnnnnnnnnnnnnnnnnnnnnnnnnnnnnnnnnnnnnnnnnnnnnnnnnnnnnnnnnnnnnnnnnnnnnnnnnnnnnnnnnnnnnnnnnnnnnnnnnnnnnnnnnnnnnnnnnnnnnnnnnnnnnnnnnnnnnnnnnnnnnnnnnnnnnnnnnnnnnnnnnnnnnnnnnnnnnnnnnnnnnnnnnnnnnnnnnnnnnnnnnnnnnnnnnnnnnnnnnnnnnnnnnnnnnnnnnnnnnnnnnnnnnnnnnnnnnnnnnnnnnnnnnnnnnnnnnnnnngatcatggctcagtgcagcctcaaactcttgggctcaagcagtgnnnnnnnnnnnnnnnnnnnnnnnnnnnnnnnnnnnnnnnnnnnnnnnnnnnnnnnnnnnnnnnnnnnnnnnnnnnnnnnnnnnnnnnnnnnnnnnnnnnnnnnnnnnnnnnnnnnnnnnnnnnnnnnnnnnnnnnnnnnnnnnnnnnnnnnnnnnnnnnnnnnnnnnnnnnntgagccaccgtacctggcccttggtggaatctttagggttttctattcatacatataaaatcatatcattggcaaacagagaaaattttacttcctcctttccaaattggatgccttagatttcttttcttg

SEQ ID NO: 18600 - DNA, 752 bp, Homo Sapiens
  misc_feature (252)..(265): n is a, c, g, or t
  misc_feature (276)..(541): n is a, c, g, or t
ccacgcgtccgtaagtacataaggtgggggaacagatgggacatttgtccctaggtacagaatgtgcctatgtctcaaaggttctccaagttattgtgtctgcttgttcttacttccccagacttggatatagaaccatgtgtagttctatattttcatttttaccctttagttttgaactacttccccatttcctgaaccagttaacacttgaggactgatactagagtgggtatcccatcactatttacnnnnnnnnnnnnnnctgaaacaagnnnnnnnnnnnnnnnnnnnnnnnnnnnnnnnnnnnnnnnnnnnnnnnnnnnnnnnnnnnnnnnnnnnnnnnnnnnnnnnnnnnnnnnnnnnnnnnnnnnnnnnnnnnnnnnnnnnnnnnnnnnnnnnnnnnnnnnnnnnnnnnnnnnnnnnnnnnnnnnnnnnnnnnnnnnnnnnnnnnnnnnnnnnnnnnnnnnnnnnnnnnnnnnnnnnnnnnnnnnnnnnnnnnnnnnnnnnnnnnnnnnnnnnnnnnnnnnnnnnnnnnnnncagcaactatttacttttctatatgaacttattaatgtcactggctcaaagtaaaattagcaaagataattgcctttaagtctccaagcccttttaaaaatgcatctttcttgtacatctttgcatttctaccaggtagtagggagttaaaacccaaaaagaaaatgctgattaattatattcccaaaaataaaaacactgagaaccatgg

SEQ ID NO: 18601 - DNA, 384 bp, Homo Sapiens
cttgaaacgagatgaagttgtcgatctgcgagaactgcttgctcaggtcatagtcagccgacaccgaggtgaccttgaccgccgggttcagctccttggcccgggccgtggcaccgtcggccagggtcacgaaatacgggttgcccagggaacccatgctgatgccaatggctttcagttcacgggcttctacggcttgggacatcaacacggcaacgcccagggaggcgacaacaggaaacatgcgtttgaagttcatgatgactctcttgtgattgttgtttgagtgaattcaggtccgcgcaccggactggcgatagcgatccagcgctacggcgccaatgatcacgatgcccttgatgatgtactgccagatatccgaca

SEQ ID NO: 18602 - DNA, 433 bp, Homo Sapiens
ccactcgtccgccagcttctcctcttcaggattgtggatggttaagcgtgcatgccttggagcccatttctcattgaagagcaaagtttgtctcatgggttttcggataacgttctaccttctgggaataccacattatctttactatgtgctaggattgcatatttccccctttcaccaatgggaaaaacatgaaagaggttgtaatatatcgttattattattgattgtacctgcttaatgggcagaagtgattccctcgtaactccactcctgctttagtccttggggagttgtggtacttagtgaccgcttttttgccagcgcaaaaacacccggggcggccgctttcttaccatcctttcttacctactcctgcgggttaccccgtaactctttaaaactggggctccatttaaggtccctatttgtc

SEQ ID NO: 18603 - DNA, 255 bp, Homo Sapiens
  misc_feature (168)..(179): n is a, c, g, or t
cttggggaatcaagttttatgtggggtggtggggggtttaaagcttttttaatggggcccccaaatttaatttcgggggcggtttttttaaaccggcttgggggaaaaaaactggggtttcccaattttttccccttggcacacaccccccttttccaaggggggggnnnnnnnnnnnnggccccaacggttgccctttccaaatttttcccccactgaaagggaaatggggacccccttggaagggcgaattaa

SEQ ID NO: 18604 - DNA, 654 bp, Homo Sapiens
cctgcaccgaggacgggctgcgcggctacgccatggcggccgagggcggcttcgacctgatcgtgctggacctgatgctgccgcggctggacggctatgacctgtgccggcggctgcgcaccgaggccggctgcgataccccggtcatcatggtgaccgcgcgcgataccctggacaaccggttgacggggttcgacgccggcgccgacgactacctggtcaaaccgttcgccctggctgagctggccgcgcgcgccaaggcgctgctgcaccgcgccagcggcgccggcgcggcgcgggtgctgcgggtcggcgacctgacgctggataccggcacgctggcgctggcgcgcggcgggcaggcgctgcggctgccgccgtcgccgctgcaactgctgatgctgctgatgcgcgccagtcccgcggtggtgcaccgcggccggctcgaagaggcgctgtggcgcgattcgccgccggacagcgacagcctgcgcacccatatccaccagatccgccaggtggtggacaagccgttcgccacgccgctgctgcacaccgtgcatggcatcggctaccagttgcgcgccgttgactatgcgtagcgcgcggcgcgggctggcccgctatctggtgcgcacctacctgctgctggcg

SEQ ID NO: 18605 - DNA, 777 bp, Homo Sapiens
tgcaacgtgatccaggctgacggtggcactcgcacggcgtccatcaccggcgccatggttgccctggtcgatgcgctcaaagtcatcaagaagcgtggcggcctgaaaggcggcgatccgctcaagcagatgatcgcggctgtatcggtaggcatgtatcagggcgagccagtgctggatctggactatcttgaagattcggctgccgaaaccgacctgaacgtggtgatgaccagcaccggtggtttcatcgaagtgcagggcaccgccgaaggcgcgccattccagccggcggacctgaatgccatgctggcattggcccagaaaggcatgaccgagatcttcgaactgcagaacgccgccctggccgactgattcaaccccaaggagctacgccatgagtgacagtcaacttccgctgccgacaccgtccaaggaagttcgccagtgggcgatgctctgtcacttcgcggcgtttttcggcttgatgttcccgttcggcagcctgctggggcctttgattctctggcaggtgaagaaggacacggacccgttcattgatgatcagggcaaggaggcgctgaatttccagatcaccgtgggcattgcctgggcggtctgcttcctgctgggctttatcgtgatcggcttcgtgttgatgaccgtcctggtcatcggcgcggtggtgatgacgatcattgcgggcatcaaggccaacaagggcgtggcttatcgttatccgtggacgttgcggttgatcaaataaccaccgcccac

SEQ ID NO: 18606 - DNA, 272 bp, Homo Sapiens
  misc_feature (211)..(226): n is a, c, g, or t
ggggggggccccttaaaagattcccttttatataaccgggggtgggaactcctaccctttttatattggcccccaaattctttttcgggggcggcttttttaacccctgggaggggggaaaccccgggttttcccaatttaatccctttggccccaatcccctttttcccacgggggggaaaaaggaaaagggtagggggcccattaaccnnnnnnnnnnnnnnnnttccccgccgtgggcccctaacttttgcggccccccaacccccctc

SEQ ID NO: 18607 - DNA, 842 bp, Homo Sapiens
  misc_feature (85)..(374): n is a, c, g, or t
ccacgcgtccgaagaagctctttacctttccaggttcttaggtaaggtccaagtggctgtaacagtggttaagagctagccaggnnnnnnnnnnnnnnnnnnnnnnnnnnnnnnnnnnnnnnnnnnnnnnnnnnnnnnnnnnnnnnnnnnnnnnnnnnnnnnnnnnnnnnnnnnnnnnnnnnnnnnnnnnnnnnnnnnnnnnnnnnnnnnnnnnnnnnnnnnnnnnnnnnnnnnnnnnnnnnnnnnnnnnnnnnnnnnnnnnnnnnnnnnnnnnnnnnnnnnnnnnnnnnnnnnnnnnnnnnnnnnnnnnnnnnnnnnnnnnnnnnnnnnnnnnnnnnnnnnnnnnnnnnnnnnnnnnnnnnnnnnnnnnnnnnccaacagtggttaagagcctggctgctggaatcagcctgaattcaagtcttgttcctgcacattccaccctggagaaatctggggcaagtgactgttccccgggccttagcttctcctgtcactgggacatcacaacagcacctaccttagggcaactcaggccagggaagttggtgctgcctcacctcccaatgtgcgtcctcctgggcctggagcctcagggcctctggaaggaggaagtgagcgcctctgggcaggattcctgggaggcctgggagagcaagggaagcgccaagagctgagcagagttctgggactgatccatggccctttctctctcacctttcagagtgggccccctccacccccagcacttcccacctggtcgtcccgaacggcccctccccggaggagtggagcagcagaaaagtggggctgggccctggtggggaaccttagccgctgcc

SEQ ID NO: 18608 - DNA, 705 bp, Homo Sapiens
cgttggcggcgtccagcaccacccgttgaccctgtggcacctccagcacttgctcgcccaacgcgaccacacacggcaggcctttgccccgtgccagaatcgccacatgagaagtcgcgccgccttcggccatgcagatgccggcggcgttttgcttgctcagttgcagcaggtccgacggggtcaattcatgggccgagacgatcgcgccgggcggcaactcgaagtgccaggcctcgcccagcagcgcccgcagcacgcgttgttgcaagtcccgcaggtcgttggcgcgttcggcgaacagtggtttgccaagggcgagcagcactgcgcattgggcctggatcgcatcgcgccaggcgtgagtggcggcgctgccatgttcgatggcggtggtggcggcttccagcagggtcgggtcttccagcaatgccaggtgggcggagaagatctcttcttcttcgacatccttgcgctgacgggcctggtccagggtgtggcggatttcgccgcgcacctgttccagggcgctgtccaggtgctgcaattgttcatccggcacgttgttgcccgggtccgcaggcagctcgattccgttcaggcggaacagcgggccgcagaccaaacccggcgcggcgcagacgccttgcagcacaccggcctcggtattcgcgcgtcgcggggcgggcggccactggggcgtga

SEQ ID NO: 18609 - DNA, 949 bp, Homo Sapiens
cccccacgcgtccgtaaaaaattaagttagaaataagcttattttcttgcacatcaatatttttctgttggtaaagaggacacaatttctagtagattgttaataacatcaggaagatatttctttcgtcagaactaattgtgtgcttattcccatattctcagctcataactccctgttttggctgctctctttattttacaattgtttcattgcaaacagcaaggcagtatagcccacactcagccactagcccccagtccccaggactgagaatgagtggggaggctggggagttggtgagagaaggtggagatagggatttctgcttcccagtactctatcattagagaaaaggaggggtaaatattagctaagaagaagaaaaaagcttattcttcagggacccagtagattggacgtaagcaagtaaatattgcacaggcatcatgatgtaatagttgatggaccccagagatacccctcacccatgcagagaacaaagctgtgtggaagagcaactaccataagatggtgtgttccttccagcggctgttaaagccatcctgaataacaaatcagctattcctacctacagacccattccaatatgctgtgatacacgacacggtgcaccgcagaggagacagacatcttcagcacaaacacagatgcctgcaggagcttggcaagtcactaaattgcatgaaattgtgaggtgcacaccaaatgcagggatgggggaggccgtgggaagctctgtattctcaaaatttgacagctaattccggtttttagaaaatgcctgagggccagtagaggccctctagtcactcactgctgctgtttctgatatattattgagaaagctatctcacttattagaagaaaacacgcactatcaaaccagatagcctaacgtgcatgtgaaaatcgagaaagctgaaaa

SEQ ID NO: 18610 - DNA, 819 bp, Homo Sapiens
actatgatcggggcctacgactgggaacgcggtatccggcaatgcctgcgtctggacctgagcttcgcctgggataaccgcccggccgctgccggtgatgacctgaccctggcactggactatgccagcgtgtccgcacgtatccaggcctttgccgagcaggcgcagttccagctggtggaaacctttgccgagcgccttaccgaagtcttgatgagtgaattccagattccctggctgcacctcaaactgaccaagcccggcgccgttccggcagccaagggcgtgggcgtggagatcgagcgcggatgtcgctaactcaggtttaccttggtcttggcagcaatatcgagcgtgaggcccatttacgcgctggcctcgatgcgctggcgggtttcctgacggatctgcgctgttcggcggtgtttgaaagccagccggtgggcatcaagagcgggccgttcttcaatctggtggtgtcggcgtataccgacctgccgctgatggaactggaccgtcgattgaagtttatcgaggccgacaatggccgctatgccccggatcgcaagggcttgccgctggatatcgacgtgctgctgtacggcgagctggtcggtaatttcgatggcctgattcttccccgggccgaaatcctgaagaacgcgtttgtgctgtggccgctgtcgctgatggcgccggagcgtgtgcaccctgaggcgggcaagacatttgccgcgctttggcggatgcgcagatcgatcagtactggcgccggtcgctttccagtggcggaatcagccgtttaacgccggatgcgct

SEQ ID NO: 18611 - DNA, 718 bp, Homo Sapiens
cccggcgaactggcattacgcatcgagaacctgaccaagacctacaccgtcggcggcagctcggtggcggccttgcgcaatgtctcgctgcaactgccccggggcaagacgctggcgattgtcggcgagtcgggctcggggaaaagtacattggtgaaagcggcgatccgcctggtggacagcgacagtggccatgtgtgggtcggcgacaccgacttcctggccctgcgcggctctgcgctggcggccaatcggcggcgcatccagatgattttccaggacccgtacggctccctcaatcctcggcatcgggtgggtgacatcatcgcccgcgcggcgcaactgcgcgggttgtcagccaaggatgcgtgggctgaagccggtgatttgctggaacaagtgggactcaagcgcgacgccctcaagcgcaagccccggcagttctccggcggccagcgccagcgcatcggcatcgcccgcgccctggcgatgcgcccggaagtgttgatcgccgacgagagcgtgtcggccctggatgtctcggtgcagaaacaggtgctggagctgttggcggaactgcaacagcgcctgaacctgagcatcctgttcatcacccacgacctgcgggtggcggcgcagatcagcgactacatcgcggtgatgcgccagggtgaagtcgtgggatacggcactgccgagcaagtgctgctgcgccccc

SEQ ID NO: 18612 - DNA, 809 bp, Homo Sapiens
ctggtgatttccagcctgggcaagaaccccgagcgcgagaaggtcatcgacttctccaaggcctacgcgccgttctacctcgccgtgttcggcccgccagatgcgccaatcagtaccgttgacgacctcaagggcaaaaccatcagcgtgacccgcggcgccatcgaagacatcgagctgaccgccgttgcgcctaaagaggcgacgatcaagcgctttgaagacaacaactcgaccatcgccgcctacctcgcgggccaagtggacctgatcgccagcggcaacgtggtgatggtggccatcagcgaacgcaaccccaagcgcgtgccggcactgaaagtgaagctcaaggactcgccggtgtacgtgggcgtaaacaagaacgagccggcgctgctggacaaggtcaaccagatcctggtcgcggccaaagccgacggcagcctggaaaagaacgcaatgcagtggctcaaagagccgctgccggctgatctctgatcgcggtaacgagggttagctatggcctatcaattcgactttgtgccggttctggccaataccgatctgttgctgcgcggcgcgctgttcacccttgagctgaccgccatcggtgcagtactgggcgtggcgctgggagtcgtcggcgccgtggtgcgggcgtggaagatccagccgttcagctggatcttcggggtgtacgtcgagttgatccgcaacacgccgttcctggtgcagctgtttttcatcttcttcggccttccgtccctcggtttgaaatcaccgaatggcagcggcggtgctggcgatgg

SEQ ID NO: 18613 - DNA, 854 bp, Homo Sapiens
ccgcaaaccgcaggcgcgttgctgcagcgcaccgaccgcttgatcaagagcgtgccggaagtcgcccatgtgttcggcaaggccggccgtgcagaaacggccactgacccggcaccgctggaaatgttcgaaaccaccatcgagttcaagccacgagatcaatggcgccccggcatgaccccggaaaaactggtgaaggaactcgaccgggtggtgcaggtgccggggctgaccaacatctggattccgccgatccgcaaccgcatcgacatgctcgccaccggggtaaaaagcccgatcggcgtcaaggtcgcgggcaccggcctgatggaaatcgacgcggtgacccaggccgtggaaaaggtcgccaagcaggtgcctggcgtcagttcggcactggcggaacgcctgacgggcgggcgctacattgacgtggatatcgaccgcccggccgccgcgcgttatggcctgaacatctccgatgtacagtccatcgtctacggggccattggcggtgaaaacatcggcgagacggtcgaagggttggcgcgtttccccatcaacctgcgctacccgaaggagtggcgcgattcggtgagtgccttgagcaacctgccgatctatacgccgtcgggcagccagatcaccttgggcaccgtggccaacatcaaggttaccgaaggcccgccgatgctcaaaagcgaaaacgcccgaccttccggctgggtgtacatcgacgtgcgcgaccgtgatttggcgtcggtggtgaaggatttgcgcgaggcgatcaaccagcaggtgcagttgcaaccgggcatgagcctcagctactcggggcagttcgagttcctgga

SEQ ID NO: 18614 - DNA, 775 bp, Homo Sapiens
ggattgcagaccatggcgatgccggggacgatgtccaacagccggtcttggccggcctgcggcaggacgggcagttccagcccctcggcgctcagcaggtcggccgtcaaggcgcccatggcgccggagatcgacgccaccatcaccttgcgtcccacgcgcttgccttccaggaagcgggacaggtaggccaggtcggtcaggtgcacggtatggcgcgcctgcatgacgcccaactgcgagaaggcggcgcgatagatcgcccggttgccggccagcgccgccgtatgcgattcggtcacctgcgagccgcgttcgctttcgccggccttgagcaggatcagcggcttgttggcctggcgcagccgggtggcggcggcgatgaatttcgggccgtctcgcagaccctcgacgtagccggcgatggccttggtggcggtatctgacgccagatagtcgaggtaatccgcatagtccacgcaggcttcgttgccggtgttgatgaaatggcggaagcgcatgttcatcatccagcccatgacatacaggtcggcacacatgctgccgctctgagtcaccaggctcagcgttcccgtctgctcgtcgggcggaaacgcgcggaaggtcggggacgaacgaagtgatggcccgggtttgcagattggccaggcccatgcagttcgggccgatcacctgcatgccggtgcgacggcagaattcgaccagctcgttctgtcgttgcacgcccgcgcctccgactttcgcgaagcccgcc

SEQ ID NO: 18615 - DNA, 624 bp, Homo Sapiens
ccacgcgtccgatatttggctcacggttctgcaggctgtacagtaagcatagtggcttttcctttggggaggcctcaggaagcttccaatcatggcagaagacaaagggggagcaaggcacttcacatggctgtattaggaggcagagagaggatggaggtgccacacacttgaacaaccagatctcgtgagaactcattcactgtctgaggacagcacccaggtgttaaaccattcacgaggaactgtccccatgatccagtaacctcccaccaggtcccacctccaacattagggattagaattcagcatgagattgggcagacacacagatccaaaccatatcaggcatccatcccaggtgcagtcattaaaagttttctattcaggcttttgaggtgattgtggtggggccccttcaaggtgggggctggacaccagaggacccaaccacatgtttggaggattaggattttcagccccaccctcaaacctctggagaggggagggggttggagtttaagttcaatcatgtgatcaataatccaatccatcatgactatgtaatgaggccttgataaaaactcttagccaatgaggcttacagaggttctgggttgtgct

SEQ ID NO: 18616 - DNA, 837 bp, Homo Sapiens
ccacgcgtccggtcacattgagtaaaataaaagactgcagtttgtgggaagaattatttttcacggtgctactaatcctgctgtatcccgggtttttaatataaaggtgttaagcttattttgctttgtaagtaaagaatgtgtatattgtgaacagccttttagctcaaaatgttgagtcatttacatatgacatagcatgaatcactctttacagaaaatgtaggaaaccctagaatacagacagcaatattttatattcatgtttatcaaagtgagaggacttatattcctacatcaagttactactgagagtaaatttattttgagttttatcccgtaagttctgttttgattttttttaaaaaacaaacccttttagtcactttaatcagaattttaaatgttcatgttacataccaaattataatatctaatggagcaatttgtcttttgctatattctccaagattatctcttaagaccatatgccccctgttttaatgtttcttacatcttgtttttactcatttctgactggacaaagttcttccaaacaattctgagaaacaaaaacacacacgcagaattaacaattcttttccctgtgcttcttatgtaagaatcctcctgtggcctctgcttgtacagaactgggaaacaacacttggttagtctcttttaagttacaaaaagccaattgatgtttcttattctttttaaattttaaatattttgttataaatactcacaggataccttatttccctagctatcatctcctgacttaatgttttttaaacccaccaatataaatttaattaaagatatatgttg

SEQ ID NO: 18617 - DNA, 327 bp, Homo Sapiens
catgctggcgccgggcgaaatgctggtcggctacaccgacggcatcaccgaggccgtcaatccgcagaatgcgcagtatggcgatccgcgcctgctggccgtgctgtccaatccccccgtgcccgcggccaacctggccaagcgtctgctggaagacgtgcaggcgttcgccgacggcgcggaacaatccgatgacatcacattgatcgtgatccgccgcccatgaagacatcgttgcccaccctattgctgagcctggccctgctggcgcccgccgcgagcctggcccaggcggcgacgcccgcggccagccaacccacggcaggc

SEQ ID NO: 18618 - DNA, 375 bp, Homo Sapiens
gaggggggcgcctcctccatgttatcgatgtatttttcttcgctgtcgcgccccttctttcttttctataggtggccccatatatttatttcgcgcccctttttaccacccgccgggggggagacaacccgcgtgttccccgtgtgggggtaaaaggagaggggcgcgctgggtgcgcccctctcaccaggtgcccccgcctgtggtgcgagcgtgtccgtccctgtcgcgggctaaatgctgcgcgggtgtggtgtgtatgccccgctgtctcccctcttgtgtccgcgccggagcgcgtgttttcttttattctccttttatggtgcgcgcgtgcggcgggttcactgcgtaaaatattagcggggcgccctt

SEQ ID NO: 18619 - DNA, 383 bp, Homo Sapiens
gcgaatttaacaaaatataaacgctacatatatagttgcaccttcgggaaatgtgcccgacccctatttgttattttcctaatacctcaatatgtatcggctcatgaacattaccctgataatgctcataatattgaaaagaaagagtagaattcaacttttcggtcgccccctatcttttttgcgcaattgtgcttctggtttggtccacaaaacccctgtgaaattaaaaatgctgaaatcggttggtgcacgattggtactatccaactcgaatctccaccacggataatcctggaagtttttcccccgaaaccgttttcatagtatgaacacttttatgtcgtcattttggcccgcttattatctctaatgtacccccg

SEQ ID NO: 18620 - DNA, 619 bp, Homo Sapiens
gcacgaaggcgtcggtgtccacgtggctggatgcggcctatccgggaaccgttgcggcttcctcggacggcgtgatgttgacggtagagaagggtcgcgaacatcccggctgcatcagtgtgttgatgcccgaaatcgccaccggtctggacctgacccagaccgctgccaagaagtggattggcctggtgaccgtttcggccgacaaggctttcctgctgaagaccccggacgccaaggccagtcatcgtgcctacgtggtcaaggacgatgtggtcgcggtgctggccttcaaggaaggctgggcccaggtcgagtacatcaatggcgaaggccgctcttccaagggctggatcagccaggaccagtacgccaggctggcccctaaaggctgaagctgttccccgcgccgcggtgtgccaggcacgccgcggcttttttacgcccgcaactcaggccttgttacggttgaacagcttgcggataacggcaaacagcgcgacgactcccaccaccaggaacttcttcgccgccagcaggaagatgccgatcttggcgaacagctcggccttggccgcgatcccgcctgcaaccagtgcggcaaggccgtatgtcgcga

SEQ ID NO: 18621 - DNA, 202 bp, Homo Sapiens
tctcaataacctgcggattgtcctcaggatccgattctaagtagacccgcgtgcgacgggcgtcctcttctacaatatcgtctcggccgcttcactggtcctcgcttaactacgcctggacgggaaaaaccatgtcttcaaccaagtcacccaccttgcattccatgcccctttctccacctggcgtagaatggaaaaagcc

SEQ ID NO: 18622 - DNA, 453 bp, Homo Sapiens
ccacgcgtccgatctaatgcctcaagcaaatttattagagtttcagatgaatatatatttttgtaactggcaagtaaatgagtagaacagagctttttgcctaaaaatatttttataagtactcatttacatagtattcattattttaaatgacaaaatatcaaattggttctataaatagtaattgttttgaatatatccatacttaacatcatatgaaatccaaaatttaatgataaatttcatctggatgtgttattataaaagtcatctttttttcctttgtaaaatatccatgtaacatagcttccattactccatattttatgtatggttaaaattatcaaagtgcattatgtattttatattgtttatttttgtctgcatgaaagattggaatagtaaccgtgtatgataaatgttaataataataaagtgaaatgtagtatgacc

SEQ ID NO: 18623 - DNA, 425 bp, Homo Sapiens
  misc_feature (241)..(266): n is a, c, g, or t
ctggccgcggtcgcaatgcagctgcaggatgctctggccatgcgcgtgatccaccgacagcacgtagacgccgatgcgttcgcccagttcgcggtgcagggccaaccgcaccttcagggcgtccagcgtgtcgatcctgacggtcagggaaaccatttccgcgggctgcggcgcgggggccggcgcggagcggtcaaacgaggcgtacgtgctgcgttcttggcggggaatcatggcggtnnnnnnnnnnnnnnnnnnnnnnnnnncttgcgcgtatccggttggttgatgacgattccactatagaaagcgggccgtaaaacctgccgataaatgcgggcgcggcgcgtaaaaagcgcgtcaacgcccggacgcgctcagaacgtcttggtcagcgacagcaggccggtggcgcggcccatgta

SEQ ID NO: 18624 - DNA, 692 bp, Homo Sapiens
  misc_feature (349)..(445): n is a, c, g, or t
ccattgctccgggccgagccagatgccccggacctgaatcgctggcaggccccaacccggggaccctgggcctgcaacctgttttcttttggaatggacgccggcaggacgggcgcgatgtcctggtgacgcgttatttctatgccaacccggcggcggggtacaagaagatgcgggcacctgctcggcctgcgccaacctgggcggctggctgcggcatctgccccatgcgctgcccgccagtttcctggtggagcagggcgaccttctgggccgtccgtgccggctgctgctggacgtgcaggccgagggccgcatcctcgtgggttgccggtatacaagatcgcgnnnnnnnnnnnnnnnnnnnnnnnnnnnnnnnnnnnnnnnnnnnnnnnnnnnnnnnnnnnnnnnnnnnnnnnnnnnnnnnnnnnnnnnnnnnnnnnnnactggagatacctctgttaatcaacttgcactggatacccctttgaccggatggcgtatgaccgaacaggaccgctccgatcgccacatccctcaagtgcgcatgctgaatgagaaaatgttacacgccctgtctaggctcattatggccggtgcgagtggccgtttctcccacatatgaccgctaacttgcaagcaccctaacaccaggatgtttaacttacttcatatacctctcctgcggactt

SEQ ID NO: 18625 - DNA, 499 bp, Homo Sapiens
cctgtcgtcgaacgccaccaggccgccgtggccgatcatggccgagatctggatataggcttcgtagtccagcggcacgtcccactgcgattccggcaggtaggcgcccagcggcccgccgacctgcaccgcgcgcagcggccggccggaggcgctgccgccgccgaaggtgtacagcaggtcgcgcaggctcaggccgaaggccttttccaccagcccgccctgcttgaggttgccggccagctggaacggcagcgtgccgtgcgagcggcccacgccgtagtcgcggtagtaggccgcgcccttggccaggatgatcggcaccgtcgccagcgagatcacgttgttgatgaccgtgggcttgccgaacaggcccgagatcgccggcagcggcggcttggcgcgcaccacgccgcgcttgccctcgatgctttccagcagcgaggtttcctcgccgcagatgtaggcgccggcgcccttgcgcacttccaggtcgaag

SEQ ID NO: 18626 - DNA, 467 bp, Homo Sapiens
ccttcgtcggtcatattgaccacacggtccaccagcaaggcgttgatgctgacctgggcaaactggtccagatactcccccaggatcggcgcgacgaacaattcgccgaacaacacaggtgcggtgaccgtcaagtgcccccatgggatcgagaagctgccggctgctgcttcttcggcctcaaccagctccgcgagaatgcgccggcaatcatccagataacgctggccagcctcgctcaggtgcaagctgcgggtggtgcgtgagagcaactgcgtgccgatacgcgcctccatcgcggcaatcgcacgggtcacgctggggggcgagattttcaggcgccgggccgccgcggcaaagccctgttcttcggcgacggcgaggaaaatctgcatttcctggaaacggtccatgagccctcttaatcgaatgtagcccaccaaaccagtggcttgggagcggttgtg

SEQ ID NO: 18627 - DNA, 378 bp, Homo Sapiens
cccgcggccaggcgccggcggcacaccagcaccgcgcgcgccatctgccagccgccatgcaccacgccggccagcatcaggtacggcacgctgctggaatagaccgcgcggatgttcgccgccgactgttccaggatgaactccaccccggcctcgtaggcctggatcgcgctgtcgaggttgtcgcgcagcaggcgcaggccgtcgcgctcggacgccgcggcgcgcgacgattcggcctcgaccgcccgcagcgtctcgcgcatggcggcgatggcggcataggcggtggcgccggcgtcgcgctgggtcttgcggctgaccaggtcattggcctggatcgcggtggtgccttcgtagatcggcaggatgcgggcg

SEQ ID NO: 18628 - DNA, 911 bp, Homo Sapiens
  misc_feature (66)..(80): n is a, c, g, or t
ccacgcgtccgaaaatcaaacgtctctcattttgcctgccctcatcccctaagatataaaagattnnnnnnnnnnnnnnnactttggagctcattcttcgcaatatttaaaattgtagctctttgcatgtaatttagaacattctgacccatactcaactgctgggagactctgttatttatatttaaaatgttgacagtgagttaggaatttggagcagaaaccatatctaagtctaagtgaaaagacttcctaagtattggtagaactgactgtagtggggctgagtcattattacagtactgtacaggctgcgtagctatctgtagaattgataatggtaataccaggttaaagtgttagcgattcttctgctgtttcagaggtcttgaagtttttgcctgtctgctatggagatagggagttctcccccatttgacccccttagcaaagcacaatacttggctccatcagtctttagtctaagaagtgatatataggatcatggtttgacatcatcttgtgctgattctggttggcttaatggaatcaaattggatgaaggtaattaaatatgaattgtttctgatgctaatagatagttgtacttctgtctgttgggtatgggttgggatgggcggtagcatagctgattgcggtgggggaatttcagatagctgatgatgtggctatctgaaaattgccactacattttttaaaactgaaaagtgatggtaccgccaaatgaaatctgcagcatcctcagactcaatcaggaaatacttaagcattatgctccagggtggttttcttcccttacattgcaactgggactccttgaggcaccttttagaattagtgagccgctagggatttttatactatgctttgacataaaagaaagttgcttg

SEQ ID NO: 18629 - DNA, 791 bp, Homo Sapiens
caagttcagcggcgagttgagtaatttccttcacggtcatctcctggagtggacgggcatttgcctaccctacaggagcccatgagccatgcaagttacaagagactaacgcgcgacggcccggacatacgcctggcaggcgcgcaaggcaatcattgcgttatcgccgtcgtcggtgatgccgataattcgttgagcatgcgccgggtcaagtcgggctcgcggggcgccatgaaccacgctgccgggggtggcggtggctggcattgggcagccgctggctgagtcgctggcgtcgagaaggactgacaaccgcacatcagcagtggccagacgatcccgcaggtgagcctgatcacgctgtgcatcggaaagctcccgggtgtgttgttggtcgcgggcgctgagttgttgctccagtgccagccgtttgtcctgttccaaccgttgttgacgctgagccgacaggctttgttggctcagcgcttcggcgtgcagcacctccaggcgctcaagttggatgccataccgccaagcctgtacctgccaggcaatacccgccgagaccgccgccaacaggaaaaagccaagcaggcgatatgacgtcaggaagcccatagaaccgccttcgcccgagcccacaactgcatacggttttccaagccattgagccgccattgatacgccgggtgatggtggtgaactggtcttgtcagccagttcgttcaagccattgctctgccagaaccacgcggcggattcgcaggcccattgcggttgctccagcaact

SEQ ID NO: 18630 - DNA, 343 bp, Homo Sapiens
atcagcgtcagcggcagtttgtccgcggcaaaattccccgccagcaccaccggtacgttggcaatcaacatgcccagggtcgtgccgataatcaccagccacagttccgggtattgcgccgcgagcatcacggtagcgatctgggtcttgtcgccgatttccgcgaggaagaacgcgatcagggtagtcaggaaggggccgaacttgcgtgcagtactggtttcgtcatcgtcgagtttgtcgggcaccagggtccagagcgccgtggcacagaaactcgccgcgaggatccagtgcaacaccgcatccgagaagaaactcccgaaccaggcccccacggcgc

SEQ ID NO: 18631 - DNA, 850 bp, Homo Sapiens
  misc_feature (291)..(302): n is a, c, g, or t
  misc_feature (735)..(792): n is a, c, g, or t
ccacaaaacgtccgtactaaatgttgtagctactagaccaggtgacctaggtttagagcaaagtatataagccttgtatggactatattagaattttaaaaattgtaattaattccttatcatcattataaaaagcttgatttttttatttgatctaaaaaagcattattccaaagaattttttcaagtagaaatgggagttagttataccagtgttgtttttaactaataaggctattttagaattcagccttgcctgtaaggtctttgagaagggagaggagtaggccnnnnnnnnnnnngtcttgattcctgaatgtgccttatatgctgtgccactcacaccgaggccatcatctcaacattagagttgtgctagattactgcttgactgactagctaggttaggcctaagagtgtttaccgaataatctgcactcactcagtagcccttcttcaggattaaaaacgatgatgacctcatcttagagccctaaagggaaatgcttatgtgggaacaagaaaagtcggtggtactgtcttctgctactactacttagtgctttgctgtgtatagggtgtgttcacatatatctcagttgaatgtcacaagaatccctgaagtgattaaaagtcttgagaggtcaggcaatttttgtaaggctagaaggaaaagtgaggttttagacttcatttcttttaaagttggcaaacaaacattttctgtatggacannnnnnnnnnnnnnnnnnnnnnnnnnnnnnnnnnnnnnnnnnnnnnnnnnnnnnnnnnagtaaattatttcacgctttgcaggctataaaagtgctgcagctccttagctttgctg

SEQ ID NO: 18632 - DNA, 995 bp, Homo Sapiens
ccacgcgtccgcaactcctacaacctctctggggagggtatcttcatggctacctattgaggcattttcctaggaagtctaacttaaagtccccttcccccttaatttcactattttcccacaaacttccttcagtctctctcattacttgatcctaggaaatctttttctactaaagaggaaattctttactcttaagttttaatattttccagtctgaagtactccatatgtgatgctgcaggcaatcaaaacataatctccttaatggtttgaggtttggggaaagaagaatttgagagactaccagattcaaatctttggaccatagcataactcttcctcatgacactcaacacggaataaactgtctgatagaaataaagggaaaggagaagggaaatttcacaagagaagtgtatcagttgatatttcaaaaatagcatctcactgtctacagagattatatatctggtaactttataaatgttttacctaaaataacttctggtattagtagatgtaagatcatattatgagaataaatacagttaatttttatttatttaaaattacatgtgaaaaataaatatctcaattaaaaattattttttcttttattgagaatgccatattttatttgagtaaattatattcaaatgaacatattcaaatatattaatttgaatcaattatatacttttaaggaattagaagcaattcatatgattattataattttcaagttctctgttttaaaatagattttgattataacattttcttttctgcccccaaagagttaataaaatggtagaacctttcttaactagaagtaatttctcaagaaattcaagtgttttcttttttagttttagtacttcattggattgcttttgccctaaatgattttgtcttttctgtaaagcagaaaaaacaacctattgcctttcaccagatagcagttaacaataatctccagtttacattttttt

SEQ ID NO: 18633 - DNA, 890 bp, Homo Sapiens
cccttcctctgtttcgagcagtggctggatcattgcggagtgctgcgatgagcacggtcgatacgctgatagacgactgcgccaacgaacccatccacattcccggatcgatccagccgcacggcttgttgttgacgctgagcgaaccggcgcttgaggtactgcaagccagcagcaacctgaccgtcgctttgggcctgggcgcggaaagtgcgtcgggccaggcgctggccagtgtgctgggtagcaaggccgcagcgcaggtgagccgtgccctggcggacctggacgccgatgaagaggaggtgcatcaactgacgcttgatgggtacgcctacgacatccttctgcatcgtcatcaggggctgctgtttctcgagctggagcggaccatggcccttgagcatcgcgccgtggggcaactcgcccgcacgctgcgccgcttgcagtcagccaagacgctggaaagtttgtaccagacctgcgtcaccgagattcgcagcctcaccgggtatgaccgggtcaccttgtaccgcttcgagcaggaaggccatggcaaggtcatcggtgaggccctcagcgagggcatgcagccgtacctgggattatgtttccctgcttcggacatcccgccccaggctcgtgagttgtaccggctgaactggatccgcgtgattcccgacgccgagtaccagccggtgccgatcctgccggccttgcgccccgacaacggccagcccctggacctcagcttcgccgtattgcgcagcgtgtcgccggtgcactgtcactatctgaaaaacatgggcgtgcgtttcctcctgagcttttcgctgctcaaggacgaccagctctggggcctgatcacctgccggtccccgtgagccgtt

SEQ ID NO: 18634 - DNA, 927 bp, Homo Sapiens
ccccacgcgtccgaaggtcaagcatcaccagaattgctctaagaggtacttggagcacactttgtgtgctttaacaaatccaaattctatctgtttttttagtctgattccagaggtatttcctttataaaactctctgaggttattctaaattaattctttacattatttttctacctattttgagtatcttctatgcgcaagggactaattggcactttttaaaactattaaatgtttgttcatgtaatctagtgtgtgattctatgttacttacttgttcaaacttatctccataaatttatttctctatttaattattatgctcttaggctcagagtttgtgtctctcttttctccttttgtgtccagcattgacctagcccaatagtcagaccatagtagaccctgaattaatattagtgaatggctgattgattgatgatgaccttgtggcttttcttatttctaaattatatattgtaaaaataaaataaattatagtttttcatgctgaataagtgattgtttcaaagtaggcaacaaaaacaattaaaaacattcattgacatctgtagttcaaatatggactaaaatcaacatttgaataagacagcagaggcacaatcttgagagaataagaaaacaagacactgtgatgggttcaaggtgaaaagttttgtgtttttgaaataaaataagtagatggggaactttatagataggccagttgttagaaagaacattatatttcaaattataattttaatggggagcatatattaaaatattaatgaaatgatccatatcttgaattaaatcagtcttttaatctgataaagaattatttggtgaaaattttgatgctttgtagtttatcaatggtgaaaaatttagaatattttgatagcttgtctttggtttttg

SEQ ID NO: 18635 - DNA, 202 bp, Homo Sapiens
ccacgcgtccgcatctaggaaagggcagagctggctgtttccaaaaccctgtgccccacccctccactgttccctcagtcattgtttttaatgcagaaggagacttagagatccttaaaaatttggggttgataatttcttttgtctgacagaaacagttagatgaaaataattctaagttttcacagaagatcaagtcatt

SEQ ID NO: 18636 - DNA, 779 bp, Homo Sapiens
cccgctcgattgagtgtttgcacctgcgcaaggcttagccgcaaccccgtcaagcctgtgtgggtttgtgcatcccgccaaatccacacggcaacgattgcccaatcctctggccaacgcatagaatgcgaaccgttatcaattaagacgcccgcgccaggatgcccatgtcgagcgaccacccactggaccatgccgccatcggccagctctaccatgcccatcattcctggctgcgcggctggttgagccggcgtacgggctgccgtgagcacgccgccgacctggcgcaggaaaccttcgtgcgcctgctcaatgcgcgcaagcagcaagccttgctgcaaccccgggcctacctgagcagcatcgcccgcagcctgatgatcgaccagtatcgccgccgcgaactggagcgtgcctatctggagagtctcgcgcatttcccggaagtcgaggtgccgtcggaagaaacccgcctgctgatcctcgacagcctggagcgcatcgaccgcctgctggaccaactcaagccacgggtgcgcgaagcatttttgctggcgcaactggacggcctgacctgccaacagatcgccctgcgcctgggagtgtccaaggccaccgtggagcgcgacctggccaaggcactgcacgcctgttatcggttgcgttatgccgaagctaatccgccattggtggaccagcgatccagtggatgatcaagctgcggttcaatattgccgatgacgccaccacggccgccttcaacgctggcttgaaac

SEQ ID NO: 18637 - DNA, 909 bp, Homo Sapiens
caaaaaaagtttcccgcgctacatccagcgggatgttatcggtcatgcccccgtccaccagcagccgtccatccagctctaccggggcaaacactgccgggatcgacatgctggcgcggatcacctggggcaggtggcctttgcggaacaccaccttttcaccactggtgatgtcggtggcgacggcgcggaaggggatgggcagcttgtcgaaatcccgtacgttactggtgtgggcaaacatgctttccaacagcaaggccaggttctgaccctggatcacccccagtggcaggcccaggctgccgtcgtcgcggaagctgagtttctgtttgaccaggaaatcccggtcatcctgcttgcgccggaacggtacatcttcccgtggcggcgcgtcggacagggcgagcctccaatcgatgctcaacgcgagtttctccagctcatcgatcttgtagcccgaggcatacagcccgccgatcactgcgcccatgctggtgccggcgatcgcatcgatgtggatgccttgctcctcaagagccttgagcacgccaatgtgcgccaggccacgggcggcaccgccggagagcaccaggccgatcttcgggcgcgggttttcgacggcttggacgaggacagggagcaggcacagcaacaggcaggacaacaggcggcgcatcatcaatctcaagggcaggacgataaaggccggtattatagccactcgatcctttcaacccgccaagcaggagccagtcaattcatgtcagcggccaaacccgagattgtcatcacgtatttgcacccaatgtcagtggttgctgcgcgccgccctggctggcccaggagctgttgagcacctttcgcagacgacctcggcaaagtggccctggagcccgccactgggcg

SEQ ID NO: 18638 - DNA, 385 bp, Homo Sapiens
  misc_feature (219)..(227): n is a, c, g, or t
gcgcaaaaagattgagtggaggagtggtgcctttaggcgcccctccccccttccttaataaagcacttttgtccaaatttgaaaaacatttcgctcgatctcgtctggtgggtaaaaaaaggagcttgaataaataataattaaacccccatttgaaaaaatataaaccctacattgaagggggctcttgtcaggaaaaggcgcaccgacccctattgnnnnnnnnnctatataccatcaatatgcgccactcatgatacaataatctgaaaaatcttcaaattgatgaaaaagaaagaaggatttttcattatttcttgccccccttattacattttgtgggttttttctcttctgtttttccccccctaacatcttggggaaa

SEQ ID NO: 18639 - DNA, 800 bp, Homo Sapiens
cacccacgcgtccgcggacgcgtgggcggacgcgtgggcggacgcgtgggaaaaaagtgctaagggtgtggcccttaaggagacaggaacaaatcatctagttccactagggatgtaactgcccaatggcttcaccttgctcactgcctagacagaaccggtttatcaagacagaggacttgcagtagacaaagagtaattcacgcagagccggctgtgcaagagaccagagttttattattactcaaatcagtctctccaaacattcaggaatcaagagtttttaaggataatttggtgggtgggggaaggccagtgacagagtgttgattggttgggccggagaggaaatcatgggaaattgaagctgtcttcttgcgctgagtcagttcctgggtcggggccacaagagcagatgagccagtacacatggctccgtccagatgaaaaccttcccaggagtggctggataaggcccccaaccccaacacttgacaacctgctgtgcttactggctccccatggccctccgatttcagatttctcagatttctggctttgccagaagactctggcatccctggggcaggtgccttgctcacatctgggaccctgcctcctgggctgtgatcaccagtgctcagctctgccaggccaggtacagcacatagtgctcccagggtggcctgacccgggcagagtggagaaagggctcttgcctcccctatcctagtttctttcctgtccagcctagctcacatagcttcttttggctgccacatcacatgcgggattcatgg

SEQ ID NO: 18640 - DNA, 885 bp, Homo Sapiens
atcgccacgctggtgctgatctacgtgatgctgggcctgggcctgaacatcgtggtcggtttcgccgggctgctggacctgggcttcgtcggcttctacgccgtcggcgcctatacctacgccttgctgtaccactggggcggctggagcttctgggaggcgctgccgttctcgggcgcgatggccgcgctgttcggcttcatcctgggcttcccggtgctgcgcctgcgcggcgactacctggccatcgtgacgctgggcttcggcgaaatgatccgcctgttgctgatcaacctgaacacgctcacgggcggtccggacggtatctcgggcattcccaagccgtcggtgttcggcctggagatgacgcgtcgcgccagcacggaagggggcaccacgttccatgacttcttcggcctgacgttccagaaccagcacatggtgatctatctgtacatgatggcgctgctgctggcgctggtgacgctgttcgtctcgacgcgcctgatccgcatgccggtcggccgcgcctgggaggcgctgcgcgaggacgagatcgcctgccgttcgctgggcctgaacccgacccgcatcaagctgtcggcgttcacgctgggcgcgaccttcgccggtttcggcggcgcgttcttcgcggcgcgccagggcatggtcaaccccgaatccttcaccttcatcgagtctgcgctgatcctggcgatcgtggtgctgggcggcatggggtcgcacgtgggcgtgatccctcgccgccatccctgctgacggtgctgcccgagctggcgcgcgagtttcgccgagtaccgggatgctgatgttcggtcttggtgatggtattgatgatgatgtggcgtccgccaggggttgttt

SEQ ID NO: 18641 - DNA, 266 bp, Homo Sapiens
cgctaaaactggcgcagtaccgcgatccgggctttgtccgcctgggcatggagatcctggccgaggcggtgcgcaatccgcgggtacacgcgctggtcatggcgaacgaaagcgaacgcaaggcgtcgctgacggcgctgctggcggcggtctggcagggcctgccgccggacgccatgccgcggcccgtggcggaaatggccgacctgctgttgctgctgctggacggcatctacagccggtcggtggtggatccgcggttcgac

SEQ ID NO: 18642 - DNA, 736 bp, Homo Sapiens
catcgcccacgtattcggctttcatcacctgatgcttgccaccgtccggttgttcgccacgcccgcacaatggcaaacctggttcagcctgacggccagcaacaactggttctggggcaacaccctgaacccgctggacacccgcacggtggtcaagcgccacacgggctggcgggaattctcgggacagaagaacttctgctccggggccaacgactcggagatgctgatcgcctcggccatcgatgaaagcgccggcggcaagttgctgatcgcggcgattcccagcgcccgcagcgggatcatcctgcacaacgactggaacaacatgggccagcgccagaccgacagcggcagcgtgaccttcaagcgcgtacgcgtggaagagtccgacctgctgctggacccggggccgttgagcacgccgttcgcctgcctgcgcccgctgattgcgcaactgcacttcgcgaatatcttcctcggtatcgccgagggcgcattcgaagaagcgcgccaatacaccctggaagaagcccgcccgtggttccgctccagcgccagccacagcacccaggacccttacatcctcagccactacggcgacttctgggtggcgctgcaaagcacccgcctgttggtggagcgcgccgtgaggtactggacgcggcatgggccaagggctcggccctgaccaacgaggacgcggcacagctgcgattgccatcgccaccgcaaa

SEQ ID NO: 18643 - DNA, 477 bp, Homo Sapiens
tcaccggtgccgccctccatgctctgctggtcctgcacgcggcgcagcagggagatctggtcgcgcagttcggcggcgcgctcgaaatccagggtgctggccgcttgctccatggcgccggacagttcatcggccagggcattgctgcggccttctaggaacattaccgaatggcgcacgtcctcggcgtattccgacggctcaaccaggcctacgcatggcgccttgcagcgtttgatctggtactgcaggcatgggcggttgcggttcttgtagaaactgtcttcgcactggcgcacgaaaaacgccttttgcaacaggctcaggctttcgcggatggcgccggcgctggggtaaggcccgaagtacttgcccttctgcttcttggcaccgcgatggatgctcaggcgtgggaagtcgccgtccgagagaaacacgtacgggtaggacttatcgtcacgcagcaggatgttatag

SEQ ID NO: 18644 - DNA, 366 bp, Homo Sapiens
  misc_feature (258)..(291): n is a, c, g, or t
tcagaagccacatttggccaggcctcccgccttggtaaatgctgtactctttgcatcaagtgtgctagtcatccttccccacttggaaaattcctatgcatcttgcaggcctgacataagcatttcctctgtgaaacctcctttgctccactcaaggagagtcatctaacttccactttcgtgtcaccactgtaattacaacctacctctattgtatgtcacttaaatcgtactgtattgttttatttttcaaaagtnnnnnnnnnnnnnnnnnnnnnnnnnnnnnnnnnnaaggaacctttttattttttgcatctccatagcatagtttttggcatatgaatgtttaataaatgtttgttgaat

SEQ ID NO: 18645 - DNA, 860 bp, Homo Sapiens
accccggatgaccgctgctgctacatgaactcgtttcaccccactatttcctctgaatcggtttgaagacctgcctggtatcaggtgcggtattccgcgttgatcttcacgtactcgtgggacaggtcggtggtccagatggtttcgctgcactcaccgcggcccaattcgatacggatggtgatttcttcctgctgcatcaccgcagaaccctgggcttcggtgtacgtctcggcccgggcgccacggctggcgatgcacacctcgccgaggaacacatcgatcttgctcacgtccaggttcggcacaccggcacgccccacagcggccaggatacggccccagtttgggtcggaggcaaacagtgcagtcttgatcagcggcgagtgggccacggtgtagccgacgtccaggcattcctgatggttgccgccgccgttgacttcaaccgtcacaaacttggtggcgccttcgccatcacgcacaatggcttgggccacgtccatgcacacttcgaacaccgcctgcttcaaggctgcgaaatacgcgccgttggacgaggtgatttccggcaggtcggcctggccggtggcgatcaacatgcagcagtcgttggtcgaggtatcgccgtcgatggtgatgcggttgaacgacttgttggcgccgtcgagcatcaggttttgcagcacatcgcgagagactttggcgtcggtggcgatatagccgagcatggtcgcccatgttcgggcgaaatcatgccagcacctttgctgatgccggtgacagtcacggtgacgcctttcgtgcaccaactggcggctcgcgccttttaggcagggtgtcagtggtcatgatgcccg

SEQ ID NO: 18646 - DNA, 722 bp, Homo Sapiens
tacatgttcaccggctggtttgccggtgcgatggaccagattctcgaagcccgcggcagcaagatccgcaccgttgcgcaacaggtctacggcggctccgaagagggccacgacgacggcctgttcaccgtcaagccgttgtaagtcgaggacccagccatggctttcgaagcaatgtttgcgccgatccagatcggcaaactgaccatccgcaaccgcgtgctcagtaccgcccacgccgaggtgtatgccaccgacggcgggatgaccaccgaccgctatgtgaagtactacgaagagaaagccaagggcggtattggcctggcgatctgtggcggttcctcggtggtcgccatcgacagcccccaggaatggtggagttcggtgaacctgtccaccgaccgcatcatcccgcacttccagaacctggccgacgccatgcacaagcatggcgccaagatcatgatccagattacccacatgggccgtcgctcgcgttgggatggctttaactggccgaccctgatgtcgacgtccggcgtgcgtgagccggtgcaccgtgccacctgcaagaccatcgagccggaagagatctgggcgtgtgatcggcaactacgccagcgccgccaagcgtgccaaggcgggtggcctggacggtgtggaactgtccgccgtgcaccagcacatgatcgaccagttctggagctcacgggtcaacaaac

SEQ ID NO: 18647 - DNA, 295 bp, Homo Sapiens
caatcctttgatttaagagaattggccgatttcggcctatgggctaaattgagctgagtaacacaatttcacgcgtaagtttacatatattaagccttaggattagtgggcacttccggagagtgtgcgcggaccctatttgttaatatcctaagtacatccaatgtgatccgctcatgagacaatacccgtataatggtgcataagaggagaagctgatatatagatattcaaatttcgagtcgcttacatccctatatgcgcacttcactctgtggttgctccacaaaggtgg

SEQ ID NO: 18648 - DNA, 770 bp, Homo Sapiens
tcctaactttcctagttagaaatataattaacttttattggctattagtagctaaaattgcccttatttttgcttctgtggcctcattttttttctcggttattcagtatttaaattatggcttagatgtcttcaatgctatagtcctgaaaattaatgatctacgttgtgcagcagtgatgggatctgataaactgagtctgatgatggagtttagatttatttcctttaccttgcatttggaactttgaatctcttaaatgtggttttggtctagtccactggttctcacgttgtaatgtgcatcagaatcttctgaagacacagattgctgattatgtagacctggggtggaggtccaagaatgtgcattccttgcaaattcccaggtggtgatgctgcagagccacactttgagaatcactagtataatccagtatgctcttccagcatcacaccttccttcctgagaatcacaggagttgtgaactgcagattagcattggggagaatttagatcaaactaatttgtagaatcaaggaggtcaagtaaggtcacaggggcacttgggttgagccagggttttagcccaggtcttctgacaactgcctcatgtccttaccacaaaggagctgctatcctttgcctttccccaaagagtgaagactgcttaaagctcaaggatctttcttgaatttgtgaaatttgttcaggcagtgaaaagcaaaaactatggttcacattgactttttgtatgatcattgtcttt

SEQ ID NO: 18649 - DNA, 579 bp, Homo Sapiens
  misc_feature (62)..(375): n is a, c, g, or t
ccccacgcgtccgctcaaataaataagataataaaatccagttccctaaaatgtgcctgatnnnnnnnnnnnnnnnnnnnnnnnnnnnnnnnnnnnnnnnnnnnnnnnnnnnnnnnnnnnnnnnnnnnnnnnnnnnnnnnnnnnnnnnnnnnnnnnnnnnnnnnnnnnnnnnnnnnnnnnnnnnnnnnnnnnnnnnnnnnnnnnnnnnnnnnnnnnnnnnnnnnnnnnnnnnnnnnnnnnnnnnnnnnnnnnnnnnnnnnnnnnnnnnnnnnnnnnnnnnnnnnnnnnnnnnnnnnnnnnnnnnnnnnnnnnnnnnnnnnnnnnnnnnnnnnnnnnnnnnnnnnnnnnnnnnnnnnnnnnnnnnnnnnnnnnnnntataagtaatgaatgaatattatgtcaatattctaagtcagaatgttactgtaatactttttaattctcattccatttaaaataactggttaattttcaaatcataatgaaatttttacaaatttatgtgtagtacaaagcatgcatatacattcatatgtattatatgtatatatagcctttaaaaatatttatgagctttat

SEQ ID NO: 18650 - DNA, 760 bp, Homo Sapiens
  misc_feature (491)..(654): n is a, c, g, or t
ccacgcgtccgcggacgcgtgggtgcactgtcagcctgattgtagcagaacattagttcatcccatctgtctccacttgaaaatctccagggactcagtgccaagcccaaacttctttactgagcctctaagcctctaagcctctctaccatctgacccaccattccagggtggctaccgagacaaaatggagctccaggccattggagccacagcgctgccttcctcagaaagcttgtattccttccaactctgaaacataaagtaatgggaaggactcatcttttccaatttaaaatcccctttctacaggcatatttttaaaatgttgagatcacgtgcagtctgggtgataacatgattcacatgaagttcactataaaacttttagggaggtaagcatttcctagcctcctttgctattgttacttttagctacggtaatcgttggcacgttgagttcagctaaaagcagtgcgccgggaagcgannnnnnnnnnnnnnnnnnnnnnnnnnnnnnnnnnnnnnnnnnnnnnnnnnnnnnnnnnnnnnnnnnnnnnnnnnnnnnnnnnnnnnnnnnnnnnnnnnnnnnnnnnnnnnnnnnnnnnnnnnnnnnnnnnnnnnnnnnnnnnnnnnnnnnnnnnnnnnnnnnnntttcccagaaagtggttagatcaatgtaaatgcgcattacaaaggccgtatgcatttcagtgcattgttcctgatggtgagctgccagcagtatcagagtgactta

SEQ ID NO: 18651 - DNA, 890 bp, Homo Sapiens
  misc_feature (383)..(421): n is a, c, g, or t
ccacgcgtccggatttaattacatagagcagctttccatttcctttgacacaggcaagcaaatagaataagattagcacactagagaggggtgaatagtttagtgtttgaatttaccttctgtaatatgtttgggagagggcttaatagaattgctgctacagtctacttcccttttgtttcccatgtattttttcatcggcttgcatcacgtggatttatagattaaagtgaaaaacccgggatatctgtgttattctctccatcattctgaaattgctggagaaaaaattggcttttaatttatacactctcgtgttcaaaatgattatcatctcacaaatcatacagtgtgcattagactgcttctcaaacttcagtgtnnnnnnnnnnnnnnnnnnnnnnnnnnnnnnnnnnnnnnngcagatctagggtggggccagcttttctgcatttttaacaagctccagatgataatgatgcttctggcccaggaccatatcttgagtaggaaggaattaggatactatatttggacagtaaacattcttcctgcagtgagactgaggctggtagtcaaggccatggctgggaaataactattcttaaattgggatgcatcatccaagtagaacagcatcacatgttataccatctagagctactgggttaagtttgcaaatacttcgtatagatcacagttatctttatcccagtaaagttctactccagtttttcacttccaatcatttaagtagttttaaagtaccatttaacaagtatttactctagattgtggagcacgcttgaaatatgagtgtacgcttctgcacgcccctgtgtttccagctctctattggaggcatcatcattctgaaggataccattgaa

SEQ ID NO: 18652 - DNA, 941 bp, Homo Sapiens
cggccttcttcgccaagcacagcgtcagcgcgctgctggaccagagcgactactggctggaatatcagggccgcctgaccgagccgatgagctacgacgccgaaaccgaccgttacaagcccatcagctgggaatcggctttcgacctgatcggcaagcacctcaatgcgctgccaaacccggacatggccgagttctatacctcgggccgggccagcaacgaggcggcttacctgtatcaactgttcgtgcgtgcctacggcaccaacaacttcccggactgctcgaacatgtgccacgaagccagcggcgtcgccctggcgcaaagcgtgggcgtgggcaaaggcaccgtaaccttcgatgacttcgagcatgcggacgcgattttcgtctggggccagaaccccggcaccaaccatccacgtatgctcgagccattacgtgaggcggtaaaacgcggcgcccaggtggtgtgcatcaacccgctgaaagagcgtggcctggagcgtttccagcacccgcaacacccgctggaaatgctcaccaacggcgacaaaccaaccaacactgcctacttccgcccggcgctgggaggcgacatggccatcctgcggggcatggccaagttcctgctgctgtgggaacgccaggcccaggccgaaggcaaagaggccgtgttcgaccacgacttccttaatgaacacaccgccaacgtgctggattacctgggcaagatcgacgacacctcatgggatgagatcgtcgagcagtccggcctgaccctgggtggagatcgagcaagcggcgcgcatgtacgccaaaggcaagaacgtgatcatgtgctgggcgatggggcatcacccaacatcggccactcggtgccgaccatccaggaaatcgccaacctgatgctgctgcgcggcaacatcgggccgcccggg

SEQ ID NO: 18653 - DNA, 271 bp, Homo Sapiens
cccatggccggaatgcggttgttgggcgcgatggccgggaaccccggcttgaactggtctcccttgctgatgttgaccgggtggatctcgtacggcagcccggtttcttcctttaagatcgtgatcttgtggccgttgggggtggtccagtaatagagatcgattgtggggattccttagcgtcttggcgccgccggccagagccggcggatcggaaggcccatgatagcggcgccccgggcgggcggccgaatacctgggggcgcggtgc

SEQ ID NO: 18654 - DNA, 729 bp, Homo Sapiens
cccatcctccggaccctgaccgtaccttcctgtattcaaggaggtccaatccttaaacccctggaaggacacccggctaaaggtcttcatggcttcatcgtccgctcgagcaaacagcaataaaaagttgctgacctgcccaagttcctgcacaacatgttgttttgtccaagatctcacctgcacaacctggaaacatacatctaacagaatatcctagattgggcggaaaaaattttcgggagcattcctctgcctttttctctggtaagcatgcttgtcgaaagcgaaataatcgacatgcgttatttggcagatatgtctaaatttggatcattgcccctgtttgaacttgctggtctcttgggatttggcgcccgaaaggtgttggcttaggaatatgctgaagctgaatccctttttttaaaaatcgattccgtggggttggttttggtcctacagattgcttgccctgcctccttaggtgggaggaatgcaatttaaagctcggatttactgagaaaggagagtctgggccttggaattcctaagttctgtgtctgtgacgttcgaaatgttctaaaccactgaatatgatctcatctgacattccaagatgtctttaaactacaagaactgcaatggcactatggagccgggcatgcccgagtccttcagcgtgttgatcaaagaaattcgttccctcggcatcgatatcgatctggaacc

SEQ ID NO: 18655 - DNA, 795 bp, Homo Sapiens
gcgactacgtcgagagctggcagccccatcccatgtcgcccgccgccctggagcgcgcccgcgagatcgccctggccgtgacggccgagctgggcggcctgggcattttcggcgtcgagctgttcgtggccggcgaccaggtctggttctccgaggtcagcccgcgcccgcacgataccggcatggtgaccatgatcacccaggcccagaacgaattcgagctgcacgcccgcgccctgctgggcctgccggtggacacctcgctgcgccagcccggcgccagcagcgtcatctatggcggggtcgaggccaaggccgtgtcgttccacaacgtcgcccaggcgctggtcgagcccggcaccgacatccgcctgttcggcaagcccgaatccttcgtcaagcgccgcatgggcgtgggcctggcggtcgccgaggacgtggccgccgcgcgcgccaaggccaagcgcgtctccgccgccgtgaccgtcaaggctggctgacccgttggtcagtcccgggcgcgccagccgcggcgccccggatttcccgttgcttcccagccacccgccgacaggcgggtggctttttttcgtcgtgcgcccacaacagattgcgactgatttcgggggcggagcgacagaattgtcatcccttgcggctatacccctgtcatcggtgtggttttgtgttttcgcacagtttgttcgataatttcacgaatttctgaaagcggcgtaactatttatgtttgccgtcgttgcattggttggcctggatggatcatggtgcttaccc

SEQ ID NO: 18656 - DNA, 917 bp, Homo Sapiens
ccgtggacatcccccgtgatgccctggtggtgttcaccggcgtgtcaggctccggcaagtcctcgctggcattctccaccgtctacgccgaagcccagcgccgctacttcgaatccgtcgcgccctatgcccgtcgcctgatcgaccaggttggtgtgcccgacgtcgactccatcgaaggcctgccacctgccgtggccctgcaacagcagcgcggcacacccagcacacggtcctcagtgggcagcgtcaccaccttgtccagcctgatccgcatgctctactcccgcgccggcagctacccggcggggcaaccgatgctgtacgccgaggacttttcccccaacctgccccaaggcgcgtgcccgcaatgccacggcctgggccgggtgtacgaagtgaccgaagccctgatggtgcccgatccttccctcaccatccgccagcgcgccgtagcgtcctggccgctggcgtggcaaggccagaaccagcgcgacatccttgtcaccttgggctacgacgtcgacatcccatggagagatctgccgaaaaagcagcgcgactggatcctcttcaccgaagaaacccccaccgtcccggtatatgccggcttcacgcccgcgcaaacccgcgacgccctcaaacgcaaactcgaacccagctaccaaggcaccttcaccggtgctcgacgctacatcctgcacaccttcacccatcccaaagcgccctgatgaaaaagcgcgtgtcgcaattcatgcaaggcagcccatgcccgctgtgcgaaggcaaacgcctgaacaaggccgcgctgtcggtgaaatttgcccggcgtggacattggcgagctgtcgcaaatgtccctgctgcaactcgccgagctcctgcgcccggtggctgaaaggcagggcgataaaaaa

SEQ ID NO: 18657 - DNA, 824 bp, Homo Sapiens
cctaaatcacggtgggttcgcgcgaaatctcggccggcaacacccacctgtccagccgcacggaagagcaggcggcctcgctggaagagaccgccgcctcgatggaagaactggcctcgaccgtcaagcagaacgccgacaacgcgcgccaggccaatcagctggcggccagcgcctcggacgtggccgagcgcggcggttcggcggtggccgaagtggtcaacacgatgcagggcatctcggccagctcgcgcaagatctcggaaatcgtgtcggtcatcgacggtattgccttccagaccaacatcctggcgctgaacgcggcggtggaagcggcgcgtgccggcgaacagggtaagggctttgcggtggtggcgggcgaagtgcgctcgctggcgcagcgcagcgcgcaggcggccaaggaaatcaagggcctgatcgaggattccgtgaccaaggtgggcgcggggtcacagcaggtggaacgcgccggggcgacgatgcaagagatcgtggcgtcggtcaagcgcgtgacggacatcatgggcgagatctcggcggcgtccgaagagcagtccagcggcatcgaccaggtgaaccgcgcggtgtcgcagatggacgaagtgacgcagcagaacgcggcgctggtggaagaaccgccgccgcggcccggctcgctgcagaacaggcgcatcgcctgtccgaggcggtggccgtgttccagatcaacgctggcgaattgatcgaagtgccggccaccagctgggcggctaccagcgccgacgttgacgcagattgatcatccggggcgcagccccgtgatg

SEQ ID NO: 18658 - DNA, 413 bp, Homo Sapiens
ccacgcgtccgcggacgcgtgggtgaatccccaatttgtatcctcgtggcattgtagttttactttgcattgctctgattattctacattgcaccttggctggttagcagcaccttctgtgataccaaggggactgtgcaggtggaggcatgctgcccccttcacagccacagcccatttgcctttcatgcctttagacagaaaaggaacacagggaatccatggaggttcaactcgttgtcgtgacgtcatgttttggggtctcgaaggacaaaatgcaactgagtcagtgggtggagcggcagcattgcccaaaaatctcttcactgagcaacccctggagatcactttagaggtgtgggctggaagtgccttccagccttacctaggattcagctctttaacaccttttt

SEQ ID NO: 18659 - DNA, 333 bp, Homo Sapiens
ccacgcgtccgggccagtggaccaggggaaagggaagaggacaggtcctcctatatgttctctatgccttttagacccctggtctgtgttcctttggcccctcatatgtggatcgttgataaatgagaaatagaagacctcccaggaatgggtactgtctgaaaggaagactggctgagcgctaccagggaggggttggaaaatgcttatctgtaaacaatattgatcctggaattgttggaaaaaatcaaattaaaggcaaaattcttgaaaagagaattaatgtgcgtggtgggcacattaagcactctaaaacccgagatagcttcctga

SEQ ID NO: 18660 - DNA, 943 bp, Homo Sapiens
caccgagagattcacctcccccgccgggccactcatccgcgtcgtacggctttggctgtccgcatggaatgcaagggtgaggtcctcagcattgcgtactttcaatttgccgctgaggtccaccgaagacaacacactggaatcaaactgcgtcagcttgctcagctcgagtttcggcggctgggcggccaggccgtcaatagcaccctggaaggcttcgcccaacttggcgatttccttgagctcggcggcgctgagggtgccgccgtccaccttggcctgcgcggccaggccaccggactggctggccaagctgaaggtgacggtcttgccgctggccgtcttgacggtgaggctgaccaggttgtctgccttgctgtggagcagcgcctgttgaatcttgagctcgtcggggctttgggtcttggacgaagtagtggtcagcgccgactgggaaatgtcggtaccgctcttcgcaaattgctcgatcagggtagcgcccaggccgctgaagcccgtgcctctgggcagcgcatagaaattcgtgttgatcgctttagtgaccgcatcgtagctgtcactttcccaggcgttgatcgacccatggccgggcaattggccgttacgggagtaggtctcggcttgaacctccaccgtgacattaccaagctgaccaccgaggaaggacgcacggcagtggcgtccgtttcgggcgtcagcgttgctggcggcgtaacggcgggtcgattgataaggggaatggcggagctgatcggcgaaagcgtagtcatgacgatccttgtcttgagctggattgctcctaatctaaccagacaggcagggtttggtagccacgattgataccaataaatagccaaaagcaacgtcagaaaatggactctttgccctccttctggtgcgtcagagcggtaagtggaccgaa

SEQ ID NO: 18661 - DNA, 588 bp, Homo Sapiens
gggggcgcgccctcaagagtgcgcaaatttgtcccccagtttggttttttgggccttctttttaagagaccccgagtggaaaaccctgggcgttacctatttaaatcgcctgggggaacagcccgtgtatccactagatgtaattgccaaagagacgcgcaatgtgcactcctccatatatgcgcccattaaggggggaaggtggaggggtaccgcaacggtgacagacccctgggcgggtctgtatcacttgcttctttcacttactctttagtgtctggcagcctcggctatgttttctttcgagtttttatccagggtctccattgatgtttccatgtatcgtatccggagctctctttagatgactgattaggttgatggtttattatagaaaaagattgatagatgtagtgcgcatttaggttctcattccagtataaagatttaatcttgtgcaaatgaaacaacctctaaataattcggttattcgtatgtaaaccatgtactctcctagttggagtattgtttaataaggaggatatcacaactttctacagcttataaacagagttatgctcaactttt

SEQ ID NO: 18662 - DNA, 239 bp, Homo Sapiens
cgattccgcttattgggttaacaatattaccgctactatttagtggcactttcgagggagtgtgcgcagaccactatagttattttcgaaatactcattagtatcgcccaagagacattaaccttgtaatgctccatatattagataggaagatgatagtattcattttccgtggtgcctatttctctattgcgcattattgcttcatgattttgccacacaaaccttggggaaataaa

SEQ ID NO: 18663 - DNA, 242 bp, Homo Sapiens
cacccacgcgtccggtttagaattataaattgttaaaaccttgataattgtcatttaattatatttcaggtgtcctgaacaggtcactagactctacattgggcagcctttaaatatgattctttgtaatgctaaatagcctttttttctctttttactgcaacttaatatttctatttagaacacagaaaatgaaaatatttagaataagttgtacatttgatgacaaataaatcactatt

SEQ ID NO: 18664 - DNA, 221 bp, Homo Sapiens
ttacgtattaaacaaaatttacggcaattttacaaatataacgcttaaagttggtgaccctttctgggaatgtgcgcggacccctattgttattctcaatagaataccatatgtagcgctctgaaacataccctggagaaagctctaataatatgataaggagagagcgatttctactcgtcggtgtccgcctattccctattgcgcttttggcttcgtgt

SEQ ID NO: 18665 - DNA, 549 bp, Homo Sapiens
  misc_feature (156)..(482): n is a, c, g, or t
ccacgcgtccgcgcaggaagacctggatagtgaggatgagagtgagaactcccactagtgagtgaggttctcaaaggggggaatgaggagagaggccatttctcttactgcctcctgtctccaaagaaaaggaggaagtaaaaactgaaaaataannnnnnnnnnnnnnnnnnnnnnnnnnnnnnnnnnnnnnnnnnnnnnnnnnnnnnnnnnnnnnnnnnnnnnnnnnnnnnnnnnnnnnnnnnnnnnnnnnnnnnnnnnnnnnnnnnnnnnnnnnnnnnnnnnnnnnnnnnnnnnnnnnnnnnnnnnnnnnnnnnnnnnnnnnnnnnnnnnnnnnnnnnnnnnnnnnnnnnnnnnnnnnnnnnnnnnnnnnnnnnnnnnnnnnnnnnnnnnnnnnnnnnnnnnnnnnnnnnnnnnnnnnnnnnnnnnnnnnnnnnnnnnnnnnnnnnnnnnnnnnnnnnnnnnnnnnnnnnnnnnnnnnncccatatgatgttaatatgtactggttaagatttacgcaaaatgcgctaataacaggggaagctggc

SEQ ID NO: 18666 - DNA, 462 bp, Homo Sapiens
gcgatcggcgccaagggtcacaacgtagcgcctggcgtccgagctgaccggctggcaaatcaacatcatgacgccggaagaaagcctgaaccgccaggaagtcgagcgttcgggcctgcgcaccacgttcatgaacaagctggacgtcgatgaggaagtcgccgacatcctgatcgacgaaggtttcaccggtatcgaggaaatcgcctacgtccccatgcaggaactgctggagatcgaggcgttcgacgaagacaccatcaacgagttgcgcgcccgtgcccgcaatgcgctgctgaccgaggccatcgcccaggaagagctttctgagaccgcgcaggatctgcttgaactctaaggcgtgacgccggaactggctgccaagctggccgagcgtcaagtgcatacgcttgatgatctggcccgatctggcgacggacgagctggcggaaatcgccggcc

SEQ ID NO: 18667 - DNA, 326 bp, Homo Sapiens
gcgggcgatactagcgcctccattttcaaacggcaggcccgccaacatttccgcgggcgacagttcgttgaggtcgtcttgctgggtaacgaaaaaagcatgaagctcgaactgcaacactccacgcaactcggtgatgacgtgcggcaaaaggctgggaaccggatcaacgaactgccaggccgggaacatgcgcccattctgtttcgctgacggcttcacgcaatagagcttgccggccttgtcttatcgatacagggtcgtcaacgcgctcagcttttgcttcgcaaccaaatcggcgggagaccacatggtaactggtttta

SEQ ID NO: 18668 - DNA, 703 bp, Homo Sapiens
caccccgatgtccttgccgagcttctgggcgcccatgccgtacatcaggccaaagttgatcgccttggcgctgcgacgctgattggatgtgacctcagccaactcaaccttgaacacctcagccgccgtggcggtgtgcacgtcgaggtcgtcgcgaaacgcattcagcaaccctgcgtccttggacaaatgcgccatgatgcgcagctcgatctgggaatagtccgccgccagcagcttgtagcccttgggcgcgacaaacgcctggcgaatacgccggccttcggcagtacgcaccggaatgttctgcaggtttggatcgctggaagacagccgcccggtagctgcgacggcctggtgataggacgtatgaacccgcccggtacgcgggttgatctgctccggcaagcgatcggtataggtgcttttcagcttgctcatgctgcggtactgcatcagcacttttggcagcgggtagtcgtcttcagccaatttggccaagacttcctcggccgtcgaggcctggcccttgccggtcttcttcaacaccggcagcccgagcttctcgtagaggatcgcgcccaactgcttgggcgagcccaggttgaacttctcgccggcgatttcatacgcctggcgctccaggtccaccatcttgttgcccagctcgatgctctgggatacccagcagggcagcatccac

SEQ ID NO: 18669 - DNA, 418 bp, Homo Sapiens
agcattaaacgtccgagcgaaaaaagatggccgggcgcggcggcccttaaaaagcaatgcgaaggctttgggaggaagaagggggtgttgaaaggggtccccggccttcaaaacaagaccatcccaaacgtcacccaccttccggcggctgaaaatactgcaactcccgagacatgccaaatatcgcctaaagagcgctcccaggataaacaagcatgaccgatatgctatcaaaaattttccgctgacgcttgagtctgccaagaagaagatattgcactccagcacacttgtgttagtggtacatgttaaagccaacaagcaccaaaataaacaggctgtgaagattttgtttcgacatgatatgtggttaaggtcaataccctgcttcggcctgatggatagaaaaaggcatatg

SEQ ID NO: 18670 - DNA, 798 bp, Homo Sapiens
gccagagtgcgttcatcggtgatggacagcgaggagaccccgaagtcgaacttcttggcgttcagggccgggatgatgccgtcccagtccgagacatacacttcgcacttctcgactttcatcttggcgcacagggcgtcgccgatgtccttgtcgaagccgacaacgttgccgctggcatctttattgttgaacggcgggtaggccgcttcgatccccattttcaaagtctcggccatcgccgtggcgctgaacgccatcgaaacggcggcagccaggaggaattttttatatttctgcatgcatgttgctccgttagcggttgctggacatgaattgtttgcagcgcgccgaaagcgggttttcaaacacctgctgtggcgatccttgctcttcgaccaggccctggtgcaggaacaccacttcactggacacctggcgggcgaagcccatttcatgggtgaccagcagcatggtgcggccttcttcggccagtgcgcggatcacattaagtacttcctgaaccatttccgggtcaagggccgatgtcggctcgtccaacaggatgactttgggctgcatggccagggtgcgggcgatcgcggcgcgttgctgctggccgccggacagttgcgccgggtaggcgtggcgcttgtcgctgatgccgaccttggccagcaaggcttcggcgatttcgatggcttcagccttgctctggccgagcacgcggcgcggggcctcgatgatgttgtcgaggacgcccatgtgcggccacacgttaaagtttgaaacacaaaa

SEQ ID NO: 18671 - DNA, 475 bp, Homo Sapiens
gcaaaatacttgattaggggtgatgggttcacgtagtggtggagatcacgttcttaatagaggactctgcttcactgatttaagggattgtgccaattcggcctattggtttaatattgagctgaattaacaaaattaacggcatttaaccaaatattaaccgctactaaataaggtgcaactttcgggtaaatgtgcgtcgtaccccatatttgtgatgtgtcttaatcatcaatatggatcgctcatgaaaattaacttgaaatggctcaatattatgagaaaggagaagtgtgagatttcactttttcggttccccttatcctattatgcgcatttgcctttctggtgtgtacaccaaaatctgggtatgtaggatgtcggagtcatggggtacaaatggttcatccaatagatcccacgcgttaactttagagttttcgccccggaaacctttcccagttgagctgtttaa

SEQ ID NO: 18672 - DNA, 449 bp, Homo Sapiens
cacccacgcgtccggtaaactggtagttcacataggccagtttgacccacagttattttattagatgtacataatgtttcaaaaatgtttgaatttgaaaagtcttttgattgggtgtgtgttccccagtttgccacagcctactggacttccttcttatatcagacaacttctctactttgtagttcctgctcagccctgaagacctctaagtttgagacccctgatttagatctgtaattagaaaaaggttctgaatttcatgatttgctaatgtaattactattaagtcattttagcatgtgcattttagagtccttctttgtatttttgtaatgtggtgctttctctcataaagataattgaattgttaacactgtaattgaaattttaaaaatcatttccaaatcttttattatatttcacagtaaaagtctatttaaaaagct

SEQ ID NO: 18673 - DNA, 964 bp, Homo Sapiens
ccacgcgtccgggctttcttccgagttactgctcacagccctcttacccctttctcttgtgagtgggttgtaatgtccacccaggggggatttagacacggaagggaaggcaagcgtgggcaccatggctttagaaccataaggaagacatttccctctacagattctgtctttccacttgtaacagttaatgaggcactgacgttgctcttttccaccttaacaagacagtttacagtggttaaatagcaaaactccaggagcaattcagcctgaggccatagtgccctgcagcagcattgggctctgcttttgtttctgctttgtgctttgtggctcttcttcaagccagtgttgggtagtgcacagcctgagaggtgtggcctgataaaccctgaaattgaaagaagtatgcagatttgactcagcactcctggaagtgtctggatacagctcactgagagtgtggaggtgaaagtgcctgcaaaatattaacagttctctctcaatctattgatctcctcagttacatccagaaccttaaagccgcacagttgtcatcctccgcccgcagtctcaggcagggcgcatcaggggctgcactggtagctcccaggaggacttacccatgggtcaccgtcatagccaggtgtgtctactcagaggggacgcaatcctgcagcagtccccgtcaatgagaggccaccagcagacagtgcctgttggacccatgaagtccaccactaattatatactctgctttaggtagaatatttttattagctgtcaaactgtttttgtattttagtttccaaaagtccagggtactttatgtaggccaatgtataaatatttcaagtctaacagtagcacagttatatgttaatacactgactacacgaaaatatgtaatagcatatgctatgtaatttttcaatcactaggtattgatatgtgccttttt

SEQ ID NO: 18674 - DNA, 529 bp, Homo Sapiens
ccccacgcgtccgcagaaacctttataaaagatctaatggtcctcaaactgccagctgtgtcctgtaaagcagctcaggcctctaaacaaatgatctgaatgcctttggtggctaaatcaaaattcatagaatggaacaaaaggagaatgtgccccctggtcctgaggtttgcatcacccatcaggaaggggaaaagatttctgcatatgataatagcctgtcagtccattccacccctgccgaaaatgactcccgtgactctcaccttaaaagtgaggttcaacaacctgtccatccctatgcactaattcaagatttttcacctaccagtgtttttgaatcttctcctccctaatcaatgaaaaagtttgtgggtattgcaacagtcacctgcatggaatgtttgaatacagatctatccgatggagcgccacttggccaaggtttatgagtttcatatcgaatgcttcagttgctcctattgctgcaacacactcagtctttgaaaatatgcgtttttacatggaa

SEQ ID NO: 18675 - DNA, 614 bp, Homo Sapiens
  misc_feature (49)..(157): n is a, c, g, or t
ccacgcgtccgattacattaaagttgataactgttattggtacttttgnnnnnnnnnnnnnnnnnnnnnnnnnnnnnnnnnnnnnnnnnnnnnnnnnnnnnnnnnnnnnnnnnnnnnnnnnnnnnnnnnnnnnnnnnnnnnnnnnnnnnnnnnnnnnggggggcgccccaaagaatcccagtttaaggaagggtggtgtggaaagttaagcctttttaagtgtgccccaaatttctttttctggcgccgtcttttatcaacctctggtggtgaaaacactgtggttaacacatataatcccctttgttcccctcccctgtttaccatgtgagagaataacaaagaggctcctcacgtatcccttctccacatattggcccttctggatggccattggagagcgccctgatacggggcatttaagcgggcgcgggtgggggttaccgccccttggaccgctaacattgccagcgcctttgccccctcctgtttccgtttttcgctttgttgtcggacatgcgcggcagtttttccctgaagcctcatttaggggtcgtcttttaggtctcgattgaggtctttacgggcatcccacccagaacatgtttaggatg

SEQ ID NO: 18676 - DNA, 781 bp, Homo Sapiens
ccctgcgcgtactgggcatggactaccgcgtcggtatcatcgttgaaggtgaccagcgcgaagtgccggacccggcttgccaagtgggcgccaacttccagaacatcgaagtcccgctgcgctgccgtggcccgctggaactgggcgccaaggcgtgccgcctggacaaggacggcttgagccaggtcgcgatcaaggcggcgggcaacaagctcagcgagaagcttgaacagaagctcgacaaggttaatccacagttgaaagacgctttgaaaggcctgttcaaacgatgagaaacgagcagttttcaacggcggtgctcgactggtacgaccgccacggtcgccatgacctgccctggcaacagggcatcacgccttaccgggtgtgggtctcggagatcatgctgcagcagacccaggtcagcaccgtgctgaactacttcgatcggttcatggcgtcattgccaacggtcgaagccctggccgccgcaccggaagacgaggtgctgcacctctggaccgggctgggttactacacccgggcgcgcaacctgcaaaagaccgcgaagatcgtcgttgccgaatacggcggcgagtttccccgtaacgtcgaaaagctcaccgaactgccgggcatcggcctgtccaccgccggcgcgattgccagcctgagcatgggcctgcgggcgccgatcctcgacggcaacgtcaaacgcgtgctggcgcgctttaccgcgcaagagggttaaccgggcgagccgaaggtcgccaagcagctg

SEQ ID NO: 18677 - DNA, 270 bp, Homo Sapiens
  misc_feature (178)..(190): n is a, c, g, or t
gggggggccgccctaaaggatccaaccttacaaaccggggcgggcaactccaaaccctttctaaagggcccccaaaatttatttccggggccgtctttttaaaacgtcgggatgggaaaaaccctgggtttacccaatttattccctttgaaaaaattccccttttccccattggggnnnnnnnnnnnnnggcccccaccaatcccctttcccaaaatttgcccaccctaaaggggaaaggggacccccccggaaggggccaattaagcc

SEQ ID NO: 18678 - DNA, 758 bp, Homo Sapiens
ggcaattaaaacagaaatgctgcgagaaggcgtccgggcacagctcgttggcgacccggaaggcctcggccggcccggccacgtcgagcagcacgattcccctgggcaatacgaagtgcacgggaatcatggctggtcgccttattgcgcgtccgcgaagacgtcggcggcgcgggcgatgcgggcgaagcggccctgcagcaccagctcggtggcgtcgcggatctcggccggcgtgtagtgcttgccggacgggctctgcatcgcgaaggtcagcgtggcgtcggtcgggaacaccaccttgaagccgtcgtcgctggcgtggcgggtggtggtttcgcagcactgttcggtgcggatgccgctgacgatgacgccttcgatgccgtgcttgcgcagccattcctgcagcgtggcgccgtcggcgtccttggcgtagagcgaggaatgcacggtcttgtggaacacggcgtcgggggcgatgcgcagttccttcagcgtcttgacgtggccggaggccagcgaaaacggattggccgggtcgttggcggcgctgatgtggaacacctgcagcaccgggatgtcgcgggcgcgggcggcgtcgatcatgccctgcagtttgcgagacgaatgccgggtattccgattcgtcccaaaacggacgctggcgggaagatcctggacgtccatgactatcaatgctttgttcctggcggcggctccgtgccgtgggaattcaggaagtacgttgcgtattg

SEQ ID NO: 18679 - DNA, 296 bp, Homo Sapiens
cacccacgcgtccggtgatttgcataatttgtacatagttaggttcatttgttagtttgtattccttttggcttcccccatatcctcgttgactttttctttcttttgtaacttacatatgttatgaaatttatatgaggatatataattttcataaatgtttatggtttacatgtattagttgttattattaagatcaccctgggattgactggccaagcatttggtggaagatagcaataaataatacatcataaaagactttaatgtaaaaataaagccatgaaagtaccaag

SEQ ID NO: 18680 - DNA, 436 bp, Homo Sapiens
cggggggggcgcccccaagagtcggcgcgctggcccccggttttccactctcttgactcttatataggtgcccttaaccttctatatcgcggcggagtttatccaccttgggcgtggtggaatcccggcgtatgagggcctatatgattgtgcttcctttcccttttttccgcgttggggaaaaatgggaaaaggccgggaggttatgcgttatactgccgggtgtgtgcgtcttaaagggggaaggtgaacgctgcaatttgaccagggccataaccccggcgtgtttcgggtgttatggcgccgggtgtcgcgtaattctgcagcgttccccccacgttcctagtcttttgctccctttatgattccgatgactgcttgtatgccccgaaatacggaaatcctggctcccgtgatggattacgagttggggctt

SEQ ID NO: 18681 - DNA, 650 bp, Homo Sapiens
ccgcaaaaaagtcagttgcgcatccagcaaggtgtaggcgtcgttcttggccgtggcggtgggatagagataggacgagccctgatgccgcaccgccaggcccgcctcccagcccggcgcgaagcgccacgccgccgtcacgccatagctctggcgcggcgtgttgggaaactgctggccggcatagtccacgccgcccttgtggtaatcgtcatagaccgccttgaccaggccgacgaaggcgctcaggtccacgctgcgcacgggccgccaggtgccggtcagttccatgcccacgttgtgcgatcggcccgcgttgctggtcaggctttggccgccgctgccgatggtcacgacctgctggtcgcgcagcttggtgtagaagccgacggcgcttacattccagctctcgtcgagtccctgcaggcggtagcccagttcggcgtagttgccatactcgggctggtaggcctgcgcggcggaagcgctgtcggtcgcgtactggttgaagcccgaggccttgtagccgcgcgccagggtggcccaggcgaactgctggacatcggggcggtattcgagcgtcaggcgcggcagcagcacggtgtcgtgcgtcttgccgcgcagcgtttccacggcgctgtagggtccgg

SEQ ID NO: 18682 - DNA, 843 bp, Homo Sapiens
catttaaagagtcgcaacaaggaggagcaatgcggcatggcagaccgccgggcgggcatcaccatggtcccggagaagagcggtgcatggggatagttgctgcccgcgagctcggaacgcgcgcgcagcccggaggatccctccgtgctgtacaacgtggtcgaaatcaatcccgcctgcctgcggctggtcgatcccaccgagaacctgcgtggccttggcatcgtcatgacgattatgttcagcctgatgttgctgctgatcgcaaccaatttcatcctgttctacgacacggcgacgcgcggctacggcggcgagtatctggcgttcgtcgcaggcggctcgctgctgggggtgttcgggctgtggcgcgcctaccgcgctgcgtccgcgccgatgcagtacacctccatcatcagccggcggctgcggcgcatctacgcctggagcaggaagggcggctggatttcagtggactacgaccgggccgtggcattcatcttcaggggccggctggtggcgcccacaggggcgagcgcgccggttgtttcgttgcgggtggccgagcttgagccgggctcgcgtcgcatcgcgcgctgcgtcgcgcccacccggatcttttcgtcgcgcgaagccaccgctggcgcctggcagttcatccggcgctacatggacgaagagcccgctgctgttcctcctgtggtcccgatgccgaatcatcgcatcaatgcctttgcgtggatggaccggggaactgtttacggaggagatcgaccggcagcattatccccgcccgcctgttcgacggattcgcgtttctggatcatggcgggggcctactac

SEQ ID NO: 18683 - DNA, 221 bp, Homo Sapiens
cccgtttctaaaaggggaatcttgtgcgttggatatataaggaattttgccctattccgcgatttgttaaaaatggactgaataaaaaaatttaccgcggatgtttacaattatgagccgttcatttagtgggcccttgcgggaatgggcgggagcctatgtgttaattttcaaaacttcaaatagattccgtctcaggagctatacgctgatgatgcttc

SEQ ID NO: 18684 - DNA, 579 bp, Homo Sapiens
agacttaagggccgagaaccccgacgtggatgtcgagctggaagcagtaagagtgagcggtgcggggcgacatcgtcatcgcgatccgcgcgggcgccggcgacctggggctggtggcgggcaacatcgatgtcgaaggcctggacgtgacgccgctgttccgcgatgagctcaccgtggtcacggcgctggatcatccgctggcggcctcgaaatcggcgcatttcgccgacctgatcgatgcctatcagttcgtcggcatccatcccgacagcgccatccagaccttcctggaggacatcgccagcggcctgggcaagcgcatctgccagcgcgtgcacgtgggcagtttcgaggtcgtgtgccgcatggtcgaggccggcgccggcttcgccgtggtgccgcgcgcctgcgcggcgcgctacagccggcccgatgcgctgcacgtgctgaagctggacgacccttgggccctgcgcgaccgcctgctgtgccgccagcgcggtcgcgacctgccgagcttcgccgagtgcttcatcgagcacttgcagcgggccgcgcgagggcagtagccctagc

SEQ ID NO: 18685 - DNA, 704 bp, Homo Sapiens
ggggggtgaaagggaaaaagatcttctaaagtgtcccctgatttcctttcatgggccctcttttaagggcgcccgggattgggaaaaccttggcgttttttaacttattcgcctgggacaactccgcggttccccagctggcgtaacatggaaagaggcccgccctgatccccccttcccaacagttgaaaaagccgcatggcatatgggatccgccctgttgcatatcattaagggctatgtgggtggcctttatccccgccgtgtacgcgtgcttggtggggggggtagcggccgttcctttccctttcgtgcgttcctttctcgccacgttcgcttgcttttcctttctgctttcaggcggggctcccttttggcttccgatttctcctttacggcgtctctaatggggtttacatgtgtgcggttaggttcacgtccgcgcaatcaccgtataagtgtagttgctccgccttgtgactacgagtctctatactggtattggactcttgatctgttatgcgacgtactaaagcttatcttcgtgtacactgtggattaaagtggaatcataccgagttcctactattggataaaaagagcttcacgagatacagctatatgttattaagaaaggttatgcgctatttttttggtggtattgtcagagatatgggcgaactattccggtgttttgtgtgcaa

SEQ ID NO: 18686 - DNA, 935 bp, Homo Sapiens
cactataagcgcgcgggtgttccagcgcttgtcttcacccacaaccgagcctttttgatcgtcattcagcacaggagtcagggtttgcatggtgcgatcatctacctggtgggccgccgggccgaggatcggcggcgaggttgttgcgttcagcataggcgcccagcaccggggctggaagttctgtacggtggttcacgtgtgcgaggctaatcttcgggggtattgcaggcatgtcgggaatgtatctgtttcgacacaattgctcgggagcccgcaatctggcggctaaatcgcgaattaccgatcatcggatcccgcaaacgcgctgcttgcgctacaatccgcgccgatttcgacttgcctgagagcccattccaatgtccgtctgccagactcctatcatcgtcgccctggattaccccacccgtgacgccgcactgaaactggctgaccagttggaccccaagctttgccgggtcaaggtcggtaaggaactgttcaccagttgcgccgcggaaattgtcggcaccttgcgtgacaaaggcttcgaggtgttcctcgacctgaaattccacgatatccccaacaccaccgcgatggcggtcaaggctgccgccgagatgggcgtgtggatggtcaatgtgcactgctccggcggtttacgcatgatggcggcgtgccgtgaagtgctcgatcaacgcagcggcccccagccattgttgattggcgtgacccgtgctgaccagcatggaaacgtgaagacctggccggcatcgggcctggacatcgagccacaggaacaagtgctgcgccttcgccgcccctggcgcaaaagctggcctgggatggcctggtgtgctcggcgctggaagcccaggcattgaagaccgcccacccgtgcctgcaactggtaacccgggggattcgcccgg

SEQ ID NO: 18687 - DNA, 396 bp, Homo Sapiens
ggggggggcgccttaaggattctaaaaaagtgtccccgaaattccattccctggccctctttttacggcgccggggagggggaaaaccctggcctttttaaacttaatcggcggggaaaaattcggctttccccggctggaccctataggaaaagacccccttttatcccccttcccaacatttgcgaaagcccaatgcggaatccccacccgccctgtagcgacacgatacgcgccatgtgggtggcctgtacacccgcgtgaccgctgacttggccggggcctaccgcagctcgcttcctttcttcgcttcccttctcacccccctcccctgcttttcctgtctatctctaaggcgggggctcccgttttggccccgatttctcgctttacggg

SEQ ID NO: 18688 - DNA, 629 bp, Homo Sapiens
  misc_feature (127)..(136): n is a, c, g, or t
cacccacgcgtccggagtttttcatcttggctcactgcagcctcaacctcttaagctcaagtgatcctcccaccttaactgcctgagtagttgggacaataggcatgcaccaccatgcccagataannnnnnnnnnaatattttgtaaagatggggattccctatattgtccagaatggtcttgaactcctggctttatgcagtctttccacctcagcctcccaaagttctgggttacaggtgtgagccactgcgccgggccaattttggtttttcatggaggacttttagcaggtctcaaaagttttcttctaatagttttcttggtgttctatcattcgtaggtgttgaatttaccaaactttttctatttcaattattacatttttactttgttcaagtaatattgtatcatattaaatgaacattgcattgtgaaaataccctgcttagtcatggtatgtaatcatccttatacctttttgtattctttttttaaatatttctgagaatttctgtgtctaaatttaaataggatgttgttttgtaatcatcttgtgattcttttgtctcctttgggtattactggccaatagatgaattaaaaaaatgttacctcttctactgct

SEQ ID NO: 18689 - DNA, 792 bp, Homo Sapiens
cccaacgccaccatcgacgacatcaccggcgtcgtcgaaaccgacccggccctggccgcccaagtggtgagctgggctgcgtcgccctactacgcctcgccgggcaagatccgctcggtggaagacgccatcgtccgtgtgctgggctttgacctggtgatcaacctcgcgctgggcctggccctgggcaagaccttgagcctgcccaaggaccacccgcaacaggccacgccgtactggcaccagtcgatctacaccgccgccgtgatcgaaggcctgacccgcgccatgccccgcgcccagcgcccggaagccggcctgacctacctggccggcctgctgcacaacttcggctacctgttgctggcccacgtcttcccgccgcatttttcgctgatctgccggcacctggaggtcaacccgcacctgtgccacagctacatcgagcagcacctgctgggcatcagccgcgagcagattggtgcgtggttgatgcgttattgggacatgccggacgaactgtccaccgccctgcgcttccagcacgatccgacctacgacggccaatatgcggaatacccgaacctggtgtgcctggccgtgcgcttgttgcgcagccgtggcatcggctccgggccggatgaagccatcccggacgaactgctggagcgcctggggctggcccgggacaaggcagaggatgtggtgagcaaggtgctggatgcggagacgttgctgcgcgagttggcgtcgcagttcagtcagggataaatcggggcgccctgtgatacc

SEQ ID NO: 18690 - DNA, 270 bp, Homo Sapiens
  misc_feature (194)..(229): n is a, c, g, or t
gggggggccgttttaaagaaacaaagtttagtaagggtgggggggaatttaaagtttttttaatggggcccccaaattttatttccggggcggtgttttaaaaagccgggaaggggaaaaacttggggttacccaatttttttccctttggacaaatcccccttttccccaggggggtaaaaaggaaaaaaggnnnnnnnnnnnnnnnnnnnnnnnnnnnnnnnnnnnngaatgggaaaagggaacccgcccggaacggcccctttaacc

SEQ ID NO: 18691 - DNA, 340 bp, Homo Sapiens
gaaagaaaaagggggcccccttcaaaagggtcacctaaattcaattcacggggggggcgttttaccttttcttgaggggcacaaccctggggttgccggacttaatcttctttgttgggggtccgcatttccccagcgggggcaccacctataaggcccgcagcgatggcccatctccgcatgtgcccagactgaatgccggatgcgacgccctctgctcgcgcggatgtgacccgccagagagggtgattacacccctcttgaacgctacatttgccaccggctgagcgttgtgtctcttcgctttctgcccttcctttcgcgcgcggtgtgggggctt

SEQ ID NO: 18692 - DNA, 591 bp, Homo Sapiens
caaggtggcttccctttggagagggggcgctagtctttctatagtggcccctaaattcacttcgtggggcttcacgcaagtttactctctgggggggctgcacatatcccaggttggccaaatatggaattgcccacgcaaagatcccctttaaaggggttgccgatcctgaatggccattggtatcacccgtatgcgcgtatgtacacgcgcagtatgagtggtatacttgccggtgacgcggatatatgcgtgttgcttagtgtgccttctttcccgctccttccctcatttctcgctgcctagtcggactctcgggtcatttcaggtgggagtccaggtaagcgtcctatgaagggcttatatgtgattcaggcgagctatctgaatacgtcatcgccatatattgtctatcccggtacaaatgtatgcagcgttctgactagagataccgtctctaacaagactatctctcccacttgatgaggaatctcatccttatagtagcgattttgtcgatactggggattagccgaatctgtcgaatgtttcaatgttctgattagtagatatatcgcgcatttggctaaa

SEQ ID NO: 18693 - DNA, 240 bp, Homo Sapiens
ctcccgttcaagctaaagatcggaggctccgttaggggttccaattaagcgctttaggtaccttcgggccatcgccctagtagagggtattccccctttgacgttggaatctctgttctaaagggagcactcgttcctacatgaagacactctgctctattctgggtgatttttgtattgagatgatttggctatttccggctatgggaaataaattcccttacggtaagtggacctacc

SEQ ID NO: 18694 - DNA, 822 bp, Homo Sapiens
  misc_feature (71)..(182): n is a, c, g, or t
  misc_feature (190)..(227): n is a, c, g, or t
  misc_feature (237)..(430): n is a, c, g, or t
ggggggccgcccaaaaggatccaaccttacttccccgtgcatgcgacgccataactcttcaaaggggcccnnnnnnnnnnnnnnnnnnnnnnnnnnnnnnnnnnnnnnnnnnnnnnnnnnnnnnnnnnnnnnnnnnnnnnnnnnnnnnnnnnnnnnnnnnnnnnnnnnnnnnnnnnnnnnnnccgaaaannnnnnnnnnnnnnnnnnnnnnnnnnnnnnnnnnnnnntgaaggggcnnnnnnnnnnnnnnnnnnnnnnnnnnnnnnnnnnnnnnnnnnnnnnnnnnnnnnnnnnnnnnnnnnnnnnnnnnnnnnnnnnnnnnnnnnnnnnnnnnnnnnnnnnnnnnnnnnnnnnnnnnnnnnnnnnnnnnnnnnnnnnnnnnnnnnnnnnnnnnnnnnnnnnnnnnnnnnnnnnnnnnnnnnnnnnnnnngacgccagcccagccccaaaaacttgataaggtgagggtcacgtagtgcgcacccctagaagacgagtttccgcttggacgtgggatgccctacttatagggactctgttccaatcggacaacattccacctatccggttatctgttgattaagggatattgccgatctcgcctttgtttaaaaagactgatttacaaagttaacggccattaacaaaaataccgctaaaataagtgacgttttcggatggtgcgcgacccctattggttatgtctaagaattcatcagtacgcgcaggaaaaacgcagataatgtcctaaatatgaagggaagggagatttcctttcgcgtccttttaccgtttggcacatgactcggtttgccaccaaac

SEQ ID NO: 18695 - DNA, 719 bp, Homo Sapiens
cttaaaaaacgccaagacactggtgttctcggattcgctgaccttcccgcgcgccatcgagctggcgcgccagttcgccgggcgctgcaaggtctcgttcggcatcggcaccaacctgaccaacgacctgggccacgaaccgctgcagatcgtcatgaagatggtccgctgcaacggccagccggtggccaaggtgtccgacgcgcccgagaagaccatgtgcgacgatccggcctacctggcctatctgcgccaggtgttccagctgccgcccgcctagcggggcccggcccgggcagggtaaagttcgccattcttcgcattgttcaacccgcaactcgtcattaggggaatattcatgagcagcatcaagcgcttccacgtcgccaagcgcctgtcggacatggccgtctacaacggcgtcgcgtacctggcgggccaggtgccggacgattccacgctggacatcaccggccagaccgagcaagtgctcgccaccatcgatcgcctgctggccgaagccggcaccgacaagaccaagatcctgatggcccagatctacgtggccaacatgaaggaattcgacggcatgaacaaggcctgggacgcctgggtcgccgacggcaactcgcccccgcgcgccaccgtcgaggccccgcctggccaaccccgacttcaaggtcgagatcgtcgtcaccgccgccatcgccctgatcggc

SEQ ID NO: 18696 - DNA, 717 bp, Homo Sapiens
accgatactggtgatcagcgccaggtcggcatctaccacgttgaccgtgtccagacgcccgcccaggccgacttccagcaccaccacatcaagttgtgcacgctcgaacagccagaacgccgccagggtgcccatctcgaaataagtcagggaaatctcgccacgcccggtatcgagtgcggcgaaggcttcgcagagctgctcatcagtggcttcgacgccattgagttgcacccgttcgttgtagcgcagcaggtgcggcgagttgtacacgccgaccttcaggccctgagcttgcagcaaggccgcgacaaaggcgcaggtagagcccttgccgttggtgccggtcaccgtgatcacgcgcggcgccggccggcccaacccgaggcgggccgctacctgttgcgagcgctccaggcccatgtcgatggctgacggatgcaactgctcaaggtaggcgagccattcgcccagggtacgttgggtcatatgtttgcaggcaccggtggcacgacgattggctcaattttaggcgcgacgtacacaggcgtcggcaggcccatcatctgggccagcagctacccaggcgtgggcgcagttcgccgcggggaatgatcaggtcgatcgcgccgtgttccagcagaactcgctgcgctggaaaccttccggcagtttttcgcgaacggtttgctcgataacacgcgggccggcgaaacc

SEQ ID NO: 18697 - DNA, 414 bp, Homo Sapiens
  misc_feature (95)..(147): n is a, c, g, or t
tcacgtagtggggcatcgcccctgatagacggttttccgcctttgagacgtggagtcacgtttctaatagtggaactctgtctcacacctggacnnnnnnnnnnnnnnnnnnnnnnnnnnnnnnnnnnnnnnnnnnnnnnnnnnnnnctcaacgcgattttaacaaaaatataccgctcacatttaaggtgccacttttcgggaaaatgggcccggaccctattggttattttccaattactttcaaaatgatacctcctagaaacaatacctgattaatgcctcataatattgaaaaagaaagttaagattccacattcctgccccttatccctttttcgcgattggcttccgggttgggcacaaaaaccgggtaaagataaatcgtgaaatctggggtcccaaagttgatcc

SEQ ID NO: 18698 - DNA, 936 bp, Homo Sapiens
ctggtggcttccacctccggcgggcacttcaatcgctggcaaagccgggtttccgggcgaccggagtacggtggcgagctgccggtgtcggcactggccgaagaaatgctcaccgagggcgaaggacaaatccgtgcgctggtgacggtggcagggaatccggtgctctccacgcctaacggccggcagttggagcaggcgttggatggcctggaattcatggtcagtatcgacctgtatatcaacgaaaccacgcgctatgccgacctgatcctgccgtctacctcggcactggaaaacgatcactacgacaccaccttcaatatgttcgcggtgcgcaacgtcacccgcttcaatcgcgccatcctgccaaagcctgacggcgcattgcatgactgggaaatcttcgtcggcctggcccaggcgtttgccgcgaagacgggtaatacgctcaaaccgaccatgccaccggcgcagatgatcgatttcgggctgcgcgccggaccttatggcgataccttgtctattgccgcgctggctgattatccccacggtctagaccttgggccgctgaagcccaacctggcagggcgcatgaaaaccgccaacggccatttgcaggctgcgccgccggtgatcctcgcagacttggcgcgctttgccgcacaaccagtgcctgggctgaatgaattgttgctgatcggccgtcgccatgtgcgcagcaacaactcgtggatgcataactaccatcggttggtgaagggcaagccccgtcaccagttgctgatgcatcccgatgacctggcccatcgcaagttgagcgacgggcaacgtgtgcgggtcagttctcggatcggcatgatcgaagtcgaggtattgggcagcctcgacatgatgcccgggcgtggtcagcctgccccacggctggggccatgg

SEQ ID NO: 18699 - DNA, 429 bp, Homo Sapiens
  misc_feature (51)..(193): n is a, c, g, or t
  misc_feature (214)..(223): n is a, c, g, or t
cctcgcgtccgtaataagaataagtaataataaagaaatttctaacattcnnnnnnnnnnnnnnnnnnnnnnnnnnnnnnnnnnnnnnnnnnnnnnnnnnnnnnnnnnnnnnnnnnnnnnnnnnnnnnnnnnnnnnnnnnnnnnnnnnnnnnnnnnnnnnnnnnnnnnnnnnnnnnnnnnnnnnnnnnnnnnngactgggaaaaaaatgaaaannnnnnnnnncttcgccttggaacacatccccctttctgcggcgggcgtaataacgaagaggcccggggggcccgcccttcccacgggtggcgcagcttgaatggcgatccccttcccgggaccgctacaattgccagaaagctagcccagctcctttcactttcttcccttcctttctgggggggttagcgggctttccccgtcaagctctaaat

SEQ ID NO: 18700 - DNA, 258 bp, Homo Sapiens
acgttcagcgtgatcacgtcagccgacaggcgctgggccgccagctcaaaggtggtacgggtgcgggtcgagttctcgaagaacacgttgcagatggtcttgccgcgcaacagcgggacttttttcaccgcccgaccgccgacttcgaggaacgagtcggccgtgtcgaggatttcggtgagcagttcgcggggcaagccgtcgagggacaggaagtgttgcagctggccctgagctttgagctgcagcgggcgcttg

SEQ ID NO: 18701 - DNA, 801 bp, Homo Sapiens
ttttaaaataaatcacgtgggccggcatgacggccgccaactgcttgctcaggcgtgcaaaaggcaccaggtcattggcgcgaatctgttccaggctgcgctcatcattgggaatcgcgacgtgggaatcggcttcggcccagccgtggccggggaagtgtttgccggtagcggccatgccagcgctgttcatcccgcgaataaaggcaccggcaagcaccgcggcgcgctcggggtcgccttcgaatgcgcgcgtgcccacgactgcgctgcgctggtaatcgaggtccagcaccggcgcgaagctcaggtccaggccgaccgccagcacttctgtcgccatgatccaaccgcactgctcggccagttgctcggcattcgggttgtcggccaaggcgcgcatcgccggcaggcggacgaacccttggcgcaagcgctgcacccggccgccttcctgatcgaccgcgagcagcaggtccgggcgcacggcgcgaatcgcggcgctcaactcacgcacctggcgcggatgctcaatattgcgcgcaaaaatgatcaggccgcccacctcgggctggcgcaacaagtggcggtcttcagccgtcagccaggtaccggcgacgtccaccatcaaagagccttgcagggcttgggtcataaagcttccttaaataacgcacgcagcccggagccctcgcgagatcacatcgccagggttgaatctggagacggacgctcagcgagagcaacgggctgtgggtaaatagctgaattcggcatgggcggctagcttagccggatgca

SEQ ID NO: 18702 - DNA, 928 bp, Homo Sapiens
aatttagctgttcctgggccatgtggatcgccccggcatccacccggcgccgtacctggcacgggcgcagtggatcatcatggaaacgccctacccgctgggcgctgaggaactgcgtggcctgttgcagcgttcccaccagttggtggtgagcaagctgcccaagcgcacgcaggtggggctgaggctggatgactgatacacaaccctcaggccaaaaaaagccactctattgagtggcttttttgtatctgaggaggaatcagcatcccgtttccgcagcgggttgttaccgtggtagcggctaaataagcacgcccccgcatcgaccattactccaggggcaaaccttgctccaccagtgaggccaataagcctgcgccgagggggatgatgctgtcgttgaagtcatagtgatcattgtgcaactgacaggaaccggcgccctggcttgggctgcctccctgccccagataaatataggcgcccggtcgttgttccagcatgtatgaaaagtcttcggcccccatggtcaagggttcgttgcacttcacgttttcctcgcctatcaagctacgggcaacctgggcggcgaacagcgcttgctcagtgtgattgacggtcggcggatagcctcgctggtaatcacacgtggccgtggcaccgaatgcggtggcgacgccctgggcaatctcaccaatgcgccggtccagcaaatccccgattggccgccgtaaagctgcgggcagttccacgcattttcacctgtgccggaataacgttagaagcagtaagttgactggtttgcatactggcaactgtcaccacgcccgcctccagagggtgcaggttacggctgacaatgcttttgcagtgcaatgacgatatggcctcgcgaccaccaaccgggtcaatgggttcgtgagga

SEQ ID NO: 18703 - DNA, 300 bp, Homo Sapiens
  misc_feature (55)..(63): n is a, c, g, or t
ggggcggggggcttaggggaacccagccggcaaggtccttgcatttgagggtgannnnnnnnnctgggtgtttgagagcaatttcattggctattattttgaacaatgaggagggggaaaaaactacttttttacgcaacaacccacgtggtgccatggcccctttttgccgattcggataaaatgccaaagggcccccatgggtgtttttccccttgggcgcccccaccacaggaaaagggggaccgccaatgcaaaggaagaattgaggcggggtctgggggtgctggatgcttattt

SEQ ID NO: 18704 - DNA, 452 bp, Homo Sapiens
ccacgcgtccgctttagtgagcatagcagtgggaacaaggtcaaggtccttttgaaacactgcagcgatcttaattttgttagatttggagttcaataaatggagtatcctgagttgcccttgctcttctggcctggcctgcacagggcccagggagagatttgttcttgtgtgacttagagctgggtgtgggtactaattagcttttttcgactttgtcttgggatagacagtggctatgggaggattggacttttgagttgggctctgggtctcttggacaactttacaatttactggcttccaagacttcctgcttcaaaacccccagccagactattcatggcccattcagatcttcatgttcatcccacaagtgcaagaacagttaacctttcttaattgatttttgtaattggaggtttatattgtcttgcctaatgcatattctc

SEQ ID NO: 18705 - DNA, 620 bp, Homo Sapiens
cctcgcgtccgagcccgtctcccgtctgcagcccggtgcgcggggggtcggggctcgcgtggcctcgcagggggagcgcggggtgcccctgttgttggagggtgggccgagggtggtcgtgggggagcaagccaagtaaagggggaggcgcccggccggatgcacgtcggcggagcggcgcttgagctcggatgccccgggccgccgcctcctctgcctggctcccgctgtcccgggccgccccacgcgcgtccgcggagcctccctcctcgccgccgtccccagtcgccccgcgcgaggtttttccaggtcccccgcctgggccgagccgcagttcctgggtcccccacccccagcttctcctccgtggcaggtgcggggcggacttttctccgcaaggtggtcccgggactccgcgctgggagctgagtgggtgggggccacgcgtcctctccctgcccgcctcgttcgggggcggatctgggggcctcggaggtcacggcccagattgccttttcgtggggtgagacgggagatcccggggctgggacaggagaggcgcggcctcccggagatttcgctgcgggacttcgctcgggcgcgggtgggcgcggggagaa

SEQ ID NO: 18706 - DNA, 467 bp, Homo Sapiens
ggggggccccccaaaaggatcctagctttcgtgggcgggggtgggaggtcttatctcttctatagtggccccaaatttcattttatggggcccctttttcacacgcccgggcggggaaaaccctggggttacccaacttaaacgccttggaccacatccccttttccgcccttccaacattggcgcactctgattggcaaatgggacccccctggtagcggcgactaaaacgcggcgggggtgtgggtatctgccaacgtgaccgctaatcttggcacgccttacggccccctctttcggttccttcctctcttttctccgcaagttgccggttttaccgctgtaagctcaaatggggggctcctttaggggtcaaattagggcggttacggcgctgcgactccgaaaaacttgatagagtgacggtcccaatgttgggcctcggcgctgataaacggtgttcctcc

SEQ ID NO: 18707 - DNA, 832 bp, Homo Sapiens
tcttcaagccattggtagggatcggtggacgtttcgggaagttttgacatgttcgaatcctgtcgaaaagcagaaatggatagcgtgcccgactttgaccctttttgagcgataaaaaaagcaagaaaccgggtgtgctagccgatctgatcggcgatacatggcggaggtaccgcaggttgctacggcaggaggacaagcgatggctgacaaaaacatgtggatgctgatgggcgccgacgcaaaacccttcccaagccccgagccgggaatgctgggcggccaccgccgcggcaagcgctatggaaagctcgactgtcgtgcggcgctacgagccattgcgcgtggcggctacgtgaaaaatcgcgtgttttttctcgatgaagcgacggctatcgccgcgggatttcgtccttgtgcggtgtgcatgccagccgaatatcgcctgtttcgagggcacgcctgaatcgagtgcctgggacaaattccaggcaaaaaaaagcctgcatttctgcaggctttttactatctggctccacgacctggactcgaaccagggacccaatgattaacagtcatttgctctaccaactgagctatcgcggaatgcgccgtatgttactgattgaaaaggagaagtcaagcattcagtaagttttttgcttcaccagatgcgccgcgctggaaatcaccacgccacttcctgtcacgacgctgtcatacgtcaacgccaacatcccgcagataccccgccccctaccctcttcttgaaggatgacacatgcacactcgctcagcccgccagcggtaaaacccctgcttgcccgtttta

SEQ ID NO: 18708 - DNA, 704 bp, Homo Sapiens
cgcaacgcgattccccgcggcaagctgcgcatcggcgcagtggaatccagtgccagtggccgcctgccgccgttgttggctgaataccatcggcgctatccacaggtggaattggaactggtgaccggcgcctgggcgcagttactcgatgacttgcaacatcaccgcatcgatgcggcgctggtggccgccggcggcaaacgcccgaagctcgaacaaagcgtggtctacagcgagcgcctggtgctgatcaccagcgcctccagcgcgcccattgaggacgcgcgggacctggccggccgcaccttgctggtctggccgcccggctgcccgtaccgcgccgccttggaaaactggctcaagccccacgacatcaagcccgccatcgccagctacgccagctggggcacgatcattggctgcgtcagcgcggggattggcgtggcactggcgccagaaggcatcctggcgcgctacgagcaggccaaccaattaacgtcctaccgcttcgacgaattggctgcggtggataacctgctgttctggcacaaagacacccaacgccacctggcgcgggatgcctttgcggggctgctgcgggagacattcggctaacccgttgcaacatgttttcagttatcctcccgcgaaaattaattcaaatcgtaaggggactaccatgaattacttccgcctgttgctgg

SEQ ID NO: 18709 - DNA, 406 bp, Homo Sapiens
  misc_feature (328)..(347): n is a, c, g, or t
cacccaaaacgtccgctttctctttggcttgctggacatctgaccggcatgttatcttttcatatttgttcaaaatgtcattttcaacatttactcaactaattaatatcaaggacttgccatcaattctctttttccctgcattgggttagaaacctaatttaacttcaacactgacatattggtattttagagtgggaaattgagactttgataggaaggtgtttgttgctgctgcaggtaatgtgcctgaacccaactgacattacacccagaattatagagggccaagtatagtactgtgtaaaaatgacagaataacctcttnnnnnnnnnnnnnnnnnnnngaatagcaaatagaaacaccattctctcaaactttgatttgtagaagcagatgttttgt

SEQ ID NO: 18710 - DNA, 748 bp, Homo Sapiens
ccaagagcctgggtcgcgggagtcggtggtgctgccgccggccagccccatgcgcagcacaccgcccgccttgggcgtggcctcttcggcgaaggcctgcagcggcaggcctatggaaaacgcggcggccacggcaccggctacggcgctgtgtttgaggaaatcccgtcggtgcatcgcttgagtcattttgttgttgttttcgctcatggtgttgctcctctaaaggttcacacaggcatgcttcaactcgatcaaggtcacgccgttgcgcttgaagccgttacgcaaatccgtctgcagctcatccaggttctgcggctcactgaccgtgcagccgaacgcccgcgccagggcggcgaagtccgggttgcgcggcagtacgccgatgggttcgatgtccaggttcagcatgtcgtcgcgaatctgccccagggcgtcgttgttccacagcaacaccaccagcgggctgtccagttcttccaccgctgtggccagttcctgggcggtgtagagaaagccgccgtcgcccaccagcaccaggccgggccgctccggcgcgccgaacttggcgccgataccggccggcaggccgtagccccaaggtgccgtatccggtgggatgcagccaactgccgggtggcattgctggggaaggtgtagttaccggtgtaagccagttgggtcatgtcactgctgatgatggaattggtgggcaactctgcggcgacgcgtcgagaatcgcctg

SEQ ID NO: 18711 - DNA, 390 bp, Homo Sapiens
caccgcctgcggcagcacgccgccgatcagttcggagatcagcggcgccgagccccggtagcccaccacctcgggctcctggccgatctggcggcccagcatcagcgcgaagaagtgcggcaggctgccggtggccggcacgcccacggagaactggcgcgggttgtcgcgcagccactggcgcaacccggccacgtcgcggatgggcgaattggccgccaccgccagcgcgaacttgtagcggctgaccagcgacaccggctggaagtcgcggcgggcgtcgtagccgggttcggcgtagaccagcggcgccaccaccatcaccgccggattggccagcatcagcacgttctgccgcgtcgccagcgcatgcaggccctgggccgcgat

SEQ ID NO: 18712 - DNA, 791 bp, Homo Sapiens
  misc_feature (44)..(161): n is a, c, g, or t
ccacgcgtccgcggacgcgtgggcggacgcgtgggaaaaacatnnnnnnnnnnnnnnnnnnnnnnnnnnnnnnnnnnnnnnnnnnnnnnnnnnnnnnnnnnnnnnnnnnnnnnnnnnnnnnnnnnnnnnnnnnnnnnnnnnnnnnnnnnnnnnnnnnnnnngggggggcccctcaaagaattccaattttacaacccggggaggggaaaaacataactcttcttaggtgtacacaaatttgattcccgtggccgtttttttacagggtgaggaggggaaaaaccctggtgttcctcaccttattgcctgtggagaaatcccctcaattcgcctctcccaaatgtggcgcacccagaatggaaatgtgaccgccccctgaaccgctacattacgcggggtggagtgggtgtttacccaaagtggacccctaccgtggcgagcgctctgagccccgctctttgtgtgttctctcatgttgtctgcagagtgtgcgggctttccgagtaaagttataagaggggccgcctataaggcctacgatatgatgatctgaggaacctcacctctaagagtagtagtgagaggtagtaggttcactaggtggacccccgcgcgaaagagcgagtctcccctcgtgagatgtggaccactgttcatgaatgatggacgctgtgccccaatgagaaaaatatgaacgcaattgcgtgatattctttgatataaaaggaatttagcacactccgactcttggtagtaaagtagacctgaataggaagaatgtacgccgattt

SEQ ID NO: 18713 - DNA, 884 bp, Homo Sapiens
  misc_feature (102)..(127): n is a, c, g, or t
ccacgcgtccgcggacgcgtggggggttatttcccctgactgtcgcaaaacacacttagacaaaccctgcatttattcctttagagttgggaatgggaagannnnnnnnnnnnnnnnnnnnnnnnnntggggggtgaggggactactgcccaggctctacctttgtgggaggatcctccccttccttccaccaaccccacttgggatgtcccaggctggtggtgaactcgttgggcaggtcagtactgtgtttataaagcgtgtcctcagcacaccctgcaaagtgcctggcaaaacataggcatgccacagatacttaaaaaaaatgtttttcctgcttacaaaagtaagtcatgttgatttaataatatcgagaaaacacagaaaagcatacacaaaaagtcactcttcgacttagacgtgattaatatttggtatttgtgtatatgcaaatatgcatgaaagaaaagctgagaaaacatactgcagagtgttttccacgctactaattcctctcctaagacatgatttttaaaaatcgattttatcaaggtctaaattgcatgcaataaaactcagacattttaaggcacatagttggttaaattttgataattgtgtgcacctgtgtaaacatcacccgggatcgcagcagcccagcaccttctcctgggccctgggctgttttctcaccagggacaggcacgatgctaatagagtttcatgtaaatggaatcatgccatgtgcacgtctttgtgcccggctgctttatctcatgtaaatggaatcatgccatgtgcacgtctttgtgcccggctgctttatctcatgtaaatgaatcattgccatgtgcacgtctttgtgcccggctgctttatcctca

SEQ ID NO: 18714 - DNA, 451 bp, Homo Sapiens
cccccgctgggcggtgacggtgccacggctgtagccggcttccatttgcttgagcagttcggcctgtttttccggctcggcttttttctggtagaccgtggccaactcgacgtagcagatatcggtggtgttcagcgcggccttgcagatgctttccacttcatccagatgctggtcgtaggtgtcctgggtgcgatacagcagcacctgggccaggccggcttccgggtagcccgaggcgcgccatttgctgatctgctgctgggcgttgatgttcgggaaactgtgcgggtattgcaggtacaacatcgccagcgggatcagcgtgttgccttcgccgttggcaaaggcttttttcaacaggccttcggcttcatggtgctcggcttcagtggcgcccggcttggccaccagcaggcgacccaggcgtgcctgggcacggggcgaggta

SEQ ID NO: 18715 - DNA, 710 bp, Homo Sapiens
ctgttggccacgatcgtcaaatggctggcgtcgtccagccgcacccccagcctggcgttgcccaggttcttgcgcgccgcgccgtggtcgcggtagccgtcggtggtcatgcgcgacagatcgagcacgtagtccaggtcgccggacgtgcccgaggccttggcgccgtagcgccaggtgtggtcgctgccggcccaggccgacgcgccgatttcggacggcaccgccccgtcctcggtataggccaggatcacgccgcccgaggaattgccgtacagcgccgagaacgggccgcgcagcacctcgacccggccaagcgagccgatgtcgatgttggaggtctggccctgcccgtcgggcatggtggccgggatgccgtccacatacagccgcaccccgcgcacgccgaacgtggagcgcgcgccgaagccgcggctggacagctgcagatcctgcgcgtagttctgccggttctggatctgcaggcccggcacgcccgccaggccctcggacaggttgatgcccggctgggcgcggcgcatctccgcgccctcgacgatgtccaccgaggccggggtttccaggggcgacgcgcccaggcggggtgccgctcaccacgaccggcgccagttgcggcgcctgcgatttcggccatggcggctacggccggcgccatgccgagcaggctgtgcaggatcggggcgggccaa

SEQ ID NO: 18716 - DNA, 669 bp, Homo Sapiens
  misc_feature (57)..(65): n is a, c, g, or t
cacccacgcgtccggagagactgctcagattctaagttgttggccttgtgtgtgtgnnnnnnnnnaagttctcatcattattacatagactgtgaagtatctttactggaaatgagcccaagcacacatgcatggcatttgttccacaggagggcatccctggggatgtggctggagcatgagccagctctgtcccaggatggtcccagcggatgctgccaggggcagtgaagtgtttaggtgaaggacaagtaggtaagaggacgccttcaggcaccacagataagcctgaaacagcctctccaagggttttcaccttagcaacaatgggagctgtgggagtgattttggccacactgtcaacatttgttagaaccagtcttttgaaagaaaagtatttccaacttgtcacttgccagtcactccgttttgcaaaaggtggcccttcactgtccattccaaatagcccacacgtgctctctgctggattctaaattatgtgaattttgccatattaaatcttcctcatttatactattatttgttacgttcaatcagaatccccgaaacctcctataaagcttagctgccccttctgaggatgctgagaacggtgtctttctttataaatgcaaatggctaccgttttacaataaaattttgcatgtg

SEQ ID NO: 18717 - DNA, 427 bp, Homo Sapiens
caaggccactacccagcccccccgccagcgcggcctggatccccatcagattggggctctcgtaggcgatgcgccagcggcgtccggcgcgttcgagcgcgtggatggcgcggttgcggtagatgcagccctgcggaaaggccaccagcggcaccggttcgctgctggcgggcagcgcgtgcgggccggcgatccagtgcaggtgttccggccaggtggtcagcgccgggccggcgccgggttcgcgcttgagcagcgccaggtccaggtcgccccgttccagcccgcgcgtcagcgccacggtcaggtcgcagcgcaccgacagcctgacggctggccgggcgcgggcgaactgcgccacgatggctgtcagcgtgtcggcggcgaaatcgtcggggatgcccagccggatcacctcgacccgctt

SEQ ID NO: 18718 - DNA, 803 bp, Homo Sapiens
ggatgcccctctaaaagatcaaaccttacgcgcccttgcttgtcactaaaaatcctcttctatggtgtcactgattttcatttcatggcggggagattgacaacgctctgactggaaacaccttggcgttcctgaatttattcgccttgtggcctactcgcctataagcgacgagcgatatacctatcaggccctcccacaatctgccttcccaaaagtgaccatgctagaatggctatagtgaacgcatcatgtagcgccgctttagtcgttacgggtgtggtgactactagcttggtagcgccacatctgtcgctctcttagcttcctctccttcctttttcgtccgtctctctcgcttcaccttaaaaggtttactcggtgagcgcttattatgtgtcgtctttattgccgttccagctccaagatctcatcacccgtagtgcctcttcttgaccataggactttggactccaggatcgtaagattcgagctctttataaggagctctgtgtccaactccgaatatcgtcaattcttacggagatcttggctattagtcatgaggactcagacgataacgagttatcgatattaaagatttaattccattattaaacgctattttacaggtattattgcctgtatttaggaggatctcggggaatattgctgaatacctttatatatattcgaaatcctcaaattctcccctctgaaaaaggaacccattatgacatataatatagaatgaaagtttcctttccccttctgcgtgctcgtgatcctttttgcggatgttg

SEQ ID NO: 18719 - DNA, 658 bp, Homo Sapiens
ggggggccgctctaggggatcccctcttacctgccccgtgcttgcaaccccatagctcttctatagtgcccccttaaattcaattcccgggccgtcgttttacagcgtccgtattggaaaaaccgtggggttacacaccttattcgccttgcgtcatatcccctgttccccacccggcttaatacatgagaggccctccccaatagcccttcacaaatgtcgcgtaccctgattggccactggttatcgcccagtaggagcgcattaaacccggcggatgtggtggttacgcgcaggtggatcgctacacttggaccggccctatcgcccgctctctacgctttcttcctttcttttcttcccaattttgtcggtttacgccgccaggctttcactaggagctctctttagggtgcccatttagtggttcacggtacgtcgatcccgaaaacttgatcagaggaatggttcaaggaggtggcttccctctgagaaccagtcctgcacatttgattttggatctctggttttgaatcggattcttgttcagaactggagatccatccaggtataccgaatattcttttagtataatgtattatgcaaatgcgctcgattgattaaacagttgggattaaaaaatttaaccgatttttta

SEQ ID NO: 18720 - DNA, 268 bp, Homo Sapiens
ccccacgcgtccgtgggctagttgaaggaaagttttggctacccagttgttagctgctgaagtttaactgtgcattctaagcacaccagtattttattacatcatacctgggcagcagataattttagtaaaaccttgaaaagatatgactattgggaagaaatttgggattctatcctttttctctccattcttctctcctgcaccaagtttctaagctcgtgattaaataaattctgaccctactctgataaaagtgaatctttgc

SEQ ID NO: 18721 - DNA, 636 bp, Homo Sapiens
  misc_feature (156)..(208): n is a, c, g, or t
ccacgcgtccggactagttctgatcctcccgccatttcatgctccccacccaaaaaccactttcattcactattttgttatctatatttccaaatggcatgctacctttgctcttcttgttaggcattattaattgaatttacagttggaagatgnnnnnnnnnnnnnnnnnnnnnnnnnnnnnnnnnnnnnnnnnnnnnnnnnnnnntttgccgggcttttgctggagctgatcgccaggaggtcagtcatgggtgacgtcacctcaatcaagcgcaaaggcagtggcggcccaccggcggctggcgctcatatcgacagcgccagctatgcgctgctggtggaaaccctggtcgggttcctggagctacaaatctcatagggcgaccaaggccgccactgcaatgagctggcgcgcctgactcagaaactggagagcttggcgaagcggtttaccccgccgaagggggccgcatgactgacgcaacgatcctattccgtgatgcgctccaggccgtctatggccctctcgactggctaccatagcccgacggtgcaatccaccggttccgtgtgccggaggataagcctggctcgctcaacggctggtatgtgctgtacctggacggcattgca

SEQ ID NO: 18722 - DNA, 770 bp, Homo Sapiens
cgaaaaaacgcggtaggtgtcgttcttgagctggtggtcgtcgttgcgcttgctctcttcgtagcggcccttcaggccggagccgtaaaagatggcggcgttggacgactggtcggcgccaaacaggtcgatggtgacgctgtagtggaagttcaggtagcgctggatcgtcggcaggtcgatgacgccggcggcgcgcacggcggccgggtcgtcggtcttgagttggttcatcacttcgcaggtgcgctggatcacgcgcgagatgccggattcgcccacgaacatgtggtgcgcctcttcggtcagcatgaacttggtggtgcgggccagcgggtcgaagctggattcggccagcgcgcacagctggaacttgccgtcgcggtcggtgaagtaggtgaacatgtagaacgccagccagtccggcgtcttctcgttgaaggcgccgagaatgcgcgggttgtccgaatcgccggaggtgcgctgcagcagcgcatcggcctcttcgcggccgtcgcggccgaagtagcggtgcagcaggtagaccatggcccacaggtggcggccttcctcgacgttgatctggaacaggttgcgcaggtcgtactgcgacggcgccgtcaggcccaggtggcgctgctgctcgatcgaggcgggctcggtgtcgccctgcgtgacgatgatgcggcgcatgttggcgcggtgttcgcccggcacgccctgccagacgtcgcggcccatgttctctccgaagtggatcttgcgctggc

SEQ ID NO: 18723 - DNA, 899 bp, Homo Sapiens
ccgcggcaccgtctgcctcgttccgcatcaagggcatgaaactggcccgtgaaccgctgcgttactccggccgtaccgccatgcgtgctgacatcagcgtgcatgagccacgtacgccacaagacaacgacaccgcgttcgccttctccatggaaggttactcggggtcggtcgagccacgtcagcaggtgccatttgcctggtcgccgggctggaactcgccgcaagcctggaacaagttccaggacgaagtcggtggtcacatccgcgctggcgacccgggcacccgcctgatcgaaagcaccggtgactcgctgaactggttcgccagcgttccgcgtccattcaatccggcccagggcacctggcaggttgtgccgttcttccacctgttcggcagcgaagaaacctcttccaaagccgcgccggtacaagagcgcatcccacaagcctacgtgtctgttgccaagtccgaagccgaccgcctgggcgtcaacgacggtgccatgctcagcttgaacgtcgccggcaagaccctgcgtctgccactgcgcatcaacgaagagttgggtgctggcctggttgcattgccaaaaggcctcgcggggattcctccggcgatcttcggcctcaccgttgacggtctgcaggaggcagctcaatgacctggttcacccctgaagtgatcgacgtgatcatcgcggtggtcaaggccatcgtgatcctgttggccgtggtcgtggcgggcgcctttgctcagcttcctcgaacgtcgctggctgggctgggtggcaagaaccgttacggtccgaccgcgttggcccgtttggtatgttccagatcgccgcccacatgctgaaaatgttcttcaagaagactgggacccgccgtttgccgac

SEQ ID NO: 18724 - DNA, 817 bp, Homo Sapiens
  misc_feature (62)..(651): n is a, c, g, or t
gggggggccgctttaaaggatccaagtttacttacccgtgcttgcaacttcttagttttttnnnnnnnnnnnnnnnnnnnnnnnnnnnnnnnnnnnnnnnnnnnnnnnnnnnnnnnnnnnnnnnnnnnnnnnnnnnnnnnnnnnnnnnnnnnnnnnnnnnnnnnnnnnnnnnnnnnnnnnnnnnnnnnnnnnnnnnnnnnnnnnnnnnnnnnnnnnnnnnnnnnnnnnnnnnnnnnnnnnnnnnnnnnnnnnnnnnnnnnnnnnnnnnnnnnnnnnnnnnnnnnnnnnnnnnnnnnnnnnnnnnnnnnnnnnnnnnnnnnnnnnnnnnnnnnnnnnnnnnnnnnnnnnnnnnnnnnnnnnnnnnnnnnnnnnnnnnnnnnnnnnnnnnnnnnnnnnnnnnnnnnnnnnnnnnnnnnnnnnnnnnnnnnnnnnnnnnnnnnnnnnnnnnnnnnnnnnnnnnnnnnnnnnnnnnnnnnnnnnnnnnnnnnnnnnnnnnnnnnnnnnnnnnnnnnnnnnnnnnnnnnnnnnnnnnnnnnnnnnnnnnnnnnnnnnnnnnnnnnnnnnnnnnnnnnnnnnnnnnnnnnnnnnnnnnnnnnnnnnnnnnnnnnnnnnnnnnnnnnnnnnnnnnnnnnnnnnnnnnnnnnnnnnnnnttttacgcggaattaacaaatatttaacgctacatattaggtgccacttccggggagtgtgcgcgaccccctattgtttatttctaatactccaattagtatcgtcatgagacatactctgtaaatgcttcatatattgaaaagggagagtatgaaatccacattt

SEQ ID NO: 18725 - DNA, 367 bp, Homo Sapiens
agtccacgttcttattagtggactcttgttccaaactggaacacactcaccctattccggtctattctttgattataagggatttgcgatttccgctattggttaaaagtgagctgatttacaaaaataaccgcgattttacaaatattaacgctaccattaagtggctactttcggggaatgtgcgcggaacccctattggttatttttcaaatacattcaatatgtatcgcctcatgagacataacctgattaatcgctcaatatattggaaagaaaaggtagagtattcacatttcttgtcgccctaattctttttggcggcattttgcttcctgtttgtctcaccaaacgctgtgtgagataa

SEQ ID NO: 18726 - DNA, 383 bp, Homo Sapiens
gcacacgctcggagctgtcaccctgcaggtttgcccggcagtggcattcggcatgtgctgactcgccacgagcagggcgccggctttatggccgacggttatgcgcgggtcagcggcaagccaggcgtgtgtttcatcatcaccgggccgggggtgaccaacgccgccacagcaatcggccaggcatacgccgactcgattccgctgctggtgatttccagcgttaaccacaccgctagcctcggtaagggctggggctgcctgcatgaaacccaggaccagcgcgcgatgaccgcgcccatcaccgcgttttcggcggtggcgttgagtgccgaggatttgccggaattgatcgcgcgggcctacgcggtgttcgacagtga

SEQ ID NO: 18727 - DNA, 299 bp, Homo Sapiens
ttcaaggacttcaaggagcagatgaagtttggcggcagcacggacgatatcccgctgaagtacgcaccgctgaccttcggctacaacggctaccgctacaccgagcagtcgcaattggggctgggcttgagcctggtggtgggtacacgcgcgttcttcggctacggcagcgacgccgaggagttccagtacaagcgcgacaaggccagcccgagttttgcggtgctcaagggcgacctgaattacacctacaccttcggcaacgactggcaatcggcgtccaaggccggcttccagtt

SEQ ID NO: 18728 - DNA, 746 bp, Homo Sapiens
tccaggtcaactcgattcattcacagggcatcgatcgcctggcgccaggttttcaggtcgaggccaccgcgccggacggcctgatcgaaggcttttcggttcccgcgggcaaggcttttgctttaggagtgcaatggcaccccgaatggcaggtaagctctaacccgcactacctcgcaatcttccaggcatttggcaatgcctgtcgaaagcgggtgatgcaacgcgacgcggatgctgcgtcaacttacgcctgacctttaatggatgtcaggaaacacagcccagaggcatttatgagtaacaacctcgaccagctcaccgattggttgaaagaccacaagatcacagaagtcgaatgcatgattggcgacctcaccggcatcacccggggcaagatctcgccgaccaacaagttcatcgccgaaaaaggcatgcgcctgcccgaaagcgttctgttgcagaccgtgaccggcgactatgtcgaagacgacatctattacgaattgctcgacccggccgacatcgacatgatttgccgcccggacgagaacgcggtgtacctcgtgccctgggccatagagcctacggcccaggtgatccacgacacctacgacaagcaaggcaacccgatcgagctgtcgccgcgcaacgtgctcaagaaagtcctcaagctctacgccgataaaggctggcagcccatcgtggcgccggagatggagttctacctgaccaagcgctgcgaa

SEQ ID NO: 18729 - DNA, 311 bp, Homo Sapiens
cacccacgcgtccgtgcaaagctgcctccctcgacagccagccgctcagctggtggggcttttgcaagcaacgatacctagctggtgtgtaggggggagcaccacctgccgccccgagctgctctctcaccagagtccatgggcttggtggcctcagcgggaagggggtaaggggcggggggagtgagacgggaggagtggccaggcagcccgtgccaggcgctcagtccacgagcggtggccgcccgttcacccccgatcgacccccagctatggaatttcatttattaaatgtcaaggaggctgctggc

SEQ ID NO: 18730 - DNA, 743 bp, Homo Sapiens
  misc_feature (571)..(580): n is a, c, g, or t
ccacgcgtccgtaaatatcaagggatggtagaaagtatattaaactctattgcaaaagatccgaattccaaaattactattaatagttttatatttaaaataatatgtacctaatcttgggcctcagttccctccatgtataaaagattattgtagtaaattcaaatttatggtctcttaagagctcagctttacactttgttaagtgaaataaagcagcagacttgaaattaggagatttgaattctacttcaaagtatatttttgtatttctatgagtgtgtggctacatgatttacattctgtattttctcatggaatataatgagatgtcatttagctttctctcaagcttaggaatgtcacactgagtcactgacttgtcgtcaggcctggaatcaccattctctctgctgccgtcacctcataacagctatctccatattctgtgttggatgtgtttccttctcaaagttcccctgaacaggagggtctgtgtatcttaatctgcatatatccagtgactggcatagaattggtacattaaagagacaataacagtttgactaannnnnnnnnncaaactttggttttaaaaactacatataggcatacatgtttcatttttattatatcaccataaattagtttccaaataatattgtaatccaaaaatgtgttaactagctcctcaaaattttttttatcattcttattcagaattcactaagcatctattatat

SEQ ID NO: 18731 - DNA, 860 bp, Homo Sapiens
  misc_feature (168)..(180): n is a, c, g, or t
cctcaaaagatacaagatttaagctcccgggcgggcgcatgcaacgtccttcatattggcccctgaaatctaatttcggggccgcctttttcaaattacgggaggggaaaaaccaggggtttaccaatattaacccctttgcccaaactcccccttccctttcggggnnnnnnnnnnnnnggccccgcccgttcccctctcccttcttgcccctgcggaacgggaatagggaacgccacgcgccccgcacctatacacgcggcggggggggtgttgttggctacgcggaacgtgaccgctgcacttgccctcaccgccgcgccttctcctttctctctcttctcttccgtccacgtccccgggggttgctgtcaaagtctttagctgaacgccacctccacaccaatagatagatgattggctctttgactttgagatccgagtcttttaaataggactcgtaggtccagatcgaacagaatcaaaccatacccgggctattcctttaaataaaaagaaatgaccatgtcgacctatgctataaatagagactgattacaaaataaacgcaattccacaaaaattaggctaacctttagttgcacttgtccgggaatggacacgaaaccaattcgtattttccatatacatacaatagattcgccctgagacaaacctgacaatgcctcatagattaagaaaagggaaagagagttccaatttcccggtccgctgatacctattcgcgttatgcccttcctgtttcggccaccaaaacccgtggggtgggggggctgggttcgtagggggcaaaggtgcttatcggcatacgatcctaccccgggaaaacctttagaatt

SEQ ID NO: 18732 - DNA, 511 bp, Homo Sapiens
tacatcgcccaggccgtggtcggcacgctggcatggggcctgcgcccggccgatgcgctggcgctgccgcacgtggcgggcaacaccggccgcagccaggtcgagaagggccgcgtcccggcggacgccagcgcgtcgctggccgcgcggggccacaagatcgaacaggtggaaatgaaaagcggcgccgccgcgatccgcgtgacgccgcaagggctggatggcgccgccgatccccgccgcgacggcgccgcgctgggccactgaggccgactcaggcgctcagcgtgtcgtacagctcgacgtggatgcgggccacccgctcgatgttgaattcgcgctcggccaaagcgcggccggccgttcccatcgcctggcgcagcgtcgcgtcgcccgccagccgggcgatggcgtcggccagagcctgcgggtcgcgcaccggcaccagcaggccggtcttgtccggatcgatggcatcgcggcagcccggcacatcggtcgtcaccaccgc

SEQ ID NO: 18733 - DNA, 365 bp, Homo Sapiens
  misc_feature (119)..(127): n is a, c, g, or t
gtctgtgacaacgctgtggctcacctgccagtgaggggtgtattaatctgtcctatctgctgcccatttctcctgaccctcttagagaatgttcttaggcctgaaggggggctgggcannnnnnnnnagtaggatggacgaaaaccccctccagagcaaggaggccccctcagccctgtggttacagccgctgatgtatctaaaaagcatgttgattgggtgttcctccctaactccctgatctgacaacttgggggcctgggggctttttgagcctcctctcccttctgtgagtcgctcccagatccctggcccatgggaaggacaaactgggtgggtccatgggacctggggggatgttgctc

SEQ ID NO: 18734 - DNA, 339 bp, Homo Sapiens
  misc_feature (146)..(254): n is a, c, g, or t
gggaggccgccctaaaggagccaagcttgtctaagctcttctgggacgtcacatctcttcaattctgtggcctaaattcaattccgtggccgccggtttaaaggtcgcgactggaaaaaccctggcgttacccaactccccctttnnnnnnnnnnnnnnnnnnnnnnnnnnnnnnnnnnnnnnnnnnnnnnnnnnnnnnnnnnnnnnnnnnnnnnnnnnnnnnnnnnnnnnnnnnnnnnnnnnnnnnnnnnnnnggggtgttggttagcgccgggtgtgggggttaccttgagcgcgaccgctacacttgccctttccctatcgtcccctcctttccct

SEQ ID NO: 18735 - DNA, 804 bp, Homo Sapiens
  misc_feature (557)..(602): n is a, c, g, or t
ccacgcgtccgaataactcttaatgagtagtctttgctgtaactaattactgtatataagtaatctatttttgctttcttgtttgaattaagtgaagcatgtaataaactacaattaaaattttcaatgtatgtattatgcttgctgcaatgaaatttggatttttaaaagagtaattctaagtacagaatataaaatcatgactttgatgcaaattagatatttttcctgaatataaaatgaaaatttggaaagaacagacgtgggtgcatatccgtgttctaaagttactcagttaacatatttaaatttaatttttaattcccactaccacctccagcttcttttcaagattactgaacatggaagcttgggttaaattccgtgagttatattctactgaatttctaaagtctccaagaaactcgtgcaaaacaaactttttgaaatattgtattggagtattatagctttctttacggtctcattactgttttgaaaatctgaaaaactaaaacacactatgggtgtgttgggggattagtacaacctttatnnnnnnnnnnnnnnnnnnnnnnnnnnnnnnnnnnnnnnnnnnnnnnatattttattataacatttgattttctgtattaatttggcttctgtaactttagtgtgtgtacttccctctccaccccagatatagttggaagagaatgaccttcttagatggtcacttctatgcttttaaagggtatgcatgaagctggaagtctccaactgaactgtttttaaaaacaaagatgccagctgggcactatt

SEQ ID NO: 18736 - DNA, 655 bp, Homo Sapiens
  misc_feature (122)..(346): n is a, c, g, or t
ccacgcgtccgtaaattaaacatttttctttcattagtaatattaaaacacttaaagctacattgagtgatagcaaattagtaaagcctattaagtcttctatgtaaagtatgattcagaannnnnnnnnnnnnnnnnnnnnnnnnnnnnnnnnnnnnnnnnnnnnnnnnnnnnnnnnnnnnnnnnnnnnnnnnnnnnnnnnnnnnnnnnnnnnnnnnnnnnnnnnnnnnnnnnnnnnnnnnnnnnnnnnnnnnnnnnnnnnnnnnnnnnnnnnnnnnnnnnnnnnnnnnnnnnnnnnnnnnnnnnnnnnnnnnnnnnnnnnnnnnnnnnnnnnnnnnnnnnnnnnaagtatattttaatgaactttcttgcatagtcatttaaaaatgcatttagaatttttaacaaatgaagctttatcttaaaagccacctgacagtgtccttcaaggatggaaacatttatatgctgtgacccaataagtctgttttaaggtaataatcaaatgcagacatagagtgtacaagaatgttaatcacagcattttaaataataaatagtataatatcagaagcagcttaaatgtcctaacagaatggaaatggtcaaattataaactatttatacagtttttatatggccattaacaatttta

SEQ ID NO: 18737 - DNA, 898 bp, Homo Sapiens
agccaaaaagtgtagcccagcgactgcgcctggctgcgctggctgatttcgatccacacagcttccagcccaaaagccggatctttggcggtaatcccgttgaggctgccgaacacctggcccgggttgatcgccagttcgcggtccgggtagatctcggcttcggccaggatcacccccatcagggtcaggcggtaggcgctgggagccaggtcgaggttgtcgcggatgtgcacggtaggcatcaggaagcccaggtcctgggacaacttcttgcgcacacccttgatccgcgccagcaactgcccaccctggttgcgatccaccaggggaatcagacggtaaccgacttccaggccgatcatgtcgatcggggtcacgtcgtcccagcccaactccttggtttcaagggcccgggccggcgatggcagcagttcctgctgacgcgccacttcctgctgggcaatcaccttgatgttgttttgctttttccagaacaggtaggcaccaccggcggccatggcagccatgctcaggaacgagacgtgaggcatgcccggcacaatacccatgatggccatgatgcccgccgccacggccagcgccttgggcgaggcgaacatctgccggctgatctgcttgcccatgtcttcggagcccgaagcacgggtcaccatgatcgccgccgctgtagataacaacagtgatggcaattgcgccactaaaccgtcaccgatggtcagcaaggcgtaaaccttgccggcgtcgccgaaggtcatgccgtgcttggaagatgccgaccgccctgcccccgatcggttgataaacagagtcaacagggccggcgatggcgtcacgcgtacaatttgcctggcaccgtccatggaaccgtagaact

SEQ ID NO: 18738 - DNA, 909 bp, Homo Sapiens
  misc_feature (417)..(463): n is a, c, g, or t
ccccacgcgtccggtaacttggctttagtatttatcagttgccagaaagaaacaggttgtcatttggaagtttttgtggttattttttcccatttttattcttcagataaaagcagtaccccaaaatagaaaatgaaaattttcatgaaacaaagagaactcccttgttaaaaccagcttattaactctgtattctgtcaaatgcatttttttctaacaactgaccatggatgttgtgaaggtgcattttaatttaaacatggaaaagatttttttcataattacatactagaatgtaaaattataattttgccatgacttaaagagcacagttgatatcccaaaggttttgatgctaagaagctacagttattctaaatgcactaaaatgtttgaggcaaatctaccttagaggcnnnnnnnnnnnnnnnnnnnnnnnnnnnnnnnnnnnnnnnnnnnnnnncctgtgagttattctgtatttgaaaagatgttcgtgtcttcccctctgtattgaatgtttcactcattttatttttaatcaaatattttatagaaatgagttgttgggaagagtttaacatgcactatttatagtactttgccgttaacaggcaatgttctgaaactaaatttatttttgttcagtgaacataagtttagatttttaaagttggtagataatttatctccactaatatttttttaagaaactgtgaagagattaactgggaataattttatttcagattttactaatgtagtatgtagctacaacttcttgaacttcaagttaaaggctagacatttactttgaaaaattcactgggtgtttccagggctatttcattttagaaataattgttgccattcttctgcaaaaactggacaaggggaatactacaaaat

SEQ ID NO: 18739 - DNA, 221 bp, Homo Sapiens
cgagcccgcggccagttgccgccgtttctcgacgcgtacctgccggccagcgccgccgagtttcgcgtggccatcggcgaatggctgagcaaacacctcagcgaattgcagttggtgggcaaagacgccgcgcacatgttcgtgaccttgctcatcggcatggtgttgggcgcgatcatcgccctgcagcgggtgccggacctcaccaagcgcaaacccct

SEQ ID NO: 18740 - DNA, 331 bp, Homo Sapiens
tcgggggccccctaagagggtctgcaaagtcatagctctgaatgcgagtccccaaattttctttagtgggacgaaaattttattcgggggccctggtttaaaaccgggcgttacccaaaaaaccctgcttttacccaatccccctttcttgagctggcccccctttgaaaaggccggcacaaaatcgcccttcccccccctgatcaccctgactggcaaatgggaaccgccaatgtagaaatggattacgccctgaaggtgcggtggttacccggcgggtgaccgctatacttgcaagggcactaccgcccttgcctttcccttacttccc

SEQ ID NO: 18741 - DNA, 490 bp, Homo Sapiens
tcaaaacttccttccccgggcaagcaaattcaaagctcttcaatagggtaaaccaaaattcaattcgggggccctctttttacaaggtaatgactgggaatacctgggcgttcccctttttaatcgggttgcaaatcatcccccttccgcaaaatggataaataccaaaaatgccgcccccgatcgccttaccccaaatttactagtcatggatgatgaagtggaacccgccctgataacccccattaaccgcgcggggactggtgcttacgcccatcgggtcgccttacttctgctcgcgccctaatgtccgctcctttccctctgttctcgtccttttcccgcaagttcgcgggacttatctcgtgaaatgctttaaggcacctgcatcccataagattgaatgacgtttatcgccgatagacgtaggaaccacgtgtcttatactgatcctgtatcaagactgtatatgttctagctatctctggct

SEQ ID NO: 18742 - DNA, 795 bp, Homo Sapiens
ccgcaaaatctcgttcaacgtgaccttcttcccgatgcacttcctgggcctggccggcatgccgcgccgctacgccgactacgccgcgcagttcacgaccttccaccagatcgccaccatcggcgccttctggttcggcctgtcgcagctgatcttcctgtgggcggtgctgcgctgctacatgggcaagggcgagaaggccacggccaagccgtgggaaggcgccgaagggctggaatggacggtgccgtcgcccgccccgttccacactttcgaaacgccgcccgaagtcaagtgagcgccgattccaaccccgcaacaggcagcatggcaatgacccccgagcagcgccgacgcaacaagatcgcaggactgattctgctggtattcgtcattgccgtgttcgcctggaccgtgttccgcggttcggcgctgttgacgggcaaggccatcggcggctagcgaaccatgagcgacgacctgcgtgaatccgcccagcgcaagctgagtttccttcagacgatgaaggcggtggcgtgggggtttttcggcgtccgcaagggcgcgggctaccgcgaggacagcgccaggctcaatcccgtgcacgtgatcgtggcgggattgttggcggcggcgatcttcgtgaccgtgctggtgttaattgtgcgttgggcggtatccaagcctgacctcgaatcacttaattctataaatcagtaccagggagaaagccatgagtgcaagccactcggttcagggtaaagaggcaccctattactacatgcccgcccgatt

SEQ ID NO: 18743 - DNA, 473 bp, Homo Sapiens
gggggcggcccctaaaggggaacaaattttcattgccgtgggagggagggtggcgctttttaaatgggtccccaaaaattgattccgggggccgtgtttttacggcgcctggaggggaaaacccttgtttgcccaactttaaattcctttaaacctactcgcttttgccccagggggattaacaacaagagcgccgccacagaggcgcttctcaaaatgtgcgcatcaaagaatggagaggggatcgccccttgaaccgcctacttgggcgcggcggtggtgggagcaccccccacggggggccccactcttgccgccgcctcagcgctccccctcttttcttgtctccctctctattcgcggctcgtgggggtgtttccttgtgagggttttagtgggggggctcctataggggctgtatagggatgagtggtcttgtgggtggcagccctctagataaaacgtttttcccc

SEQ ID NO: 18744 - DNA, 616 bp, Homo Sapiens
cccgggaaggcgccttccaagttcttctaatgggtcccctaatttcatttcctgggcctcctttttacaacccctggactgggaaaacccgggttttacccattttattcgctttgaatcacttccctttttcccccccgggggtattagagaaaaggccgcccccattcccccttcccaacttttgcccaccctgattggcaaatgggacgcgcgcggtaacgcgcctttaagcggggcgtttgtggtgtttacgcgcaaggtgaccgctaaattggcttgcgccctaccgcccgttcctttcctttttttctctcctttcccccccggttcgcgggctttccttgggaggtcctaatccgggggtctccttttgggtgtcctattagtgttttaggccctccgatcccaaaagtggtattagggtgagggttcccttagggggctatgccgctgagaacggtttttccccttgaccttggattccaggtctattattatggacttcttgttcacactgagaacaccaattgaccccttctcgtgcttctttggatttttgagggatttgcccatgtctccctatgtgttaacacttatcttatttacaatattt

SEQ ID NO: 18745 - DNA, 703 bp, Homo Sapiens
  misc_feature (80)..(149): n is a, c, g, or t
  misc_feature (249)..(310): n is a, c, g, or t
gaaagccacgaaaattgtgatataaagtcatttcttggggcgacatttttggggttaaccaaggggaaacccttgttaannnnnnnnnnnnnnnnnnnnnnnnnnnnnnnnnnnnnnnnnnnnnnnnnnnnnnnnnnnnnnnnnnnnnnggttgggagggcgaccggaagggcccctggaatggccactggagcggggcctgtggggtggcggtagggggggtgacccccatggtgacccccacccttnnnnnnnnnnnnnnnnnnnnnnnnnnnnnnnnnnnnnnnnnnnnnnnnnnnnnnnnnnnnnnggctttcccggttggcttctccctttagggttccaattggggttccgatttgggctccaatttaatgccttgccgcaccttgttgattaaaatagatggttcacgtgatggaccaacggtcgggctatcttttttgaggacgtttatgttgcaattcgacgttggtatgaacgtacttttaaccctggagtttagtcatggacttccccaggggattgtgctgagtctgatctattggaaataaaggcgatttttaacgcaaaatttaacaaaaaatttagcggaaattattcgtggagaatgttcggggaacttttcgtggaaatctttctgataccttttctgttgaatttgcaaatgaaaccacacccgtaaatttttcctgggaggaca

SEQ ID NO: 18746 - DNA, 982 bp, Homo Sapiens
  misc_feature (63)..(174): n is a, c, g, or t
ccacgcgtccgcaagtaacagactaattaagaacttgagcaaaagcaatggcaaagccgaggnnnnnnnnnnnnnnnnnnnnnnnnnnnnnnnnnnnnnnnnnnnnnnnnnnnnnnnnnnnnnnnnnnnnnnnnnnnnnnnnnnnnnnnnnnnnnnnnnnnnnnnnnnnnnnnnacaaacaaagcaatggcagtaaaaataagaaggaaaagacataattgtaaacagtaaagggctgttttaggcattacaggacaggttaataaattggatgtacaaaatgaaacagaggagaatagggtaactcctttttcttgcttggataactggttggatactgataagactagatttgagatggaagacagtgaggtcaactttagacaggttaactttgtacatgtgagacgcgcaggtagagatgctgggctcatgggagagagctagatgagacaaaggttcaagtcataggaatgaatgagatagcccaaagaaaagagtgtagaatgaggcgatacctgaagtatcagagtatctgagcacaggatatcatataacaaatgtaattgagaaaagatacttctgtacttctacagcacagcttatacagagtgttttgcaagaaagctaattctctattaggagtcttatcacttataaagttttaagcaattgtgttctgtatgcctgagaagtcacgtgcgttgtgactcaggattatttttatatcagctgcaattcagctctaacaatcatgatgatttaatttttcttctgtaaatcatatcctgttgccacactcagatggagatgatgcgtttatccttatgtctttttcattcttcccttctcagaatgtcctttatatagtgttatttgacaaactgtggtacttttttcttaatttcattttctgagaaggattgatgtaattttaatgggcaccacttggcggggttgcaaactccatgatatccatgcc

SEQ ID NO: 18747 - DNA, 267 bp, Homo Sapiens
  misc_feature (108)..(116): n is a, c, g, or t
  misc_feature (152)..(190): n is a, c, g, or t
ggggggggcgttaaaaaaaataaacttatagtgcgcgggggtggcaaggttaaccttcttttaaggggcccccaaatttaatttccggggccgtcttttaaaagggcnnnnnnnnnaaacccttggggttacccaatttaatcgttttgggnnnnnnnnnnnnnnnnnnnnnnnnnnnnnnnnnnnnnnnggccgccacgaacccccttcccaaaatttgggccacctaaaggggaaaagggaccgcccctggaggggccctttaac

SEQ ID NO: 18748 - DNA, 677 bp, Homo Sapiens
ccttataaacgccgggggcgattttgctgagcccaaagacgaggcatgtgcacggctttgtcgcgcgactccggctgcgccgcatgggcaagcagttgtacaccggctgccaggccgagatcctcattttgaacgacctggtcgcccatggcattaagtcggacttcggttccgatcctgatgatttcgccgacttgatcgctgccggcgaccccagtcaggagagccagctcagggggctcaagttgctcagaaacctggagcagtcgggccgcgtgccgaccctgggggaaaccgacagcattgtcgattcgttcagcagctacccgtctgagcagctggaactcatcgaaacctacgccggggcactcgcagtccgcctgatcaatatgaagagaggtctgcctcctcagcaaggcgtgcgaatccttgaggcgctagtggccaacggttgccagttctccaagttgtcactggctcacgcgctattcaacggctgggggtgtgacgaggacagcgcgcgcgcgcgttcgctcgtggctgagcttctcgcgttggtgcgcagtggcaaagtcgattttctggagcccgcttcgtacgcggagctctattcgcttggcgccaaactctccatgcaggcgggcgatcggaggcaagcgttcgagctgtaccgcagc

SEQ ID NO: 18749 - DNA, 222 bp, Homo Sapiens
  misc_feature (167)..(182): n is a, c, g, or t
acgccgtggtgggggaaaacctggggttacccactttttttcccttttaaaaaattcccctttttcccctggggggtataacaaaaaaggcgccccccatttccctttcccacattttctccccccgaatggggaagggggcgacccccggtggggcgccttattcnnnnnnnnnnnnnnnntttttcccaaggggttcccttcttttgttggcgccctttt

SEQ ID NO: 18750 - DNA, 670 bp, Homo Sapiens
tcgggcctcttctatagggccccctaaattcggttccggggccgcctttttacaccgccgggatggggaaaacccggggggtacccatctatatcccctggaagaaaatccccctttccccggctggtgtaataccaaaaaggcccccaccattcgcccttcccaaaagttgcccaccctgaatgggtaatgggaccccccctgtacgggcccattaagcgcggcgggtgtggtggttaggcgtgaggggacccctacctgtgtccgcgccctagcgcccgctccttggcctttcgtcccttccttatcgcccaagttcgcggggttccccctgaagttcctaaattgggggtttccgtaaggtgtccgattgagggtttaaggcgctcgaccccgaaatgtgtattaggcgaaggttcaagtatggggccttcgccctgatagagagttctcccccattgacgttggaactccgttcataagaggatcctgggtcagaagtgacactactaacaatgactgtctagtcttggattagaaggtatatgcaatatcggccatgtttaaaggtattgattaggaaaatgatcgcaatttaaccagctttcgcgcacaagtgcggagactttcgggagagtgcgcgcacacttatggtatcgtctagaacaat

SEQ ID NO: 18751 - DNA, 377 bp, Homo Sapiens
  misc_feature (279)..(289): n is a, c, g, or t
ggcgcgtgcaggacgcgctgtggcaggcgacgcagcccggccccgacagcgcccaagcggcctgagcaggcgccgcgcgtttcgcgcgcgcaataaaaaacggggcaccatatgcgtggtgccccgcaagcatccgtctcataggggaggggaaagaggagaagccgagacggatgacaagactgccaaccaaagtttgcggtctacgtgaagttaggcggcgcccacctcattaagtttctgaaatggcccgttatttcgcggtgaatttgtatcaannnnnnnnnnngcgtcgcgacaacggccgccactgttttcttcccacgggcgcgcacatgcggcggaaccaaagaaaagggccgcgaatctcggccctg

SEQ ID NO: 18752 - DNA, 267 bp, Homo Sapiens
ggctatcaagccgactcctccaacaatcacgagcgcgcgtttccccgaaaatcaatttgccggtcaccggtcgaaatgtggactttgcccccgacgccaatatcctctcgaccaccgacctgactagcacaattacctacgccaaccaggacttcatcgatatcagcggctacacccgcgaggagttgttgggtacgccgcacaacctgctacgccacccggacatgccacccgctgcctttgcgcacatgtggcaggtgttgaaga

SEQ ID NO: 18753 - DNA, 1017 bp, Homo Sapiens
ccttccagcattggccggttgcggtggggggtaccggcgttgttgatgacgatatccaggccgctgaactgctccaaagtgccacgcagcagggcgcccatgctttcatcgttagccacgttgacctcgatgaaatgcgcatggccgccgctttcggcgatttcattgaccacccgctgaccgccgacggcgttcatgtcggcgacgatgaccttggcgccctggcgcgcgaaagtcttggcgatgccctcgccaaaccccgaaccggcgccggtgacgatcgcgactttattggctaaacgcatggtgtgttctccgttcttgttgttgtgaggaatcaaccgtgtttgatcgcaatggtcttcaaggtggtaaagcccagcagcgcctcgaagcctttttcccggccataaccgctggccttcacgccgccgaatggcaattcaacgccgccaccggcaccatagttattgatgaacacttggccacaacgcagggtgcgcgccaggcgcatttgccgcgcgccatcgcgggtccacacgccggccaccaggccgaacccggtgccgttggccaggcgaatcgcttcggcttcatcgtcgaagggcatcacggccagcaccgggccaaagacttcgtgttgcgccaggcgactgtcaggcggcacatcgcgaaacagcaccgcctcctggaaatacccgccgctgccggcctcggccaccaccgttccgcgtgcggcgacggtgatcccggcctgttcggcttcacgaataaactcgcgcacctggcgtagctgcttctgattgatcagcgggcccatgtccaggtccagcgccgaaggcccggcgcgcagttcgctgaagcgttggctgaggcgtgcgagcaagtttcgtaaatgctgcgttccaccagcaaacggctgccggcggagcaggtttgccccgcagtttctgaatggatggcgttgaccagcaccgggcaacgcttctcccaggtcggcatcgcgaaacccagttg

SEQ ID NO: 18754 - DNA, 933 bp, Homo Sapiens
ggcaacaaaacgtccgcacaaataaacatataaaatcttgacctgccttgtggaaaatgttttctctcaaggatgagaaataaaatgagaattctggacttacttcttatcaacattaaaaaagccatgggggttgtatttgttgacctttcctgtttgtatattagttttctgatatggagaattgttctgctttttcgtcctctaccagtctgattaattcgtaggcttaacacttcctttttctttctccttggaatgcctcttgggatatgcattagttggtcttatgtcttttcttggtctaggtggtgtgtgtgtttggcttgtttggggcacttttagaggctccagctgcacatttccactcctctctgtgtgttcctctctgcatctgctgtttgtgtgtgtacactttttttctgagcaatccttctccttagccacattgagttctttaacagtttttctgttttcttcttcattaagataattaataatcatactactcacatatcatgttttagaacttcctaagcctttccctttcccaccttttggacctcctaactgaatttcaaagtcttcattccttagattaaaaaaataaatccaaagataaaagaatgtaatgtcttataagtcgtatcagtgtatattttctctgttattgtttgttagtgttataataaatcctaagtgacacaattccttttctcctacattaattcatttgcttgtacaacaactatttattgagcactgtgattaacaatataatcaaattcccctgccttggaatttacattccaattcaaagagacaaactgtaacaataaacactatgtccttatattaagtagtataagtgctgtgggagaaacaccaaagtaaagggggataagaacgtattgttagttgttctaatataaa

SEQ ID NO: 18755 - DNA, 653 bp, Homo Sapiens
ccacacgtccgcagaaggtagaaaggttgtttctctcccctggatgcctgtgggggtggggacggcagagcctcggacactgcccggggatcactctcaggctacttttcccaccctgccaagctgctcgagacgtcaaaggagaccaggccggtcagcacacaggcttctgtcgctctggcctcgatgtctaaggctccgtgggcagccggcctgtggatgaggcggcggaaaccacatcctcttcatcatcctctcacgaggaaggacactgacagcttcggagaaggctgcccagtgtctgcgggtgcccttgggagatggccttgggacacggtgcctgtgcctgtgtgtgtacaccacgtgtgaacgccaactgggaacacggccccttcgtaggcaaacccaggcctcctggaagtcacaagttgatagctgtactcgccccttttggaagacgcacgcccaaggcacccgtgtgtgcacacgtatccgtgtgtggacctctgtccacacgtgtgtgttttgaaaagcctttctcaccacatgttaggatcacaagtgttcaaaatctaggcacacttttcagaagttatttctggaaaaaatgttgaatctcataacagcaataaaaggaaaataccgcctcagcc

SEQ ID NO: 18756 - DNA, 400 bp, Homo Sapiens
ggggggccgagaaaaagagacaaaaagtttcttttcctcggctgtcgtgtcccggcctttccattgggtggcccaagtttttttcatgggggaggtgtataaacctgcgcctccgggaaatagctggctccgaatgcgcaattagaagcgaccatgccaccacctctcgccctccacagactggtgagagcgtgcaggtgtatacgggacgctccggtagcggcaagttgatcggcgccgcgctggcggctaatctgtactggcctgcttgcctggtccgtcgcctagtgtccgctctctgccttatcttccggtcctttatacgcagtatagttggtattcgaggccacctttagaagcggagtctcctgatatgggtcggatctagggctgtagagcc

SEQ ID NO: 18757 - DNA, 929 bp, Homo Sapiens
aatttcttcacgggttcgaagcagaatatcgttcatttgttcgccaatccgtatttcgaattgctgcgccacgacgtgacgattcctctctacgtggaggtggatgaaatctacaatctggcatgccccgcttcgccggtgcattaccagttcgatccggtccagacgctgaagaccagcgtgcatggtgccattaatatgctgggtctggccaaacgtctcaaggcgaagatcttccaagcatcgactagcgaagtctatggtgatccggaagtccacccgcagagtgagagctattggggtagggtcaatcccatcggaattcgctcgtgctacgacgaaggaaagcgttgcgcggagacgctattcttcgattatcaccgtcagcatgcgctcgatatcaaggtggcgcggattttcaacacgtatggtccccggatgcacccgaacgatggtcgggtggttagcaacttcatcgtgcaggcgttgaaaggccaggacatcacaatctatggcgagggccagcagacacgcagcttctgctatgttgacgatctggtggaaggtttcatcagtttgatgaactcgcctgacacgttgacgggccccgtcaatcttgggaatccgggcgaattcaccattcgccaattggccgaaaaggtactggaattgaccggttccgcttccaaattggtgttcagaccattgccgcaggacgatccgcaacagcgccagccggatatctcgctagcgcgtgaaaaattgggctggacgcctacggtcgaactggaatcgggccctagtcaagacgatcgaatactttcgacaagctgctggtggccgaagcgggcggggcgggtttgaatccatgcctatcgtgaatgccaaccgggtctccatcattacgccagcctacaaaggcggcgttg

SEQ ID NO: 18758 - DNA, 826 bp, Homo Sapiens
  misc_feature (60)..(129): n is a, c, g, or t
  misc_feature (134)..(678): n is a, c, g, or t
ccacgcgtccggtgaggttccaaaatatgtaaaaatgataataataaaaaaagattaacnnnnnnnnnnnnnnnnnnnnnnnnnnnnnnnnnnnnnnnnnnnnnnnnnnnnnnnnnnnnnnnnnnnnnnggggnnnnnnnnnnnnnnnnnnnnnnnnnnnnnnnnnnnnnnnnnnnnnnnnnnnnnnnnnnnnnnnnnnnnnnnnnnnnnnnnnnnnnnnnnnnnnnnnnnnnnnnnnnnnnnnnnnnnnnnnnnnnnnnnnnnnnnnnnnnnnnnnnnnnnnnnnnnnnnnnnnnnnnnnnnnnnnnnnnnnnnnnnnnnnnnnnnnnnnnnnnnnnnnnnnnnnnnnnnnnnnnnnnnnnnnnnnnnnnnnnnnnnnnnnnnnnnnnnnnnnnnnnnnnnnnnnnnnnnnnnnnnnnnnnnnnnnnnnnnnnnnnnnnnnnnnnnnnnnnnnnnnnnnnnnnnnnnnnnnnnnnnnnnnnnnnnnnnnnnnnnnnnnnnnnnnnnnnnnnnnnnnnnnnnnnnnnnnnnnnnnnnnnnnnnnnnnnnnnnnnnnnnnnnnnnnnnnnnnnnnnnnnnnnnnnnnnnnnnnnnnnnnnnnnnnnnnnnnnnnnnnnnnnnnnnnnnnnnnnnnnnnnnnnnnnnnnnnnnnnnnnnnnnnnnnnnnnnnnnnnnnnncccgtgattgataggggatttagcgcaattccggcgttttggtaaaaagtggatctgaataaactaaatttaacgctaattttaaaaaattttaacccttacagtgtgaggtgtcacttacggggaagtggacgagaacctctattgt

SEQ ID NO: 18759 - DNA, 718 bp, Homo Sapiens
cacggtattggccgcgccgcgggtgcggtcctcgaaccagatggcggcggcattgccgccggagatcaggccgcggttgatgatggtgttgcccgcgcccatgacgttgacggcctcggcgttggcctgcgtgcccagggcctggaccttgccgccctgggcgatggtcagcgtgccgttggaaccgaattccaccgtgttgttgcccgcgctccacaagcccgcgcccgacgtggcgagattggaaatcaccgcgccggccgccaccgtgatggcggcgttgtcgcccaggctgacggcattggcgttattgacttcgagcctggcgttgggctgcatcgtgaccgacgcgccggccgcggtggacggcccctgcccgatcggcgccgtggccggattgggcgcggcggtgttgcaggtggtcgctgaaccggtggtgacgcaagcggcctggacgcccgtgccgggccagccgccgaataatgccgcgccgaccaggacggtcaggcgccgagggacgagcgtgaacgacttcgctgcttgcatcgcgttctccagccgacgggcgaataatgatctggcgtatcaatcgttaatgcctgaactcgcgcggcgattatggaggctattttttcgatttccggctttgggttttttctttggatattcgaaataatggatgcaccgagtggcttattaataagcgccagtgcgcgac

SEQ ID NO: 18760 - DNA, 327 bp, Homo Sapiens
  misc_feature (193)..(228): n is a, c, g, or t
  misc_feature (270)..(285): n is a, c, g, or t
gggggggcccctaaaaaggaaaaaagttttcttccccgggatggcgaggtcttggtttttttataggggcccctaatttcatttcgggggccttttttttaaacggccgggacggggaaaacctgggggttcccaaatttaatcgctttggacaaaatccccttttccccagtggggttaaaaacaaaaaggnnnnnnnnnnnnnnnnnnnnnnnnnnnnnnnnnnnntgaagggcaatggggacccccctttaacgggccctttaaacnnnnnnnnnnnnnnnnttaccccaacggggacccctaattttgccggccccttacgcc

SEQ ID NO: 18761 - DNA, 218 bp, Homo Sapiens
ggcataaaagatgacgctggagacgccggtcacgacggtgagccctccgggggtgaatcgggtgaagccatccgaagccttcatcgcgaacgcgaaagcgatttcaagaatgccggccaacccgagcagtagccatgccatggggtgaaccctcaggaaatacagtgagtgtgtggcgaggggacccgccacaacgaatccgcgttggcttatgcctt

SEQ ID NO: 18762 - DNA, 735 bp, Homo Sapiens
ccacgcgtccgagcaaaaagagatgtaattcctttgtgacatttccagtccatgggtaggacaagcagatcagtccaataattacccaaagacatgtaaaattgcaactctgatgatcaaacaaggttatacataccagcacatacttagcactcaatacatgtgagctcttgttagaaatattacacaataagtccttttctgctgacaaatctaaatgaaataaaacattactcccatttatttaacacagatttgaggagctgctgtgagtcttcagctgtgtggtaagattacatgtctactgggggcactcacagcttaattaggaagaaagacaaagaaaccaatcatagtccagtgtgaaagggcttcagtgtaggggcaggaggaagaagagctcaccccattggatgttaacagaaaaggatccttctatgaaagggactggaagaaccaagaagaagagaaggattatgagagtagaggtgatgaggttggcaatggaggagaggagcagaaggaatagaagggaatgaggctatataaacaaagtgatgttgatttgtaaatggctttttccttcaatgaggaaaagagttttaattaggctgtgggtaactgtggaagtattttaaccctgacagtgacatgtatgatcagacttccatattggaagactaaccctattgaaaaccaattaggtaaattacgctttagccatgccttggcata

SEQ ID NO: 18763 - DNA, 429 bp, Homo Sapiens
ggggggccgcccaaaaggatacaagaaaacgttgccgggaaagcgacgtaaagctcctcaatattgccacctaaattcaattcacgggctgtcattttacaacatcatgatggggaaaaccctggcgtatcccatcttaatccgcttgcacaaaatcccccgttccccagctgtggtaaaaaggagaaggccctcaccgatcgcctgtaccaacagtgtcgcatctgattggccatgtgtacgctcacaaccgacgttgaccgctacactggacagtgccttatcgcccgctcctttcgcatttctcccttcttttctcgactagttgctcggtttcccgtccaagctttaattggagggctccctttcggggccaattaatgccttggcgggacttctgccctgagaaatgtataggaggagtggttc

SEQ ID NO: 18764 - DNA, 563 bp, Homo Sapiens
cacacccatcttcatgtgcccgcacggcccggacgacgactgcacctgccgcaagccgcgtcccggcatgttcgagcagatcggccaccgctatgacgtcgagctggccggcgtgccggccgtgggcgactcgctgcgcgacctgcaggcctccgccgccgccggctgctcgccctggctggtgctgaccggcaacggcaagaagacgctggccaagggcggcctgcccgacaacacccgggtctgcgacgacctgtcggccgtggccgacgcgctgctgcaggacaactgatggcccggctgcgctcgttcctgtatttcctgttcctgaccgtcacggtcatcccgtacgcgttcgcctgcgtgctgtgggcgccgctgccgctgcacctgcgctacaagctcacggtgggctggccgcgcctggccatctggggcgccaaggtgttctgcggcatccgctggcaggtcaagggctgggaaaacctgcccgacggcccggcggtgctgctgtccaagcaccagtcggcctgggagaccctgttcttcccggcctacatgcc

SEQ ID NO: 18765 - DNA, 309 bp, Homo Sapiens
  misc_feature (77)..(97): n is a, c, g, or t
taagggggcgcgactgcgaaatccctgaatatggccaccttgttctcattctgggcccctctttatagaggcccctnnnnnnnnnnnnnnnnnnnnntgccaaaataacgcccctaggaagacgcgccctctttccgccctcggaataatggcaacagccatgtggcgagtgcccttccactggacggcagcctgaggcgcggagggtggcgccttaccactcgctgtaatcatcggcttgggcgtcgttacccccacgcgctgtcctttttctgcctttcatcccaggacgatgcgctggttttctcc

SEQ ID NO: 18766 - DNA, 877 bp, Homo Sapiens
cgcaactgcgggtgcacggcattccgggcctgcgcatccccgacgcgtcagtgatgccacgcattacttcaggcaacacctgctcacccacgctgatgatcgcggaaaaagccgcgcagcttatcctttcgccgaacacaaggagcctcgccccggagaaagaactggtcaccgcaatctgaacagcggcgccgattcggcgccgacagtggaacaacaataaataatcactgtgagggctacccaatgtcagaacacgctcaacccctggacccggcgctcggcgcacgctcgagcaacgacacgcagaaagtcatcttcgcctcctccctcgggacggtgttcgagtggtatgacttcttcctctacggcgccctcgcggcggtcatcagcaagcagttctttgccggggtcaacgacacgacggcgtttatcttcgccctgatggccttcgcggccggctttgtggttcgcccgttcggcgccctggtgtttggtcggctgggggacatgatcggccgcaagtacaccttcctcgccaccatcatcctgatgggcctggcgaccttctgcgtgggcctgctgcccacctattcaagcatcggcatcgccgcaccgatcatcctcgtggcactgcgcatgctccagggcctggcgctgggcggcgagtacggcggtgcggcgacgtacgtggccgagcatgcgccggcgggcaaacggcggttgcacgccagctggattcgatccaccgcgaccctcggcctgttgctgtcgctgctggtggtgctggcgtgccgttacttcaccggtgacccatttcgaagtgtggggctggcgcctgcccgttcctgctgtcgatcttgctgctgggcatctc

SEQ ID NO: 18767 - DNA, 718 bp, Homo Sapiens
ccacgcgtccggaaaatgatatttgtcccaaatggcctcttcgtatgtgaattgattgcatttcttactcctatatctctcagatttgcattctctggacttaaagctttagttacacaattgaagcaattaaacgattgatttatatttatttttattactgtttatggggatagcggttcgctgattctggaactgactgttgtacttcgtataacgtttggttttaccaaaggctatgtttagctttctgcgaatgctgtggccactgttggtctgtgtgaggttgtctgcagtgagtctttgcgttacaaactcctagtctatgcttgctgtgcttgctttctgctatagtgtgctgcggttcaaatgttgctgtggggccaaaggcttgatggttgtggtgtctgggaaacaatccaggagtggggcttgcccatggtttttgaacttggcctgatgatcttctcttctcctgtggtcctggaatcaatgctcattgctgtgcgcccagagttgctgtttattgtgtgcagttattgagtgtgaagatcatgctgccctgggacccccctggttgtattggactgtgaaatctcctgcctgactttaccagcattgtggcatgcggacttgatttactgcccagacacacccattctcattttggataggagggagacccagagccgcctgccatgcccccagccagttccca

SEQ ID NO: 18768 - DNA, 834 bp, Homo Sapiens
ctgcccgccgccaaacgcctgggcctgactatcgtgcgggtgccggcctattcgccccatgcggtggccgaacatgcggtcgcactgatcctggccctcaatcgccgcctgcaccgcgcctacaaccgtacccgcgacggtgacttcagcctgcatggcctgaccgggttcgacctggtaggcaagaccgtcggcgtggtcggcaccggacagatcggcgccacgttcgccaagatcatggccgggtttggctgccagttgctggcctacgatccttaccccaacccgcaggtcgaggcccttggtgcccggtatatgagcctgccgcagttgctgggcgaatcgcagatcatcagcctgcattgcccgctgacggcggacagcaaacacctgatcaacgcccaaagcctcgctcatatgcagcccggcgcgatgctgatcaataccgggcgcggcggcctggtggacaccccggcgctgatcgatgcactcaaggacggccagctcggctatctggggctggatgtgtatgaagaagaggcccagctgtttttcgaagaccgctcggatttgcccctgcaaagacgacgtattggcgcgcctgctgaccttccccaacgtgatcatcaccgcccaccaggccttcctgacccgcgaggccctgggggcgattgctggcacgaccctggccaacatcgcggcatgggctggcgggcaggcgcaaaacctcgtcgatgatgatcagcggtcacatagccgcgccatgatgggtggcgcccgtgatagatgccgcgcctatttggaggatcatggccgaacacgatttccgcttca

SEQ ID NO: 18769 - DNA, 666 bp, Homo Sapiens
ccgaacggtgtcttgtatatggtggcctggggcacgcaacccccaaagcggcgatttctcttccggatggaccgcttgtcccacgtacaagtacttgatgaagctgctgatgtggatccctctttcgacctggaggactacgtacggcgcgaggatgccctcaattttcacagcagcgaggacattgaaatcgtactcaaagtcgatgagcccctgatggaagacggccgccctcgtcgccatccgctgcgcgaattctggctggcgcaggatcagcggatgcaggaatgcgagggcgggtttgaattgcgggcaacagtgaagccctcgaccatgttatggcttctgctgcatggttacggctgctccatcgagatcctgcaacccgactccatccggacgagctttgccgacaatgcgcgacgactggccgaacgctatacctgacctttgaagatgcagtcaggtgcggggccacgcgtacgcgagaagcaaaggcaggagaatttcggccttgccgcgcaaattatgcgaggccaccggtccattgaggtcgaatttggattgatctgcaccaatttcgctcccgccgccagcgcccgcataacaaagctcagccgcagcccggggattggcaagacgtgccgaccgtcagcacaaggttgg

SEQ ID NO: 18770 - DNA, 611 bp, Homo Sapiens
  misc_feature (278)..(286): n is a, c, g, or t
catttaagagaggggcgcccctttaaaatattggggcttaacttgttttccgtcgcccttgttttccttgtgggggggcgcgaaaatttctggcgtgaggccgttttttatctttgcggctggtggaaatttcgggaggtggccaaatattaacatgtctcgcacctctcacttttcccagggggtgggaaactagataggcgacgcgaagttgtcctgtaccagggtgatgaagccgtggaaggtgaggtgtaaccctctgtggccggctaatcttnnnnnnnnnatcctcaatcccttccgctgtactcctcaattgtcgcgccgtttagccggttcagctgtattttataatctgttgaccgccgatgagggcgcgatcagcgcatgagcgtcaataaggtcataataagtgatcgagtgatggtctaacgacccgcatccccagtataacgtagtatgccgtgtcacataggagcaccttctcagtagggaaattgctctaacgtgagggagcatcgtcctatattagggatacttggcaattggacgatttggctactttggcggtagtgtaatagtaatagagtagtctgggcaatcgccacttt

SEQ ID NO: 18771 - DNA, 615 bp, Homo Sapiens
actgctctccggcgacgggcggcgcggctttctgcgcggccggcgcattcttggcgcccttgccattcggctcggccgcgtgcgcggcggagaaagcggcgcaaacggccagcaacagcgcgttgccggagaagcgacgcaaagagtgcaacctacgcatcattcatacctttcaaatgtggtcccggcaggcacaggcggggtgatgcgcgagtaaccggggatacttctgttcagcaggttcatcggatcggttcccagagaacccagtccggtcagctccagctggaagaacagcgccgtgttggcgtcagtggcggacacagcgtagcgctggaacaccatccggccgacccagcagcaatcgcccttgtattcgaggccggcgatggcctgcgtgatacgcggggaatcggtggtgccgctgaccgtgctggacgggccattgcgcagcgagtaatcgacgcggcccacgccataccagcgcttggtgaacggccattgcacggccaggctgatctggttctggccttgcggctggtaggccacgccggtctgcgggtcgcgctggtaacgataggccagcgccaccgtggtcaggcgctgcggcgacca

SEQ ID NO: 18772 - DNA, 721 bp, Homo Sapiens
ccacgcgtccgtgcttatctactcttcaacattttttaagtgtaaaactcttattttagacatgtcagggatgctatttcagaatctaatcatttaaagcaaggagataattccatataacgaaagaagtaatgtcttagtgcagctcagctcctagcattctaagccaacagaggtgaaaaggggacatatttacacagcttaaccataaaaataatactgatttgggggcacaagaggatgtagagaaaaatataaagggaagaccagtattttagtatgctgcaagcatatacttcaactttttattgacaaatatttcaattaatctttttgtcttatatactgtagcccacatatcatcaaagtaacttcattttaattcatttcatagaaccataggattttagacaggactttggagatgattttgttgtacttcattttaagatgaggatatctgaggttcagataaattaacctcttgtgttacagagcatggaccagacccaggatgtcaggggtttccaagtcagcattttttctggtatcctctgctgcatctggctatcttgtgatgttctaattttagagtgacaaaaatgagaaccagttatatgcaaggatcatagcttgttagcagatcagggattataattcagatgttctgatttgtaaaacaatttttaattaaataaaaaggtaaattatattttaattt

SEQ ID NO: 18773 - DNA, 595 bp, Homo Sapiens
ttaaataatgcggccgtatggctgtccacgcgcttgaccatgcacattcaggcaaggcgtggcgatggtcaccgccggttcgctgatctgctgggcggcgacgcgcggcaggccggcccggggcgggtagcccctgggtggccttctggcgcatcggatgacggggatccgggaggacccgtcagctcaatccagggcgatggtctgcgccacggcgtagccgaacggaatgagcaacagggaagcgaacagggaactgacgatggccgccgatatcttcagccagggctcgggccccgcgctttgtatcgtttgaaccaccaacgcgacgatacccacaaccatcaaacagctgattaccactgctacgtaagtcatgatgtctccgtcctcgcctgattaaagggatgcggcgccgctactgcggtctgtcacttcgtcgctacatttagtctgattgtgcgcctgtatggcagggtgtggcgctagggttttcctggctctggcgggcgctgtggcgttttcgccgcgcaccttgcagcatgaaatcggtgtgcggcgcaacatttttcgaggcccgccgcgcccgcgcttt

SEQ ID NO: 18774 - DNA, 269 bp, Homo Sapiens
gggggggcccctttaaagattccaagtttacgtaccgtgggttgcgacgtctaaccttttttatggggccccctaattttatttccgggcccgtttttttaaaagtcctggatgggaaaaaccttggttttacccattttattccctttgaaacacatccccttttccccgggggggataaatcaaaaaaggccccacccaattccctttcccaaattttttccaccctaaagggaaaagggaaacccccttgtaaggccccttttacc

SEQ ID NO: 18775 - DNA, 1000 bp, Homo Sapiens
  misc_feature (63)..(171): n is a, c, g, or t
ccacgcgtccgcgcttggtgccctgcaaataaatgtgctcctttctccggatgcacaacctcnnnnnnnnnnnnnnnnnnnnnnnnnnnnnnnnnnnnnnnnnnnnnnnnnnnnnnnnnnnnnnnnnnnnnnnnnnnnnnnnnnnnnnnnnnnnnnnnnnnnnnnnnnnnngggggggccgcccaaaagaatccaagtttacgtagccgggctgggaacgtcaaaactcttctatattgccaccaaatttcagttcaagggccggcgttttacaacttcgtgacggggaaaaccctgcgcttacccaaattaagcgcattacaaaacatccccctttcgccagctggttatataagaagagagcccgcaccgatcaccgtgcccaagccttggcacaccctaattggcaaaggagacgccccctgtaccccgcacattaaccgcggcgggtgtggtggtcacgcgcaccggggacttttactcttgccccgtccttacagggtcgcgcgcttaccgcgttcagagctaaaagttggactccaaccacagaaactcgactaggagaatggtctacgactgtgacactggcagcaaaacggtttacggcattgatcgtggagtcggaatctaataaggaattcttggtcaacttggtaaacttaagacatactgcgattattcttatgattaaaagtaatttgcatatacgacatatagttaaaatgactgaatagacaaataataagctcgagtgtacatattatggacagcatacaataagctggactgctctggtaatagtgcggtaaccctaattcgttattttacaataaactaaatatgtcatcccaatgacaaaaagcctagtaaagcttccaaaatgggagagacaaagatagaatatgcacattcttgtgactgatttcttttactgaggattgtgcttcgtgttgtgctaccaaaaacttggggaaggaaagatacctaaaatcgtatcggg

SEQ ID NO: 18776 - DNA, 936 bp, Homo Sapiens
  misc_feature (155)..(169): n is a, c, g, or t
atcgcccctgccagcggcttccactgctccctctgtgcaggcccccgtcgtagtcaccagcaaatcatcccggtatatcggtcacgacagacccctggatttcatgtatttctcttccctttccaagctcgccgcggatcagaaccccctcgacnnnnnnnnnnnnnnntacaccaacaccgacatattgcgtcatgaccagaatgtgaagatttaccaggaaatcacctacgtcagcaaaggcgggaagcctgtaggcgctgccggtaacgaattcatcatcgagaccgccaatcacgacgacaaggtggtcatcaaaaaaagtccggacaacaatctgatcgccatcatcaacaacacgccctatcaactgaacttgcttcgttcccctgatggcagtgaaacccaaccactgcggatcagaaccaatggcggcaacgattgcgtgctgatcgatccacaggttgataacgatattcgcattgagttgggcgctggtgacgattacgcccaggcgggctccggcaatacccggctatacggcggtgcaggtaacgacaggctcaaactcgggagcggcaatggcatcgcgatgggcgatgatggcgatgacctgctgatcgcaggctcaggcaacagcatcctcaaaggcaataacggcaacgatcgcatgcaggcaggccaaggcctccctgagcgccgcctgctaatggacggcggtgatggccacgacttcatgattgtcacccgcaatgacacagacattcccggcggtcatgcacggaggcaaaggtgaaaacctgattgtcactcacggccccgcaacggtttataccggccgcgacaagaacatttgtcaagtccgacaacgatgacaccgtttatttacgccaagccttcggaccagaattcatcgcaccccaggttccacacttg

SEQ ID NO: 18777 - DNA, 261 bp, Homo Sapiens
cattcaatgcacccatgccacggcgcagccattcaccggcgcccagggaacgcttcatgaagccaaagactttaccgccgaccagcaacgcccaggctagggaggtggcagcgcctgccccgtaggccatcaagagcaaggtagtgccgatactggcgccttgcagcgcggcgcccgtcagcaccaaccccatgataggcccggcgcacggagcccacagcatcccggtggccactccgatcaggaatgaagcgcccggac

SEQ ID NO: 18778 - DNA, 254 bp, Homo Sapiens
ccacacgtccgcccacactgtagagtcacgaagctcagagattattcccagcagcagccagcacctggcctggctgaggccattgcaccgttatcctggaaactgaggcagacactccagcccctttctgggatcctggccacgtcattgtgctcctgccctgcaggctggctcccgggggtctctgatggccaaccaaggggccacccagggacctctaactccacacatcctccacccgggggggtggtggg

SEQ ID NO: 18779 - DNA, 794 bp, Homo Sapiens
  misc_feature (96)..(199): n is a, c, g, or t
  misc_feature (291)..(300): n is a, c, g, or t
ccacgcgtccgcggacgcgtgggtggaacttgtcaaatgagtctatttgcttctcccacaagttctgaagagcaaaagcacagaaatggactatcnnnnnnnnnnnnnnnnnnnnnnnnnnnnnnnnnnnnnnnnnnnnnnnnnnnnnnnnnnnnnnnnnnnnnnnnnnnnnnnnnnnnnnnnnnnnnnnnnnnnnnnngggggggcccctcaaaagaatccaaaatttttaacgcgggggggcaaataaaaacccctcctttagtggcacaaaatttaaattcccgggcnnnnnnnnnnaaccgccggtccgggaaaaccccgggggttcaccaatttaaaggcctgtattcatccccccctttccccattggggtatatggagagagagcgccccccatctcgcttctccaaaatttgccccccctgatgtggggagtgaggacccgccctgtcccgggccatttaaccccgcgcgaggtgggtgggtacacccgcatgctgacctttatatttgggagcgtcctaacagcttgccctgtccagttctttactcttccttttcccgccaaggtcccgagctttccgccttaagctccatatcggggactccctttagtgttctgatttgtgcgcttacggcccctccacccgctctcttcctgataaacgcgttttccaccttgtgaccaacgggaaatacacctcactccatctctgtcttttctttggatttatatgggaatttctccaactcgcgccttttgggatataaaagagcgtaatattaaaaa

SEQ ID NO: 18780 - DNA, 661 bp, Homo Sapiens
catctcgggcccgccgcgctgccggggcagcgcgtggaattcgaatacgtggacgctggcgcgctggggcaacgggagctgtccttccagatcgaagaccagcccgccatgacgttgtgaccgcgcgcttgcccggcaggcgcgatgaatcttgatgacgacagggagtgaggcgtgtccgaaccaatcgatgtgtccggcgaacccacgggctcggtgagccgcgatggccgtttccggctgggcctgaccgggccggacagccacgtgctggtcagggaggccggtcgcggggacgtgatcctcgggcctgccggcatggaccggaaggcggatctgcgcgtggcgcctgatgacgcgattcattggccggcgttcgatccgttcgccacgccggccggctctgcctggccgcgccacctctactatcacggcaatgacagcggctttctgggatggtccgaacgacgccgcatcgaacagttcacctgggcgccggcgtttgccgatgcgcgccgcatcgacgcccgcgcggcccgatatccagacgctgcagatccggctcgatgcggtggtggggcatctggacatcaaggtgcccggcggcatgcgcctgggcctgctgggcgatctttcccggatcgccgtcacggggggcggc

SEQ ID NO: 18781 - DNA, 207 bp, Homo Sapiens
cacccacgcgtccgcaagtttaaaaatagcaggatatctttccccagaatactaagttatagtacattaaattattttaataagcaaccaaatgccaacttgagataaagtaatatatctcactttgtcctataaatattgattataaaatggattacattttcttaaaataggaatggaagcacattggttgagaaatttcagttg

SEQ ID NO: 18782 - DNA, 737 bp, Homo Sapiens
  misc_feature (439)..(504): n is a, c, g, or t
  misc_feature (532)..(540): n is a, c, g, or t
  misc_feature (547)..(556): n is a, c, g, or t
tggacatcgttgtaaaaaatcgtgacgggccctaccatggtaaatacctgatgtaatcgcgttgcatcacatctccccttctacggctgtcgtaatattgaataggcgcgccccgtttcccattcctgcagtggcgaaacctggttggctaccgaatatttaacctgtagagagacgccccatagagtcgccttcgccccgagcgcgcgctccttatgggctactggcttctcttctcgtcgcgttcttttgcgtgcggcgtcgtgtggtgtaccgcgcgctcccttccgatttcttattggctgctataccgcgctctgttgctttttttctcgtttttggtgatggagggggggtggttcccggggggataaacgggggcgccctttgggggtccgaatttggtttttacaccgctttctcccaaaaactgtgttannnnnnnnnnnnnnnnnnnnnnnnnnnnnnnnnnnnnnnnnnnnnnnnnnnnnnnnnnnnnnnnnnggtggagatctttttttaagggaaaatnnnnnnnnntacgggnnnnnnnnnnattaaagggtgggccgccccgcacccttttaaaaaaagggctttaaaaccaatattggccgatttggagaaatttcctggaaattgttgggggagtttgggagatgggccccaccaccccttgtttttttcccaaaaccccaaaaggtcccccccggaaaaattcccctaagaggtccccc

SEQ ID NO: 18783 - DNA, 681 bp, Homo Sapiens
cacggaaatccgaggacttctcgttctaccaggagaaggtgccccgcatgttcttctatctcggcgtcacgcccaaggacgtcgatcccgagacggccgcgcccaaccattcgccgcgtttctacgtggacgaatcggggctcatcaacggcgtgcgggcgctgtcgaacctgacggtggactacatggccaaggccaaacaaggcagctagcggccggcataagcaaaccgccataaagtctttgtggcggacggcatggtttcctacagtacggccctttgccgccaaagcgccgacctgccatgccgatctcccgccgccgattcctgcttgccagcacgctggccctgccgcttgcgcgtccgcgccgggcgcgcgccgccgcctggcctgaacggcccatccgcctggtggtgacgtttccgccgggcggcgccagcgacatcgccgcgcgcgtcatcgcgccggcgctgggcgacctgctggggcaatcgatcgtcatcgacaaccgtcccggcgccggttccaccatcggcgcgacgcaggtggcgcaggcgccggccgacggctacacgctgctgatgtcgaactcggccccgctgtcgatctcgcccgcgctgatgccgcagcatcactacgacccgctggccagcttccgccacgtggcctacctgggcgc

SEQ ID NO: 18784 - DNA, 685 bp, Homo Sapiens
  misc_feature (308)..(363): n is a, c, g, or t
ccgttgcggcgcaggccgtcggcgcgggtgaatagcgagatcggcggcaaggtccagtcgaaagaatacggcacgatcgccgcgccggcgatgcgcaccagctcgtcggcgatgtcggccggcaggatggacacggcgcggtcgctggcgacgatcatttcgccgatcagcttggacgaatcgctctgcaccgagggcgtgggcggcgccaggccggcgcgcaggaagatgtcggccacctgttcgcggatcgggctgtccggcgtgcccaggatccagtccagatcggccagcatgttccattccannnnnnnnnnnnnnnnnnnnnnnnnnnnnnnnnnnnnnnnnnnnnnnnnnnnnnnntggtggtacagcacctcgaagtcgatctggcccaggtccaccgacggcgtggcccagcccaccactacgtccagcgtgtggtcgcgcagctggcgcagcagcgcggggccctggccctcgtggatggtggcggtgatgccgcgcccctgcggcatggtgcgggcgatggcggccgacagcatctgccccgagacgaacggaatcaccccgatgtgcaggtgggcggcctggccggcggccacggcctccatttcctgcaccagatggcccaggtcgtgcaccagcgcccgggcccgcgccagcaccaccgcgcccagggggg

SEQ ID NO: 18785 - DNA, 934 bp, Homo Sapiens
ctgctggaattcaccgaacgcatccatctcacgcccagcctgaccaccaactcgctgcgcgtgctcaagcaatacgcgatcagcggcgccggcgtgacgctgatgccgaacctgggcgtgcaccacgaactggccagcggcgaactggtggcgctgccgatcgcgcatccgatcctgagcgcgcccgagtgccagatgctgctgcggctggggcggccgttgtcgtcggcggccaacgaagtggcgcggcgcatcgaacagcgcctgccggcgttcgcggcgccctgatggcggcatgtgtccgcaaggggcggcgcgcaatgccggccgggcccggctaagggcggatttcgttacgaatggcgccggatgattctttgaagttccagcattcatgcgctttttcaggcatttttctgctgtaggtcaatgaacaagccattcttcccatggaatcgccatgtaatgggtgtttcagggcaatgtcagctacaatggcagcactttcggaggtttctatgtcggtaatatccgatatcaaaatacgccccctggagcgcggcgacctgcacttcgtgcacaagatcaacaataacgacgtcatcatgcgttattggttcgaagagccttacgaggcctacgacgaactggtcgccctctatgaccgccacttgcacgaccagaacgagcggcgcttcatcatcgagcacgacaccggccagccggccggcctggtggaactggtggaaatcgactacatccaccgtcgcgccgaattccagatcatcatcgcgcccagctaccagggccgcggctacgcccagggccgccacccgcatcgcggtgggctacgccttccgcgtgctgaacctgcacaaggtctacctggtggtggacaaggacaaccgccgccgctgtgcacatttacgagcgc

SEQ ID NO: 18786 - DNA, 911 bp, Homo Sapiens
  misc_feature (196)..(204): n is a, c, g, or t
ccacgcgtccgataaaatgattcagataaacttggagagctcaggacacaaattgtggagcttgaaatctgagagggacttaaccaggacctccagatgcagtgagaaagcagtgagctccatggactcagcaggtaccttttgcctggttccttgatacacccagtggcatggcccaaggatttggggcgtagtnnnnnnnnntctcctttgaatcccacttctgacaccaaacttaaagaaaatctaaagcacagcaaaattttagagtttatttgagtaagaagtaattcatgagttggggaacaccagaccaacagagatttcgcattccagtgcagaacatcagaggcaagcatttatgggaagatgcaaaagtaaaacaaagaaatcagattgacttacagttacataattatccttttgggggtacttttttgggaagttcttagtcacataattatatcttagttggctgcttatgattgactagagttaagtttaatttctgttcaacataaacatttaccagaaacgtcccaagttaagtttagcttatatctgcagtgtgaccccagtcaggttccacctatatttgcaatttaagctagatgaaagctacttttaagccctagctggttttgcttgctcagaaatttttcaggcctggtctccattttaattttactttaacatttctcataacaattttatgaagtagttactattatctctatttcacagatgatgcagatgagggaactgaggtacaaagatgttaaataacttcctcagggttactcaactctgaaatatcaggccaggactcaaactaagacaaaatatctacagaatacacacttttaactattaaactattaactcctttcaaagaaatcccttgaaacccc

SEQ ID NO: 18787 - DNA, 372 bp, Homo Sapiens
cctttaacgcccgccacgtcggccaggccgatgtcgggcagccccttgcaggtcgatgtccggatgggcggcggcgaagtccggcagccgcggcgccagccagcgcgtggcgaacgacgccagcaggccgacccgcagcgtgtggcgcgcggcggccggcgcgcggatctcgtcggtgccctggcgcagcagcgcgaacgccgcatggacccgctcgtaataggcctgcccggccggcgtcagcgccacggcgcgggtgcggcgctcgaacagcgccacgcccagctccgcctccagccgctggatatggtggctgatggcgctctgggtgacgaacagctcctcgcccgccaggctgaagctcaggcgccg

SEQ ID NO: 18788 - DNA, 861 bp, Homo Sapiens
cagggggatgggggggcccctccaaaggatcccaccttactaacgcttgcatgcagccccctaatttttcttcagtggccccttttttaggccgccgggccggggaaaacacaggcgtaaaccgggaaaatccccttgttacccatccttgtttcttgccccgttccccctttagaggctggcgtaaaaggcccaaggccatcttgtttcccccttttggcaattgggaaggcccaatgggagacgcgatgcccccggtagtgtgctgttaaacgcgcgcggggtgtggtgataattgacagcgagccctgccccacgttcctatcgggcttgggcctcaattctggagtcccatttatcgctttaaggtaccgatttacggcttaacggccactacgacgctggatacttgaatggggtaatgcttgcgaaatcgctcttacacctgtaatatcgcatttcgacctctgatatgggattcctgttccgtactgtaggactcttgtgcaaatcgcagacactctatcgattatgggaattctgttgattatgccggatgttacaaattgggctattggataaattgaactcgatattaaagatttatcgcgcatatacttaagctgtcactctacaggtatcgtgcgcgtaaccgatatagaaacgcgatccactattgtatatgtcttcacacatgaaacaaccccgcctatagcacatactctgtaaatgtatattaattgaaaaaagtactgtgagtctcactcgtttctgtcgcctttgccctcttttggctttgccgtatcgctgctgaaaccaaagaggcatgaataattaggaatcagaagatttctggtggcg

SEQ ID NO: 18789 - DNA, 449 bp, Homo Sapiens
gtaacgtcttatgaggcgcggcgtgtgtggtggtattgcgcgagcgtgaccgctaccccttgccagcgccctaggccccgctcttttcgcttccttccctccctttcccgcaccgtgcgtcggctttcccgtcagacttctagtgggggtctccgttaaggattccaatgtagtgcttcacggcacctcgcaccaaagaccttgataaactgtttttccctctttgaagtggagtcacgtccttatagttggactctgtgttcgaaactgaacaacactccaccctatctcggtctatccttttgattgaaatggaacttgtccattcagctctattgataaagatcagattctgactaacaaatataacgcagatttaacaaaatttaacgttcaattgaatgtgtcactttcaggaagctgtgagcgcacccttatttgtatttttc

SEQ ID NO: 18790 - DNA, 955 bp, Homo Sapiens
  misc_feature (141)..(223): n is a, c, g, or t
  misc_feature (240)..(900): n is a, c, g, or t
ccacgcgtccgcaaacttactgtcagagaatatgacctaaatccattttctaaactgttttcatgtgttgcaaattattctagtcaactgctgttttatgtcatactctgtgtaatctctgattaaatttaatatactgcnnnnnnnnnnnnnnnnnnnnnnnnnnnnnnnnnnnnnnnnnnnnnnnnnnnnnnnnnnnnnnnnnnnnnnnnnnnnnnnnnnngggggggcccccctaannnnnnnnnnnnnnnnnnnnnnnnnnnnnnnnnnnnnnnnnnnnnnnnnnnnnnnnnnnnnnnnnnnnnnnnnnnnnnnnnnnnnnnnnnnnnnnnnnnnnnnnnnnnnnnnnnnnnnnnnnnnnnnnnnnnnnnnnnnnnnnnnnnnnnnnnnnnnnnnnnnnnnnnnnnnnnnnnnnnnnnnnnnnnnnnnnnnnnnnnnnnnnnnnnnnnnnnnnnnnnnnnnnnnnnnnnnnnnnnnnnnnnnnnnnnnnnnnnnnnnnnnnnnnnnnnnnnnnnnnnnnnnnnnnnnnnnnnnnnnnnnnnnnnnnnnnnnnnnnnnnnnnnnnnnnnnnnnnnnnnnnnnnnnnnnnnnnnnnnnnnnnnnnnnnnnnnnnnnnnnnnnnnnnnnnnnnnnnnnnnnnnnnnnnnnnnnnnnnnnnnnnnnnnnnnnnnnnnnnnnnnnnnnnnnnnnnnnnnnnnnnnnnnnnnnnnnnnnnnnnnnnnnnnnnnnnnnnnnnnnnnnnnnnnnnnnnnnnnnnnnnnnnnnnnnnnnnnnnnnnnnnnnnnnnnnnnnnnnnnnnnnnnnnnnnnnnnnnnnnnnnnnnnnnnnnnnnnnnnnnnnnnnnnnnnnnnnnnnnnnnnnnnnnnnnnnnnnnnnnnnnnnnnnnnnnnnnnnnnnaagcctcacaattaggtggcacttttccggaatgtggcgggaaccccaatttgtt

SEQ ID NO: 18791 - DNA, 942 bp, Homo Sapiens
aaaatcatgcccaccgtcaatgcgccccaactcgcggacatccgccgacgacatctggcgcaacatcaacaccacgctgatcccgaccgccaccagcaggccatccagcacgccgagcaccaacaccgccgccaccgcgcaaatcactagcaaccggtcgcgccgccaggagaaatagcggcccaagggctgcaggctcaagccacgacccaaggcatagatgacgatggcggcaagcaccggctccggcgtcaatgccaccaggggcagcactgtcagtacgatcgccaacaccaccaatgccgccacggcgcccgccagccgggagttggctcccgccgcctcattggccgacgtcgcggaataaccggcgccagtgggcatgccctggaacagcccggacaacaggttggccgcccccagcgccagcaagtcacggttggatgacacgcgatcaccgtgcttgagggcgaacgcgctgatggagccgtaggactcggcgtaaagaatcatcaccatggcaaacgccaattcccccaggcgcagccagtcggcgaacggcaacaccggaaggtgcgcgaactccaggcgcaggtcgatcacaccgatcaacgccacgccatgggcctgtaaatccagccactggccggcggcaatcccgaggatcaccaccagtagtccgccgggcagacgcttgattcgcgcgcatagccagagcaggagcaacgcgacacccgctacggcagcggcggcccagttccagcgcggcagttgctccaggagttggggcagaaagcgaatcacgttgttatcggtcaggtgcacccccaccacgctggccaactgcttgaggatgatggtcagcgccaggcccaaggcaaagccacgcaacacgggcttggcgataacgaggtcaacccgcccagcttgagcacccggcca

SEQ ID NO: 18792 - DNA, 762 bp, Homo Sapiens
gcagttaagagggagagctcgccttcgagcatcaccaggtggtgtctctcaagaagcagaggcgcgcggcgactgttcgtattcgatatgggcgccggccggcaattcgcaggccagcacttcgccggccagcttctgcgacggcggcgacaccgagcggcggcgaaagcccgtggcgccatcgacccacacggcctgcgccgcgcccggcaccagcggcgcgaagtcgtcttcgaccatgcgcatcaggcgcgacatggtcatgccataggcgccgcagagcttgccgagcacgctggcggtggggctgacctcggcgttttccaggcgcgacagcgtggcgcggctgatgccggcgcgcgatgctagttcgtccagcggccagccgcgctcggtgcgcaaggccttcaggcggccggccaggcgttggtccaggtcgatatcgggagcggatgcattttccatataagagaatttatctcaaatatggaaaatcatcaatcaccccgggcgttcccgccccccgacgctgccgccggcaattcggcacaatacggcgtatgcacacagcccgattcgtttccatgaccgtcctctgcctgggcatcctgacgggctgcagcctgccgcccctggaatcgcgtaatgcctcgcaggcgctggcgcccgacgtcgcccgcgacacggcgctgggccgcgccatcgcgccgctggcggcgcggcacccgggcaaatccggcatccatccgctggccgacgccc

SEQ ID NO: 18793 - DNA, 812 bp, Homo Sapiens
cacccaaacgtccgccacgtcgctatgagtgtgtttcagtctccctggattaaacgtttgcttctcttcgtctaccttgattaaacgtgcacttcgcagtcctcggttctccatacccgtgacctggggatcgctacggaccttaaaatacccgcaacagccccttcgtcccaagtaagtaggagaattgcttccctttcggtttaaaatctctctgaggccgttccttgctctctgcctttcttccttaggaccatgtagacaaccccattcaggtagtgttcccgcttaaaaccctctgcttgggccccgcgccaagtcgagtcctcattcgggatgtggactagcgcccttcgcgatccccgagctcctccgtcgtctgcccctggaggggagcgcccactgtccggctcctgaaggagccgcttctcctcccacgtcctgggattctgcagaccctccctgtcgtgagacatcgttctccgcgccacctcgtgtcgtcctcacgccgggtccttccgctccccaggcttccccttcacagccactgcttttcttgactccccgttgggacaggttacctgagtctgtcttgtgacacccacggttcttccttcccaaattttactccactggaaaatgtgctcttccgggaggtgggcatccttattcctcccctttcctcccgaatgtgtgggtgagagggatcacgagaggaaaagacgggggaaacgacggagcaaatgaaaatctgaggagaaaagaatgagggagacccataaatactcggcaaatggatgatactttaggga

SEQ ID NO: 18794 - DNA, 923 bp, Homo Sapiens
ccacgcgtccggagaaggagaatgaattggagagaaaaccttcattagactcagagagggaagcagtggcagtataccaaggtcacttctaatttagaccatctaattggcaaacaggctccaaatggctatcatctcacagggcttggaattaatgaaggctgattattttcattaccttcctcttaagatacaggcaaagtgagagagctggtacccaggtgggtgcaaccgcccccaggccagtggctgccctagagccccagataaccagcctgtcctagagattcacagacacacatgaagcatagagagtcacagacgctgacggaaaaaaatcacaaggttacaaactattggtctcaaaagagataccgagaaaagtgcaggcaacacagggccaggagcatggaagggaaactgtgcaggtacaaaaaatacagaataattaagaactaccaaagggagccaagacaaagggctacagaaggtgttcctaagctgcccaggagccaatcccatctccattatgaggtcatattttgttaaatgatgaaagaacaaagagaatttccccatatcagtgcttcaggatcccagtggtgtgtcctgtcacttagaaagatagtgatcaattagaataatttaagagtattgaaatgcatggtaggtggtctttcctattctcattcaggggacagaaacatgggccccatgccttccacccttctttcctgaaagaatgggaaaataaggggcaccgagcagcagctcctacatctctttcaccaatttgaaatctcaagcttctttgtaaataggtgagagttcttatgtgtaactgacattgggggagggctgcccagccagttgtggaggggcccttgtctcatctcccttaagctttatagatttccttcttt

SEQ ID NO: 18795 - DNA, 764 bp, Homo Sapiens
ccacatcctgctgctcgcggctgaacacgaagatcaggttcaggcgctgcaggtagcggttcttcaggtcttccagctgttcgcgaaacagtgcaccggagctggagcggttgccgtacagcagcgtcacgcggctgtggggctcggtttgcagggtggtcttgatgatcgacaggatcggtgtgattccgctgccggccgccactgccaggtaatggccgtggcgagccggatcaaggtctacatggaaatgcccggcgggtggcatcacttccaggctgtgcccggccttgagctgctcattggcaaacgcggagaaccgcccaccggccacgcgcttgatggcgatgcgcagttcaccgtcattgaccccggtgcagatcgaataggagcgacgcacttcctcgccgtccagctgggtgcgcatcaccaggtgctggccctgggtgaagtggaaactgtcttgcagatgctgcggaatctcgaaggcgatggacaccgcatcacgggtctcgttgcgcacatccttgatggtcaggctatggaatttgctcattgttgttctccaaccaagcgggccgccggcccctcagatgcacttgaaatagtcgaacggttcgaggcagtcgcggcagcggtgcagcgccttgcaggcggtggagccgaattcgctgagcacttcggtgtgagagctgccgcattgcgggcatgcaatcaccggggctttctcccagcaggctgcgtttgctgctactgccttgcgg

SEQ ID NO: 18796 - DNA, 433 bp, Homo Sapiens
caacagcaacagcaaaaattatacaaagtttagttagaagctttctcagcaagcaaaaccttttctctgataataaaattcgaaagatggagggagaaggcaaaatagcagactttgtaaacttatgacatcacatttgtcttgaattactgagatatgtgttcttcattgcaccttgcacataccaccatttatatatgactttcaaagtaaaatagaataattaacatcaattgaggccaggtgtgatgcctcccatcaccaaggaatacaaaatgaatggagtctaagatacaggtgatttggtataaggaagataggactggggaggaggcattactgactaaagagggaaaatgacagaaggaaggaagaacctctgcattgtacaaatatcctggcttttcaaactcagagttgagatacagttgaa

SEQ ID NO: 18797 - DNA, 322 bp, Homo Sapiens
  misc_feature (85)..(172): n is a, c, g, or t
  misc_feature (222)..(240): n is a, c, g, or t
aaggccttacctttttttaagggcccccaaatttcatttccttggccgctttttttaacgggcaaaggggggaaaacccgggcgnnnnnnnnnnnnnnnnnnnnnnnnnnnnnnnnnnnnnnnnnnnnnnnnnnnnnnnnnnnnnnnnnnnnnnnnnnnnnnnnnnnnnnnntttgcccggcttttgtggaaaaggggaacccccctgtagggcggaattannnnnnnnnnnnnnnnnnnttacccccaccgggacccctacctttgccaggcccctaccccccgttctttttgttttctttctttcctttccggccggttt

SEQ ID NO: 18798 - DNA, 809 bp, Homo Sapiens
ccggtttcggcgtcggctggaccagcgtcggcatggcgacgctgctggcgatcgcgctgttctaccaactgcgcaccaaggcctacacgccctggatctactggctgacggtggtgctggtgagcatcgtcggtacgcagattaccgacatcctcaccgacaaactcgacgtcagcctctacaccagcacggcgattttctcggtgttactggcagtcaacttcctggtctggtaccggtcggagcacaccctctcgatccgtgaaatcgtcaccccgcgacgggagttgttctattgggccacggtgctctgcacctttgccctcggcaccgccgccggcgacctggctaccgaggcactgggcctgggtttcacccttggtgccgtgatcttcgccgccctgatcgccgccacgctgctggcctggcgcatgggggccaacgtggtgccggctttctggatcgcctacatcctcacccgtccgttcggcgcgtcactgggtgacttgctgacccaggccaagacctatggcggcctgggcatgggcgccacctggaccagcgcgatcttcctctgcgtcatcgtcctgctggtgaccgccgcccaaatcagcgtcggccaccgtaaatccatcactcaataactccatcaggaacgtcctcatgcgtattacacacaaccttattcgccgcgttgccatcgtctcgtcgatcgcttttgctggggcatcgccgcccggctgttcgaaacctgccgacaagccggctgcaaccaccgggaatgccgtgtccaccccaagtcagtcggg

SEQ ID NO: 18799 - DNA, 264 bp, Homo Sapiens
agcgaagtcttgctccagcgcttccatcaattgattggcttcggtgccgtcgcaacccaagtccaggttgatagccgtttcaaggcgcagcgtcttatgttcgggcaggccaatttcctcatgcagcagttgcaagagctgttgcatggcaaggtcttcaggaaagttgggggccaggttcatggtggttacacgagagttggtggaggcgactgactttatcgatcgaaccgtgatccttcaaacgaaacaggtcaaatgtgg

SEQ ID NO: 18800 - DNA, 638 bp, Homo Sapiens
ttaggggggggcgccttgaatgatttaaagtatggcgtttttaaaatgaaagtgaaagctttttattgggggttcccaaattttatttctgtgggggaatttttcatttgtggggctgggataaaagtgaggatgccccaaattaatctcctttcccaacatttcctttttctaaatcgacgagtgtggggggtagggagaggcggaggggcaccccttgccaatcgctctattaccccgccgcgtgggtgtgcgtttataccatttgggccacgtttctctggttgggcctctaaaaacaccgattttggtgtttctactctaatagatgaggctcgctgtatgcgtcaaggtaattgctttcgagcacgcatctcccacatctgttagggagagattgtcgtaaggcgactcccgcataaaagaattacacgcatcgagcgagtccactctttatatagacgatggtcgattgagacaactgccactataggggattacttttattaaaggatgtttctatatacgctagatcgaataaatgcgatttcgagatttacggctaatcatatagtatttgttcatatatgagacgtttcggggatgagcggaaacatagaatgttttataagaagtaa

SEQ ID NO: 18801 - DNA, 349 bp, Homo Sapiens
ccacccacgcgtccggcgttcagtattttcaacacatacgctttttactggtttatactgaactatctgatgagaattcttgtgttcccaaagcaactgatgtttacaggtcttgtgtttctcctcctcctttctaaggatgagggaatccacaacagactttctctagaaaacactaatgatggacaactttttggtgtcatcaatgagttggctactaccttgatgtaaaaatttgtaaggaaaattttcaccatttcgagtgtcaagtgtatttttaactgtctggtttgtacttttatgacttttgtactaccaaagcggagttaaaaataaaaatgttaaacgc

SEQ ID NO: 18802 - DNA, 861 bp, Homo Sapiens
ccacgcgtccgtttactgtgaattatccccagcccatgcgaggcacagatctatagcctggagagttattaagtgcttaccacgaaatgctataaaaaactcatcattttccccaagggcctcccccaccagggactggggagggaaggggactggggagagaagaggcggcagtctcagttgtgggagggggacagggaagggtggcggagcccccttggcttgctctgctcggagaaggcacctggggaggggtcctggagttcctggccttctgtgtttgcttgtgatcttgggtaaggttctaggactcagtttctccatctgtagaacaagtgggcatagggagcaatggtttgggaagttgtgagccacaagccacaactgataacatcaagtttagtaccgtaatgaaatgaagcggacaaccaagtgaatcttactcacatttcctggaactactgacttaactgcacaatgaagagagactgtatcgtttactttttttgtctgattagggatcctgtgtattagtcaggatcttggcaggaaacagatggcacactcacattaggataattccatgggggttttcagtacagtgacaatttattaaggtgtgggcagggtatagagaaagcacacagattagtgtagtcccttggggttagtaacaagtattacctggctgtgaccctccttaggcagcgattggtgagagcagagagtgatgaccacaagccagatgtcacaggggactgtgtgatcagtctggtcagagaggagctgtgaccttctatggaaagaagccctgcagagaaacagcctgggaaatgttcacttctcttctcttcggtcccc

SEQ ID NO: 18803 - DNA, 639 bp, Homo Sapiens
ccccacgcgtccgcggacgcgtgggaactgtaggccaaccagtttgctggagagaaaacagagagaaagggcagcaaaaaagtcctccaagagtcagagcaagtcttaaacactaacctaagaaaatattcctactaaggtgcccaaatttgattggatcagtctgtgaagcaatttatgccccagggtgttgtcgaaaacaaaagagcaatcagccggtaattagcgtgatttaagagctggctgtggtcagggaaagaggcagttaaagggagccctgccaaaatcagtgttatcccagggtgattatgtgcctacccaaggctgtaccccctgagtaacaacatcagcagtttcacacaatgaagttaacaagcacacaaaaataataagacctggagtgggaagaacaagtacccagggttggtacaatatattatctaaaataacctagtttctaacaaaaaattatgaggcatgcaaataaacaggaaagtataaactatacactatacaccaataccaaaagagcaggcaacagaaactgcctatgaaaattaccagatgtcagatttagtagacaaagtcttcaaagtaaccatgataaatatatttgaaggactaaaggaaactattatt

SEQ ID NO: 18804 - DNA, 636 bp, Homo Sapiens
catttgacgccttatacaccccgacctttaccggcctgccggctgggtgtggtggagaaagccggcaagcgtgacttgcaagtggtcacccatgagccgctgtccaatggcgacggcctcaatgtgctgatcaagcgcgaagtggtgggtttccgcgcgaacatcgccgagccaaaaggcgagttcgaagaagacggtgagaagcgctaccgctaccgcgtcgagcccaatgagatgccggccggcctgcatcaactgcggccgaatcatccgttgaaccgcaacctggaccataactggcagcaggcgttactgaagacctccgccgagcgccgtatcggcgtgtcgtgggcggctcgcctgcaggaagaccgcctagaactgaccgtcaccagcgaagaaggcatcagcgccagcgttgccctgcccggcccgtttggcgtggccaacaagccggaacaggccctggaaaccttgcgcgacctgctgggccaactgggcaccacccagtaccacgccaccgcgatcgagctggatgcgccgcaggcgttcttcatcccgaattcgcagctcaaggccctgcgccgtgaagtgatcgaggcgctgaccgaggcgcgtattcaagctcatccacgg

SEQ ID NO: 18805 - DNA, 739 bp, Homo Sapiens
ccagtccggcccccaatagccgtaatagccgccccacggccgcggaccgtagaaaccgccatagccgtagccgccgttgaaatacgggtcatacggacgccgcaccatgacctgcgtctggctcgtgccataacggaacgagacatcgaagcgggccttggcgcccggctgggcttccaccagaccggtggcgccgatgccggcgcgcaccatgtcctggtatgactggtattcgagattattggcttgcgccggttcggccggcacgaattggtaagtctggccttcgacgcctgtcggccactgctggaacgaggtgacgcgcgccgacacggtgggggaggcgcatccgctcagcaccagcgcccccaatacagccaggatggcggcccagcggccggtattgaacggggaagaacggaacatttgcaactcctcattgcgcgacggcgcccatcatactgagctttgaccgcgcgggccccggaaagtttacgccggggccggcacgcacggtccctgcgtccgccgggcctgacactacaataggactctcgttcatacaggactgcaatcccatgcgcacagacacgcccgttaccgtataccgcaaggattaccagccctacccctacgacatcccgcaggtctccctggccttcgacctggcgcccgacagcaccgaggtgcgctgcgtcatgcaggtccgccgcaaggccgaccccagcgcccacgcccc

SEQ ID NO: 18806 - DNA, 856 bp, Homo Sapiens
ccattgctgcaggccggctaaaaagatggcgcattatcctgtgattgaccgcacctgtcacggagcttgctcatacgcgtgcacaaagctgcccacaagggttgtcaggctcgggcggcgaggttcaaactgcggcctttgtcgcgggcggcctacaggctgccaagcttacaagccggagtacagactcctggctcactgacctttataagggacccgaaaatggaactggttgtaaaaagcgttagccccgaaacgttgaaaaccgccaccctcgtggtcgctgtcggcgaaggccgcaagctcggcgttgccgccaagcaactggacgaactgagcggcggcgccatcagcgcagtcctcaagcgcggtgacctggccggcaaggtcggccaaagcctgctgctgcaaagcctgcctaaccttaaagccgaccgcgtattgctggtgggcgtcggtaaagacgcggaactgggcgaccgtccgttccgcaagatcatcgccggcatcctcaacaccctcaagggcctgggcggcaccgacgcagccctggcgctggacgagatcgtggtcaagggccgcgacagctacggcaagacccgtctgctggccgaaagcctgctggatggcggctacatcttcgaccagttcaagagcaccaaggctgaaccccgcgccctgaagaaagtcaccttgctgaccatcaaggccgcccatgctgaagtcgaacgcgccgtgacccacgcccaggccatcgccggcggcatggctttcacccgtgatttgggcaacctgccaccgaatatctgccatccgacttacctgggcgagcaagcaaggcgctgggcaaggaatt

SEQ ID NO: 18807 - DNA, 511 bp, Homo Sapiens
aaagttaaagcagggcgaggtctaccgcatcctcttcatccacctgtcggcggcctggatgtcgatgttcctgtacctggtgatggcgctgtacgccgcgctcgggctgatcctgcagacgcggctgtcgttcatgatgatgcgggcgctggcgcccaccggcgcgctgttcaccttcctgacgctgtggaccggcgcgctgtggggcaagccgacctggggcgcctggtgggtgtgggacgcgcgcctgacctcggagctgatcctgctgttcctgtacctgggcttcatggcgctgcaggcggccagcgacgatccgcgccgcggcgaccgcggcggcgccatcctgctgctggccggcgtggtcaacgtgcccattatctatttctcggtgcgctggtggagcacgctgcaccagggcgcctcgatcaacctgaccaccgcgcccagcatggcgcgcgtcatgctggcggcgatgctgctgatggtgatcgcgttctggctgtacagc

SEQ ID NO: 18808 - DNA, 899 bp, Homo Sapiens
cacttcgtattcacccagcacatcgggcacctgcccgggatctacgccccattgcagcagcattaagccttgggcaccgccccagtaatgcacaccctcgatggtttcaccgttgttgaccatccagtcgccggccttgtcctccagcttggcgcgttgcgcatcggtggtcagccattcacgtaacccgtcctgcccgtgatcagtcagcacggcacgaatggccgtatcgctataacctggcacgccgagaagagcattgagccgcgaccgggtgtagcgctcgcgctcgatcatgaaggcgccgtcatcggtgttcgttgaatccggcgacgggtacatatcgaacggagaaacccggaagaacaacggttggatttcctcggtttcaatcatctgccagccctgaccccacgcaatctgaggcacgcgctgaagcatcggccccttgataaaggccgccgggtagatggtgaagtcgtctatgaactcttccagggcggtttcccagccgccctcggccagttggtcagcgatcagcagttcgtgagcctcgcatgcctccttggccttttcctggatcagctcgcgcaacttggtctcaacctgcgcagaatcaggcatttcaaagccctgcccctgctgctctgcaccctgacttagctgttgcccaggctgttgagtttgctgcatttgctgagccagcttttgctggaacgccgccaggaactccggcggaatgtcggcgacaggcgttggatcaagtccccacggatgccccaccgccggcatcaaaatgtccctgatccacgacgcgcctgcgcggcacttggttgtagtcagtttgggggtaagcctcactgccgccgttctcgcgaaatggcctgcagccttcgttt

SEQ ID NO: 18809 - DNA, 629 bp, Homo Sapiens
  misc_feature (139)..(188): n is a, c, g, or t
cacccaagcgtccgtcttgataatgataggcaagaaaacttctactctaatttaatgcttttaaacatgtgccttaaatgttgcatttagctcttggaggacaaaacaaacgtctcagtactctttgtatttccaatannnnnnnnnnnnnnnnnnnnnnnnnnnnnnnnnnnnnnnnnnnnnnnnnnaatgaatgaatgagttctctttctacttccagagctcatcagtatacttcgtgttgtttaactggagattcaggggttttctgcccagtatttacttccctccccactattaataataacttcatcagtatactttgagatgtttaactggagattcagcgtttttctgctctaaaatttattctaccaacgtatcatggtacaacataccaccagggagcagaactaaatctcttgtgggtttggttctggatgtgtttttttatcattatatttctcggtttaatgtgggagggtaaaaaaattgatccaacttggtcccccactgtctctagctccatgctctgtgattatttgctgaaatggggaaaatccgggaagaaagattagtggctgtttatcaggaaaaacaggtagagagtgaaagactggggatatttt

SEQ ID NO: 18810 - DNA, 392 bp, Homo Sapiens
ggggggcccctcaaagggatccccctgcaaaagacccaggcctgccaccccgtggctttcctatagggccccggacattcttttcccaggccttcatttgaggggccctggattgggaaaacccgggcggtacccaccttatcccccttgcgccaactccccctttacccaacaggccttcacccatagaggctcccaccaatcgccctccccaaaatgtcactacccaacatgccgaatgggacactccatgtagggcggcactatgcgccccgggagtggggcctacgggcttggtgactaccaaccttgcgagcgcttaatgcccgcccctctagcttcgctcccttcctttttctccccgttcgagggcgttaccggggagcccttaa

SEQ ID NO: 18811 - DNA, 770 bp, Homo Sapiens
ccaccaaaaaactggttggcggtggacagggacatgatgccggcgtccaggcggccggtggacagcgcctggccgaccggcgcgctgccgccggagaattccttgagcgtggccttgggcagcatcttcttgccgacctcggcataggtgctggcgcccagcgcgccgacggtcacgccgtccttgtccagctccgcgtacgacttgtacggcgaatccttgggcaccacggcgacggtgtcggcgtagaacatcggcgccgagaacagcacctgggcggcgcgcgccggggtcggcgtcatgtcggcggccaccatgtcggccttgcccgacagcagcgccgggatcaggcccttccattcgtagtcctgcagcaccagcttgacgcccaggtcgtcggccatgcgcttggccacctcgaccgccaggccggtgcgcttgccgctcttgtccatgaagctcatcagcgggccggaggtctgcaccgccacccgcagttcgccgcgcttgatgatgtccgacagctcgtcggcccgggccggctgcgcgatcgcggccacggccagcgcgacgccggcggctcccagccattgtttgattttcagcatttgcttccccttctggatgaatgacgtgtgtcgttccgggcgtacacctgatgccggcggcgcccggtcaggccgggccggcccttgcttgctgcgtactgcggttgctgcgtgatgccgatgccggcgtgctgcgtgaagccaatactgcgtgatgcgtaa

SEQ ID NO: 18812 - DNA, 555 bp, Homo Sapiens
gggggggccctacaaaagaaacaaaacttaaattcccggactggggaggcgttttttcttctcaagggtggccaaaacctgtttgtgggcaccttatttaccttgcaggagatgggacattccccggctggcccaatataaaacaggtccgcacccatcccccttccccacagtggcgcaaacagaaagaggcacgacacgcgccccgtaccgaagaattaaccgccggggagtgtggatgtgaacccccccgtgaccgctccatatgccggcgcgcgagggggggttcccctcgctgtgatcccttcctttgtcgcggccttagccgccgttcccttgtcattctctcacttcgtgtgctgcctttattggtcggatttactgcttgaccgcaaatcggcggcaccatatttagtacgatgttggtgcattcaggccgccccccccgtcctcagtaagacgtcttgcccatatggaaggggaaatcaccctatctagtcgaatcttggtactaaggggaaaccctcaacccgcccctggctacatatgaataaa

SEQ ID NO: 18813 - DNA, 660 bp, Homo Sapiens
tacaggcacgagccaccgcatttatttgcttgaagtaagtacaagcaaagccgcagtggtttccagtgggtttaacattcaggtaatagttttactgccttgacttcctctatttatttattaagtgattcactcagtgagcatttgtggcactccaggtgccaggcactgttaggcatggctgctgagatggagaagatgcaggtgtgaggtacagagaggtcaaggggtcaccagccatgtggtattgtagtgggggcatggcacaggaggctagaggaggggtcctcagtggtggctgcacttgagaagcctttattgggcacctgctatgtgacaggcacggacagcagtgagcagtcgcctggcggtatattgtcgggatgtgcaaggctgctgttgagcgctcacatgaggcctctgactgtcgtgggggagtggcagggaagggtttcatccagaggtgatggggacctggagagccaagctggggagaggtagggctgtggaccaaggcctgtagttggagagcgcatggagactctggtttggtttggcaagaactcatctgtttatgtttgcataatgacaaagcctcttctgggatgattggatgattgctggctttatttgtgaattataaacagacctaccctccaa

SEQ ID NO: 18814 - DNA, 894 bp, Homo Sapiens
cacccaaaacgtccgcagtgatttagaggtgaaaaggaggattgaattatgattatgactacttataaagagctattctttctgaccatgtgacactggacatgtaccttcctcactctgttaggtttctcacctataaaatgggctgtaggaatgttaaatgaggtaatggatgtaaaagcatgtaaatgagagaatatgtgtaaaaatacataactactcagcatagtgcctgactcataataggactcaggaggtgacagtagctgtcattattcttactcataattacatcatgactgttattactactgattgaatgtagcaattcgagaatagagaaaaaatgaaaatgctagaaagtcacacattttcagggctgggctggcgcgaagacacattttgacagaatgagagaaatctcataggaaggaagacaaagtcagtttgtctttgcaaggttctgggccccagatgattcattctcagatgctctgggaaggactgcgtagaataagcatgggcaaacttccaggcctagtcacaagcaactctacacactttccccatctctctggttgcgaagaggagtctcaggttagaaacccaaagcgggagactcatcacatgttcacgtttttccctgcacagtggtcagtgctgtgtgtcagtcaggccatgtctagggtcagcgctgctccaggagcctctggctttgtccttcagtgggcagtcccttgctgtgtctcttcttcagacccttcaaccttacctctagccctggcttttagtttgggtaggagtttgtggcacatactcttttaatgacaggaagatggggcaagaatgatgatgaaggggaaaagaaagacatctgggagttttgtacctgaa

SEQ ID NO: 18815 - DNA, 716 bp, Homo Sapiens
cacatagctggcgatggcttccacatatttcacgcgccgcgcttcgctgagggcgggcggcttgagcaagtcggcgcaggacttgatcaccgtgagcaggttattgaaatcgtgggcgacaccgccagtaagctggccgatggcttccagtttctgcgactggcgccgggcatcttccgacaggcgcaaggcttccttggcttcttcctcggcctggatgtcgcggcccacggcatggatgtagtcgctgtcgggcacggccgtccaggcgatcatgcggtagctgccgtcctggtggcggtaacggttcttgaagttggggaagttcttgccgtcccccagacggctgaccgccgaggatgagacggccaggtcgtcggggtgaaccagggccagcaattggctgcccaccaggtcgttttcggtgtggccgagcatgcgtgtccacgccgggttcacggcggagatcacaccatcgagttgcgccaccagcatcaggtccggcgacaggcgccagatgcggtcgcggtcgcgggtgcgttcgatcacccgctgttccagggactcgttgagtttgcgcagggactcttcggcttcgcgcaggggcgtgatgtcccgggacacgcagaggattttttccggcaggccgtcactgcccatgatcgggctgacgttcacgtgccaccatttcaattgcccgccagggtgttggcggc

SEQ ID NO: 18816 - DNA, 405 bp, Homo Sapiens
ccgatattctggatgttcatgggcgtgtcccgtctggcctgcggttggagagctcaaagtctatgtttattaaaatgaacatcgcaagggcgtttgctgccgttatgtcaaatatattgaaacatccatcgtcgctggtttagggtggcagctgccttgagccgaacagctggctggccgggcaagcattcttcgaaggcgcctgggtacatcgcccggcccttgtattcaataagaggaggacactcgcatgaccaccctgacccgtgccgactgggaacaacgcgccaaggatctgaagatcgaaggccgcgcctacatcaatggcgaatacaccgccgccgtttccggcgacacgttcgaatgcctcagcccggtcgatggccgtctgctggcaacggttgc

SEQ ID NO: 18817 - DNA, 238 bp, Homo Sapiens
ctacgcgtccgtgtgtatgtacgcataggaatgttttgttcagttgtactttgtatttccaataatcagaaatcttacctttatgtataaaaacccattatgtaatgtaaaatgtataatattgtacataatattcagaatacaattattttggtaaattagcttgtatttttaatgtcccagttgcagtatttaattatttgaaccatactgaaagttggtaatagtcaataaagct

SEQ ID NO: 18818 - DNA, 740 bp, Homo Sapiens
cacaatttcgaccatcgcgtggtaggaaagctgttcgcggaatacctcatggaaaccggcgtcgagatggcgcaagtccttgggcaactcaaaatcgccagggccgccgctgaagtagaacaattggtcgggctcgggacggtggctccagtcctcgacgctgtccatcagcagcaggcgttgcaagtcaccgcccaggcccgccgaaatgagcttttcttccaccaggtgcaccgtggcgacgatgcccatggcgaaggcccccgccaccaacgcgctcatcaaggcgaaggcgatgatgatccgctgggcaaggctttgcttaaactccatcacgaccctcggccaggcgataacccacaccgtgaaccgtttgcagcaacggtttggcgaagggtttatcaattacctgacgcagttgatggacatggctgcgcaagctgtcgctgtccgggcagtcatcgccccacagggcttcttcgagaatttcacggcgcaatacgtgagggctcttttgcatcagcaccgccaacagcttcaggccaaccgggttgagcttgagcaagcgcccttcgcgggtgacttccagggtgtcgaggtcataattcagatcaccgacctgcaaggtccggcgaccgccgccctgggcacggcgcagcaccgcttcgatacgcgcggccaattccgacagcgcaaacggcttgagcaggtagtcatcggcgccggacttgaagccctgc

SEQ ID NO: 18819 - DNA, 351 bp, Homo Sapiens
ggcaagaaagttaaattcacggtctgcctttttgcaccgtaatttcgggaatgggcggtctttttccaacttattgtttgggaaacctttgcccttttcccattttggcgtattgccccaaaagcccctttcggcccccccttccaaaaacaagaaggcccgcccggatcaccgctcccccccacggccccttagaccgcggcgggtgcgggggtcatacgacccggtccttctactttcgtcacttccttttcgccggcgtcttccggttttctcgtttcatttctaactcggtggcccggcttagcgcttcaatttctagtttgggggctcctttaccggtaaaaattt

SEQ ID NO: 18820 - DNA, 448 bp, Homo Sapiens
gcacggtgttgtcggtggagatatcgtcggcgcgaaccatgcccgcaatgcgcaccagttcgtcaccggtgttgagggtcatccacttctcgccgcgtacggcaatgatgccgttgggcagcacgtcggccacggtcacggtgatcgaaccggtcaggctgttgccctggcccgccgcacttttgccgttggtggcgcggtcgccgctgtaaccggcgtccaggctcagatcaccactgcccagcgggttgttggtgttcggtacaccgccaaacaacgaggtcaggccgatgctggtcttgctggtcttgccgatctgcgagttggcgttcttgctcgcctgggtcttctcgttcagcgtgatggtgatgatgtcacccacccggaaggccttgcggtcgctgtacaggttctgttcgaaaccggcctggtagatcgagccattgtt

SEQ ID NO: 18821 - DNA, 313 bp, Homo Sapiens
ccacgcgtccgatctggtcaaatcaaggggtgtttgctggctgccagctaggtcagagggtggatcaatgcatttacccacaaaggtctcagaaggggcccatgcctctgcgacagggaccacggcccttccatcgtgactcactccccaagcagcctgggccagcgaattcagttctggtctcaactcccggacattcattcattcagcagatatcagctgagcaccagcatgtatcaggcactgttccaggtgccaaacaaacagcaaatgaaaccaagattcttgcccgccaggggcttatattctagta

SEQ ID NO: 18822 - DNA, 709 bp, Homo Sapiens
  misc_feature (79)..(91): n is a, c, g, or t
  misc_feature (426)..(438): n is a, c, g, or t
ccacgcgtccgaaagtgaagttcagtgaagttatgaattacctataagagcagaacctgttatctttcctattagtgannnnnnnnnnnnnactaggagttgataaactatggcctaaagccaaattggattcaccatctgtttttgttcagtcataacctaagaatgatgttaaatttttaattaaaaaattaaaagaataatattatgtgacatgtgaaagttatatcgttcaaatctcattgtccacaaatcaggttttagtagaacacaggcgtacacattttgttggtgtattgtctgtggttcagagtgcatggggtgttttgtaccagtgactaataacttagctcctgaataagaatactttaaagggagaataacccaaggtttgcatctgatcagcctggttgcagagaaaactgnnnnnnnnnnnnncttcagggtgttctttagttctagttttgttctttttaaatggcagccatgtagttattgtttaatcctttcttttgtttattggcaaacactatattcattattgtttgctctcagttatgtggtggtaatggggaaaatgttttgaaagcacatagagttctatagttgaaaataagatgtgttgtttttagtaaaagcactgcaggtaaaccaccttgaccctgtcagaaatacagactcagccttgaggttttgaccctgggcagtg

SEQ ID NO: 18823 - DNA, 354 bp, Homo Sapiens
tcgcagattttacggatatatcgcgtagatttggtgaactttcggggatgtgcgcggaacctctattgttatatctctataacttctacttgtatcgctcatgaagatatggcttgataatgcttcatattttgaaatgggagagatgaatattccaccttccggtctcctttatccggttttggcggactatgctttccggtttgacacccaaaacgtggggaagtgaaaaatgctggaatccttggtgctcaatgtgtcatcaatctgaattctaaccgggaaatcttttgcgattacgacccaatagttttccattgttgacctgtttaaggtctgcttgattgccgcatt

SEQ ID NO: 18824 - DNA, 695 bp, Homo Sapiens
cgacgcgtaaccggcgctatgccagcgcaatccccgtcgcctggcgcaatgcggcgagcaaccgcgcctggaaggactcatcgcgcaccgccggatgggggtcgaggcgcgcctggtgatgccagtatccgccgctctggccgatggcggaatcgtcgcccgtcgccagccaggcctgcgtgacgtgtcccaggctgagatcgcccggcgcatccggcccgcccatcttggtgggcacccagccggggtccaccgcgtggctggccacgtccggccacaaccgcgccaccgccgccgccagcgccgtcacgaacagcttgctgtccgaatacgagccgctctcgcggctgccgtcccacgccatgcccgtcaggtcgggccggccgtcgtcatgcatttcgctgctcaggtagaccaggcgccgcgggcgctgcatcaacgcggtcagcacatacggcgcgatgacattgaccggcaggatggcggggccggtgaagaccccggcattgtggatgaccgcgtccatccggcccagggcgttgagctggtccgccaggtcccgcgtctgcgccaggtcggccagatcgcccaccaccgccaacgacccttgcgacagcaattcccgcgcggcgcccaggcgctcgcgattgcggccatgcacgaccaccatgtggccgtcggccaacagtgcgcgc

SEQ ID NO: 18825 - DNA, 827 bp, Homo Sapiens
  misc_feature (99)..(385): n is a, c, g, or t
  misc_feature (391)..(603): n is a, c, g, or t
cccccacgcgtccgcaattttgtcttttgttgccattgcttttggtgttttagacatgaagtccttgaccatgccttaatagagcttattcaccattgnnnnnnnnnnnnnnnnnnnnnnnnnnnnnnnnnnnnnnnnnnnnnnnnnnnnnnnnnnnnnnnnnnnnnnnnnnnnnnnnnnnnnnnnnnnnnnnnnnnnnnnnnnnnnnnnnnnnnnnnnnnnnnnnnnnnnnnnnnnnnnnnnnnnnnnnnnnnnnnnnnnnnnnnnnnnnnnnnnnnnnnnnnnnnnnnnnnnnnnnnnnnnnnnnnnnnnnnnnnnnnnnnnnnnnnnnnnnnnnnnnnnnnnnnnnnnnnnnnnnnnnnnnnnnnnnnnnnnnnnnnnnnnncatgtnnnnnnnnnnnnnnnnnnnnnnnnnnnnnnnnnnnnnnnnnnnnnnnnnnnnnnnnnnnnnnnnnnnnnnnnnnnnnnnnnnnnnnnnnnnnnnnnnnnnnnnnnnnnnnnnnnnnnnnnnnnnnnnnnnnnnnnnnnnnnnnnnnnnnnnnnnnnnnnnnnnnnnnnnnnnnnnnnnnnnnnnnnnnnnnnnnnnnnnnnnnnnnnnnnnnntacaatgccttgctcttgctcacggggtcggagaattttgtctttttggtttctagcttatctccagccccctacaatagttcttgcgcacagagtgccctccatcaaatatttagttgatgaagtgcacctccccaattttggatgagccaggaatatgaacagaatcaactcatacgcacatttaggtaaaaatttaggcctgggcacggtgggctcacgct

SEQ ID NO: 18826 - DNA, 703 bp, Homo Sapiens
ccacgcgtccggtcattaaactgagttgggttttttcttaaagggtttagcatcactcatttgatttacacattcacattataatatttaattatcatgggtgtatgctttacataaaaaaggtttataaaagttatttatgctatattgaaagtcatcttaagaatctccaggttatttaaagtagttataggagcagagaacaagcacctttatcaaaatctggtcctatgtgccttgctttaccaaatacctgatttttctggagggtgttcctgtaattcacaactgtagacacatgggcaaaattaggatttttaagaataaatacatttctatttttttggttgtttcaacattagctcttcaaattcattaacaaaattaaaataggtatattacaaaagcataaacatttgtgaacagtacttaaataaattgtgatactattgctccatcattgaactttttgaaactttaacaattgtataaaactgtcagtttgttgtttcatttgtaattacaaaataatttaaaaactttttaaaataatttggatcctgactttgtctatatctgtatttcatttgtttagaaagattcttttgggtttgataatgtaatttgtatatttaaattttttatggacataattcaaaggaatgtataaattggtcttttgttaaatggctttttaattgat

SEQ ID NO: 18827 - DNA, 463 bp, Homo Sapiens
  misc_feature (155)..(250): n is a, c, g, or t
  misc_feature (268)..(285): n is a, c, g, or t
  misc_feature (317)..(341): n is a, c, g, or t
gggggggcccccctaagggaaaccacttttaaaccccgggaggggaaacttaaacttttttttagggggccccaaaatttttttccgggggcggttttttaaaaggcgtggagggggaaaacccgggggttacccatttttttccttttggaaannnnnnnnnnnnnnnnnnnnnnnnnnnnnnnnnnnnnnnnnnnnnnnnnnnnnnnnnnnnnnnnnnnnnnnnnnnnnnnnnnnnnnnnnnnnnnnnctggaggggccattaaannnnnnnnnnnnnnnnnnttaccccaacgggggccccttatttttccggnnnnnnnnnnnnnnnnnnnnnnnnncccccctttgccccgggtttcccccggaaagttaaaaaggggggctccctttgggggttaaattggttgtcccgcccctcaaaccaaaaaaattttttttagggggagtgtctctttggggg

SEQ ID NO: 18828 - DNA, 902 bp, Homo Sapiens
ccacgcgtccgtttacttccaagtaaacccgtggatgatttgatgagggataaatgaacctatttcttttacacacataccaaggacatgcttgtggctaaagtgagttgataatgttgtgcaaaggatagttgtcaccaactcatttctttatggtccataatgaaataaaaattttgtatactgttaattctgtaaacagatgcatgttcaaaagatctatgatggtcttgtaatcttaatctaatatattttagatattttaattttttccctcttggggaacacatttagtatagtgtagaaaatacttccatgacattttcatataaggttatataacttttcatacataaacatgaaatttgttgtagaaaattctttaaaccaaacatttaaatctaggacttcaatttaatttgttccttgaatctatttttatgtggcccttaaaaaatatccaaaaaacccattgctaatatagcaataaaaatactttgggtactgacagactctttggagtgtttatattacaaatttgtattcatattcttttctgtgatgtgttgtactaaaatccaaaatggcttttgcaccatttttaagccaattttttcctttgatgttggtaccagaattactataagtgactgctgcttttgggggtaaacattttgttagtgaagataaaaccagaacactaaattatggataaaattttcagaataggtggcacaggtaaatttcacctatgttatattttgtgtagtaaagaaaaaaattatttggtcaatgttatcttaattcatactacaatttaagattatcttatgtgtattatagtaaatagatgatttttcagattcaaggctcctaagagtttggatttgctcctgtttttt

SEQ ID NO: 18829 - DNA, 815 bp, Homo Sapiens
ccaacaaaggccactctgaccatgccggtcagcctttgcaggcgagcgtcttcagggtaggacttgaagtggttgaggtgagtgagcaactgatattcccataagcgcttctctaccagttgctcctggtggttggggccgctcgtgcaggcacaaagcagtaagacaagtgcgatccagctgtatttcataaacgcagttccgttgacgtttggtttgcgaagtgaggctaattatccggcgttatgctggctatcgctttgcgatcagagcgggtagctcgtcgagcgattttatagtgtcttgcgcgggagcaaggcctgcgggccattgatgaaacccctgaaaccatacagcgtacatcccggcggcttttgccccttggtagtcgtttagagggtgatcaccgacaaaccagcagtgctcgggaagaacgcctaaccgtgcagccgcctcatggaagatttcccgtgcaggtttggctgtcccgaacgcttgagagctgacaacggtaccaaccgactgagcgaagggcaacgcagcgatggttttccttcgcgagtgctcggcgccattggaaacaatcccgactttgatgtgtctgtgctccagcgcctgaatcaacgctgcagcgcccggcattggcacggctgcggccggaaatggctgacccagtgctcgaccaggacctcagccggctgcggcactcgccacggcagttggttggcaagggtgtggcctacagcttccgggatcgaagagaatgcggactgtggggaaagatagccgccgctgtcttcccgcaaatcaggtgc

SEQ ID NO: 18830 - DNA, 689 bp, Homo Sapiens
  misc_feature (225)..(241): n is a, c, g, or t
ccacgcgtccgacgagtgaatgaagtggatacgtagataatgaataaatgaatgcaagcaatttaagtgattttttttctattttaccagttcttgctgcccttttcctgaaggacacgtcagccaaaagttgtgagatttgacagccagatgaattcttagtgatcacttaccccaacccattcaaaaccagaccagagtgacttccaggagctgccactggcnnnnnnnnnnnnnnnnnaacatctctttacgtctccaaaagctgtgctcttgagtacagcaaaaagcccatgggtccaagggggctaaaggtaactgggcacacaattcacactctttcacaaaagaaggtgggaaggcaggaaacaattatttttggatgctagggtaattgtgtagccagatagaagtatgtaaagggaaattgaaataatttctgagtttactccaaaatgttaccgaagtatttaaaaataaccattaatgactgttatctaatgttagcctcgtaaaattaggacaaaggtgatagttctggtgaagaagaagatgatgatgatactattagttaacatttgtttactgcatattgtttcaaaaatgatgctaaattctatgtaaggattactttagttaatctttgcaacactgcacgatagttccagtatttgcccattttacggatg

SEQ ID NO: 18831 - DNA, 741 bp, Homo Sapiens
  misc_feature (333)..(397): n is a, c, g, or t
cacccacgcgtccgctctcagcggggttgaaccttgagaattccattctttgtggcattctctgtgaaacaactacaaaagaatggcaggagatttacaataaacaaatgttctttctcttcttgaacatgtaaagaaaacaaagccagaattgagttttgagactgtttgcaaaatgaactccatccatggaaagacttcatggctacctcagtgatacaactacgtattttaagaatatgggtctatctcctattcaaaaaataactgcctcgatgacctgtatgaaatttttgagttcagatattgccttcaaaaacagtagatgactgnnnnnnnnnnnnnnnnnnnnnnnnnnnnnnnnnnnnnnnnnnnnnnnnnnnnnnnnnnnnnnnnnaaaaatagaagtgtatgagtccctgttgataaaggaaggaagggcctaaacacctgtggatacacattcagcaattcaacaaatttatgaaaacagctacccattcgggaaaggagccattagcagatactgatagtagaagggagaaagaactcttgaccacagcaaaatgccaaaagctggctggtaaatatggaggagtgctggagttggaaaatcatcattttgcaaacattatgttaaagactagatttgcttaagaatcatcgatgaatgccaaatctagggtgcagaaatctgatgaggatgaagatgtgtgcatggcctccatgactttttcaaag

SEQ ID NO: 18832 - DNA, 980 bp, Homo Sapiens
  misc_feature (751)..(807): n is a, c, g, or t
ccacgcgtccgctagttctagatcgcgagcggccagcccttttttattattaagtagaagattgtatctgtgccccttttttcgtagtggaaggtatatagccgagtataaaatggttttcttttgcattatctgtattcaaaaaacagggtagttatattaaagcttaccaaattgatggtgaatttatcagattaacctttttgtggtgcagatggttctaagtatcaggtgacagggtattctactctttctagtcaattaaaattgataatgcagcatgattcataaactaaccagctgtgcctccttttattttgaggaccctgtagtcactataataaatttctaagccaaatttttcaaacaagatagttcttatagaaggagaaataataaatatgtgtgtgttgatgcatgcacacagaatgacctgtgaaaggaaacttaaattttgccggtaaaacaaacatatctctacagactgtgattatacttcataagcatttaaatacagttttatttatttccttaaatatattacttgggtaattaattttagatttgattgcaaagagcactgtatagcagttgggaccagctcttggcttggcttggcttggcttattgttaagagtttattggatcaagactaacaaataactttgtgatgaaaattcttcaaaaatatagctactcttttcaagtataccatttaaaatatttcatcaagcagagccctgacccaggnnnnnnnnnnnnnnnnnnnnnnnnnnnnnnnnnnnnnnnnnnnnnnnnnnnnnnnnngtgttttcagtagtctttactggcccttgtgggaggaaaaatacttttttaacttgcttttctagatttgttatatttaaatcccagagaaactatgccgaaaaaagtggttataaagaggaatgcatgtagcattaatgcaatatcaagaaatacttgaaagagtccttttc

SEQ ID NO: 18833 - DNA, 647 bp, Homo Sapiens
gaacagctgcgcgatgccggccgcatcgcctccgtggtcaatgccgccgccctggcgctggccgcccagggcaagtaagccccggctgacgaaaaaaaacccgcctgcgcgagcaggcgggttttttattgggcgcgtggcgccgcggcgcttatttgtcctgggcggtcttgaccttcaccatcggcaggccgttggcgacccaggcctcgatcccgccgcggtaccagtaggccggccagcccagcgtgccggcgcgcagcgcggcgttgtaggacgagcggtcgttcatgctggcgcccacgaacaccaggggaacgttatgttccttttcggtgcccgtcttcttgtgcagccagccgtcgaaggcgttctgcatctggtctgcgacgctgccgtccgagcccgcgtcgatcagcgggaaggcatcgggcagcgtctcgttcgagccgctggtgtcgatcaccagcaggttcttttcgttcttgtacagggccaccaggtcgcgcgtcgtgatgaccttggcgcgcgggtggctgctcggcgtcgggcccttgtagggcgacgagaacagcaaggtggtcggcggcacgccgaggtcgcgcagttcgtcgaagccgccgctgggcgcggcgccgccggagggc

SEQ ID NO: 18834 - DNA, 471 bp, Homo Sapiens
ccacgcgtccgggaggcttctatcgtggattgccacttgtcccaagcaactaccacagcttgctgaacatttcctgaaagattattttcatattcaccttggtgcatttgaattgattgccaaccccctttttcttcctattgtgaatgtgtgtactgacctcgaactagatgaaaaacttattcatctaatggatcatatcatgagtgagatcgataatttctctattgtttttgtgaaaaccaatttaaaatgtgatgagcttcttcgaaaaatgaggagagatgggtggcctgccatgggtatccatggtgatggagtgactatatggatgcctgggttctaaatgaattcacaaatagaaaagctactattctgattgctacaaatgtggcctcccgagggccccatgtggaagatgtgaaatttgtcatggcttatgactactctaactcctcagaggattatatt

SEQ ID NO: 18835 - DNA, 795 bp, Homo Sapiens
caggcaaaagtcccggtcggcaagaagggccagttgcacgaataccctcagcgcgacctgccgttttttgaagggctgggccaacagtccagggtgcatgagctgacggcatttgtagtgggcgaggactgcctggagcaacgcgacaagttgctcaaggccctggaggagggcgccggcgagctggtgcacccgtggcttggacggttgcaggtcaaggtcggcgaatgcgagatgacccaaacccgccaggacggcgggctggtgacctttgccctgaagttctatcccgacgaacctttgaagtttcccactacggcggtcaatacccgccagctgttgctggtgtcagccgacagtttgctggggtcggcggtgctgcgttttgagcaggccgtcgcactggtgaagcaggcgcgggtgggtatccaggcgttgcgcaatggactggcagaggtttaccaggtgattgagcagcagtttgcccccctgattcagttgtatggcgacctgaatgccttggtcaaagccatcaaggaagtgcccaaggagctgagcgccgagttcaagggcttgctcggtgatgtgaaggagttgaaggcatttgcccgcagcggctatcgcggcatgctggccaacctctcgcagcaggtggaagcggctcggaatatcgacgtgccaaagctgaccaccggcaaggacagcgtggccgccgtgcaggccactgccaacctggtacaggacgcgttgtgggtgaagatcgcccattggctggcggacgtaccggtggcgacc

SEQ ID NO: 18836 - DNA, 339 bp, Homo Sapiens
  misc_feature (47)..(146): n is a, c, g, or t
ccacgcgtccggcacagtctgagcaattaaatagattcataagcatnnnnnnnnnnnnnnnnnnnnnnnnnnnnnnnnnnnnnnnnnnnnnnnnnnnnnnnnnnnnnnnnnnnnnnnnnnnnnnnnnnnnnnnnnnnnnnnnnnnngggggggcccccccaaaggaacccaccttaattaccccgggctggcaactccaaacttttcttaaggggcccctaaatttaatttcctgggcgttttttttaaaagggctgaaggggaaaaccctgggttttcccaacttaaatccctttgaacaaatcccccttttccccatgggggaaaaaaccaaaaagg

SEQ ID NO: 18837 - DNA, 249 bp, Homo Sapiens
ccacgcgtccgctgtattgaccctatccttgtttgatatcatgctgttagaattcagcctcctaaagaaaattttcccgtgtatctactgtaatttggggattgcagctggcatttaattcattccttcagcagatgcttgcttatctactttatgccaagcacaccacagaacagaggacaaaataaatctctttcatggaacttgaagtctagtggggaaaaatgacaataaacagatgaggaaaac

SEQ ID NO: 18838 - DNA, 282 bp, Homo Sapiens
tgactgaattacaaaatttaccgcgaatttacaaaaatttaacgctaccaatttaggtgcactttccggggaaatggcgcgggaaccctatttgttatatttctaataccttcaatatgtatcgctgcatgaggaaataacctggataatgcctcattaatttgaaaaaagcagagtaggattatcactattcgtggtcccctatttccctttagcgcaaattgccttccatgtttttgctacccaaacgctgtgaaattaaagatgtcgaaaattcgtttg

SEQ ID NO: 18839 - DNA, 345 bp, Homo Sapiens
gggcggccccccaaaaagaacctcctgtttggaaaaaccctgggggttatccaactgggtccccttggaccccatcatcctttccccggccggctttttaacaaggaggcacgcggggatccccggtcttaacacctgtgcaccccctttggccaatcccactctccccgaagcggcgaaatacccaagacggccgccctgattaccttcccgtgattgctgggttgattggtgcgtgggaccgccccttacacgtgccgagagccggggtggataggtgagttggctctctcgtcccgctatatttcagagcctccattcagcgtctctatttcttgctctcct

SEQ ID NO: 18840 - DNA, 517 bp, Homo Sapiens
cctatgccgatctgtatttccagtacacccgcagcgagggctggagcctggaagagggcatcgtcaagaccggcagtttctcgatcagccagggggtcggcgtgcgcgccgtcagcggcgagaaaaccgcgttcgcctattccgattcgctttcggccgacgccttgctgtcgtcggcccacgcggtgcgcggcattgcccgccgcggcgccggcaaggtcaaggtggcggcgcaggtcgaagcccaaatgggccgcagcctgtatgccgacatcaatccggtggcgaccctgagcgcccccgagaaagtcgcgctgctcgaacgcgtcgaacgcatggcgcgggcccgcgatccgcacgtgatccaggtcatggccggcctgggcgccgagtatgacgtggtgctggtggctggcagcgatggtcgcctggccgccgacgtgcgcccgctggtgcgcctgtcgctgaccgtcatcgccgagcgcaatggacgccgcgaaatgggccatgccggcgg

SEQ ID NO: 18841 - DNA, 923 bp, Homo Sapiens
ccatgcgcgaagtctggaacctggtcaaggacggcacgatgatcgagattcgtccgtaatttttccgccgctcgtaaaataattcaaaaaaaattcctgccccgcgcagcgcttgccggtgaataccagttcaccccggcaagctgcgcgcttctgcccgatagaaagacctctctaataccacttgaattggcgcactattaaggcgcccgtaaacacttgcctgcaccgttttcgctgcattgacatggtatttaagtggtattagcttgcgatcactaccgggcgacaacactccaataaccgcatcggaaaccgacacgatgaaccccatcctggccctgcgccccgacgataaacaatcgacgccgctgtacctgcaactggcccgtaaccttgaagccgcgattcatgccggccaatggaaatccgagcaggcattgccgtcggaacgcgccctcagcgagcaactgagcatttcccgagtgaccgcccgcaaggcgctggaagtgctgttcgagcaaggcctgatccgtcgcagccaaggctccggaaccttcatcactccgcgcctggaacagccgctgtcgcgcctctcgggcttcagcgaaatgctccggctcaaggggtttgtaccgacgtcccagtggctcgagcgcgacatcaccccgccgacccatgaagagctgatccgcctgggcctgtcgccgagtgacaaggtcgcgcgcctcaagcgtttgcgtaaggccgacgacacagtgatggcgattgaaatgaccgccatgcccgcctccgtcctcctcacccgcggccatcggcaactcgctgtacgaataccctggaaagcatcggcaagcccatcgtgcgcgccctgcacacatccaggcgatctacgcctcggacgatttcgcagccctggtggg

SEQ ID NO: 18842 - DNA, 536 bp, Homo Sapiens
cacacatatatcaactgacaagccgtattcgcgagcaagcccgctcccacatggatcttctaaacgccgaactgctcgcgataggccttgaccgctggcaagtgctgcttgagctgcgggtcatcttccaggaactgcaacacctggttcagcgacacgatgctcaccacaggaatcgcgaaatcacgttccacttcctggatcgccgacaattcaccgttgccgcgctcctggcggttcagcgcgatcaacacgccagccgccttggcgccgtcctgggaagcgatgatctgcatcacttcgcgaatcgccgtaccggcagtgatcacgtcatcgatgatcagcacgtcgcccttgagcggcgcgcccacaaggctaccgccttcgccatgggccttggcttccttgcggttgaagcaccaaggcaaatccagcgcgtgatgttcagccaacgccacggcggtcgcggcggccaggggaatgcccttgtaggccgggccgaacagcacgtcgaaggaaataccgctttcaacgat

SEQ ID NO: 18843 - DNA, 837 bp, Homo Sapiens
ccacgttttcggcatctttagggatggcgaccatgtcatagaagctgccggcgccttctttccagaatgtcgtaggcaaccttgaccttgccaccggcttcagccgcgcgggacttggcctgttgcacgtcacccgaataacccacggctacgcagatgttgccgttggccaggtcggagatgtacttggacgagtggaagtagccaatcgaaggacgcagtttgaggaacaaggcctcggcttgcttgaggtcttctttcttctgggtgtcggtcggcaggcccaggtaatgcagtgccactggcagcatttcggttggcgaatcgaggaagctcacaccgcagcctttcaacttggcgaggttttccggcttgaggatggtgtcccacgagtcgatcttgtcgatgcccagtgcagccttgaccttctccgggttgtagccgatgccgatcgagccccacatgtacgggaaggcgtgcttgttgcccgggtcactgatggacacggccttaagcagggatttgttcaggttgtcgtagttcgacagcttggacttgtccagttcctggtaaacaccggccttgatctgcttggcgaggaagttgttcgacggtacgacgatgtcgtaaccggacttgcctgccagcaacttggcttccagggtttcgttggagtcgaacacgtcatagaccaccttgatcccggactctttttcaaagttcgcgatggtgtccgggtgcgatgtagtccgaccagttataaacgtgcagcactttatcgtcggcgtgtgccgcgccttgccacggccccaatcgggacaggccaggagggtcttg

SEQ ID NO: 18844 - DNA, 736 bp, Homo Sapiens
atgaagctggacaacaatatctatgacatgtccggcggggcaatcctcggtaatctggtgaccgccttcggtacagataccatcatcgtctccggcggcaacatcggtggcaatatcagcaccagtggcggcaacgacagcattaccgtgagtggcggcgtcatcagtggcgagatccgcgccagtgtcggtaatgacaccttcaactggatcaatggtggccagatcaattccgccgtgctgatgggcgacggcgacgacaccgcactgatcagcggcctcaatgaaaccctgctcggcactacgccttcgattgacggcggcctgggcaatgaccaactgaccttcgacaacaccacttccagcaccgccgcccggtatatcgggtgggaaacagtcaaccttaacaacaactcgcgtttcgacctggccggcgactttttcctcggcgacagtgccagcaataccggcaccttcaacatcgatggcagcagcaccctgggcgtgacgcaaggcagtatccgcccctacaccgcaggcgcactggccaccctgaataatgccggcaccctcgacatgaccagccgcagcaacagcgccaccgatacgttgacggtgtacggcaactacgtgggcaacaatgggcagctttggttgcaaaccgtgctgggcgacgagaactcggctacccgacaaactggttgtgtctgacgggaccatcagcgggcacacacaa

SEQ ID NO: 18845 - DNA, 364 bp, Homo Sapiens
gggggtccccaaaattaatttcggggggggcattttttaaaaggatcgtgtctgggaaaacggtggggtacaccatttttttcccctggtgacacatccctctttcgctccggggtgtaatagcggagatgccccccacgatgccctctccaaaatgtttcccaaccagatgggcaaatggaacgcgtcttgggacggcgcattaatctcggcgggtgtggtggttacgctcagggtgaccgatacccgtacgagcgccatagggcgcgctccgttgtttttcttctcttctttgtgcgcggtgttcgcgggctctccgcttggagctcaattgttgagggctccctttagggcttctatttag

SEQ ID NO: 18846 - DNA, 358 bp, Homo Sapiens
gctgtgcgataatgtcaccaaaaattcaattcactggccgtctttgtgccgcctctagacgagaaaaaccctggcgaaacccaattaaatccccttgtagcccatctccgtctcaacacctgtcgtaacaccgaagaggtccccaccgatctcgcttcagaacgatttcgcaaccagattggaactggagcgcatcctgcaccggcgcattaagcgcggataggaggggattactcgcagcttcccctctccgtgtgcgacgcccttatagcccgctcctttccctctcttctctgctcttcctcatccggtggggggtgttgtctctcaagtcacaaaatcaggggttcatttgacg

SEQ ID NO: 18847 - DNA, 938 bp, Homo Sapiens
cgctgcacatgatcatcgccaagggccccggcctgaagccgctctacgcccattgcctgggtggcggcaccaagccgcgcatcactgtgaccacacaccccgccgccgatggcaattgggtgtggtacctgggcggcgatatcgccgaggccgaaggtgtggcccgcaccccggagcaacagatcgccaccgcacaaaaggagttggcgcagctgctgccctggatcgatatgagccagactcagtgggcgaccctgcgcgtggaccgcgccgagccgttgcagtcaggcctgacccgcccggacaacgccttcctcgccgagcaggatcgcctgttggtgggctggccgactaagctggcattggcgccggacttcgctgatcgggtgatcaacgcactggaacgtgacggcatcaagccaagtgtcacggaaacgctccccgacctgccaaaacccgccatcgcccaacctgcctgggagcaactgctgccatgaccctgccgaccctgcatgaccttcatcgcccattgggcagcaccggtttgatggtttcgccgctgggactgggaaccgtcaagctgggccgcgaccaaggggtgaaataccccagcggcttccagattcccgatgacgatgccgcgcggatgctgctgcgccaggcccggcaattgggcatcaacctgatcgacacccgcgccgggcctatggccgcagcgaagaacgcctggggcccgctgttgcgtggtcagcgccaggaatggggtgatcgtcagcaaggtgggtgaggagttcgccgagggcgtgtcccatcacgatttcagcgcggcccacacccggctttcagtggagcgcagtctgaaacgacttgaaaacggattttaaccgaccttggtgctggtgcactccgacggcaacgaacttgcacatcctcaacga

SEQ ID NO: 18848 - DNA, 475 bp, Homo Sapiens
cacccaagcgtccgagccaaaagctttggctgagttttgtggacaatgagatgagaaacatgggagctgcctggctagtcttttaagaattttaactgtaaataggagaatagtactgagtttattgataagaagtgaactgagtccaagataaagaacaacatacttatacatactgtacggaattgttattttgcttgtaaggcattccacattctaaaaaacaaacattaaaatatttcttaataagtaattaaattttcaacacatacattttctaccctgatatttatttttcctagttgatattcacaaaataatcacagaataaaattagaataatttgaagtgtctacactgagaccactagttctgccctcatttaatgagatgacaatttttaagagagactataatcatagcgtatatctaagtagttagaaaaaactgctgattccattagaaacaaggattt

SEQ ID NO: 18849 - DNA, 969 bp, Homo Sapiens
ccacgcgtccggaagggaagggaagggaaaagaaaaggcactatttaccaagtgtgaacaggaccccaggaaatcttaagaatattgcagtaccccagggttcattatagatttatacatcaaggctagaaggggaaagtggatagagtatttactgaaacctggagtcaaagagggcccagtggagaaaggagcctagagctttggtcaaggttaccctgcagggagggagcatgtgagtcatctttccaactccactcacctactcccttcagtcttctgttagtgctcacccttgtctgaacccaggtagacatcagagacatgagaacctgttgatttagtccatacaggtcagtctcctggggaatagagcaaggtagaggagagtggaaatggcatcagagaactgaatggaagatacacagctcaaatgcgttcctgagaacccttacattctatgacatcctagttaatgtgcactgggttgtaccaaaagctgcgcctattcagcagcagttctcaggctgatgtgatggtagacatatgcagtgagattctcaaagaatgtttttggggtaattcaactgtaatagcagatttcagaattttgtttataatcctaatgaatggcaaagatcctctatgatttaaggggaattttgctttaacatccactactctacaacacatctgtggattggggctggccaggtagtattatactcattttccagatgaggaaacacagcaatctctttgcccatcttagttcacaaagctcagtgaaaacttgtccctgggttctgtgccatgaaatgccaatgggcctagtctactttcttagcttgccttgggggaaataaattgaaaaccaatgatttctctgaggagctacttgtaggaaactcatcagcttttagtttcagaatacttgaataagacgctagtgtctcattcagcaagtcc

SEQ ID NO: 18850 - DNA, 399 bp, Homo Sapiens
tagctgaacaacactcaagcttatcgcgtccattctttgataataaaggattggcggattctggctactggtaaaaatgacgtgattaacaaatttaacgcgattttacgaaaatttacgcctacacttaggtgacactttcgggaaagtgcgcagagaccttatgttatttttccatacatcagatgtatcggctccagaagcaaaacctcgaaaatgtctcatataatggaaagagagagattgatttttcaacttccggtggcgcttatatcttatttgcggatagccttccagttggtcccaccagacgcggggagtaaaatggctaaaatcgtttgtggccgaatggttacatctactgatactaaacgcgtaaattcgttgcagttttcggcc

SEQ ID NO: 18851 - DNA, 454 bp, Homo Sapiens
caaaagcagccagtacgcccatgccgccggccagtcctgggtcaaaactcatgggtgattgcctgtcagttatccgaaagcattgatgctagcggagaatctcagcgcgttacagaaacatcccgcccgacgcctcgacacgctgcccggtgatccagttgctgccatccgccagcagggaagaaatcgccccgccaatgtcatccggcaagcccgcgcgaccgagtgcggtgttgttggcgaccatcgcgttcacgtccgggttgtcccgcaccgcgccgccgctgaagtcggtggcgattgcgccgggggccagggtgttgacggtaatcccgcgcgcgcccaactccttggcctggtagcgagtcagcacctccaccgcgcctttcatcgaggcgtaggccgagtaacccggcaggctgaagcgcgcgaggccgctggagatattgatgat

SEQ ID NO: 18852 - DNA, 348 bp, Homo Sapiens
  misc_feature (203)..(211): n is a, c, g, or t
tgacgttaccccttttaatcaccttgccccacatccccttttcgggagctggtttaatagcgaataggccggcaccgatcggccttcaccccagttgcgcaccctgaatggcaaacgggattcaccctgtggcgtaacattaaaaagcgccggtgtggtggccctttccaaactgaccgctacctttgcggaaaccctagcgnnnnnnnnntttcgctttcttcccttccgttgttgggggggttaccggctttccccgtcctacacttaatcgggggctccctttagggtttttattttttgctctttcgtttctcgaccccttcaaaggtttttacggtgatggtt

SEQ ID NO: 18853 - DNA, 674 bp, Homo Sapiens
cccttccggatccagttccatcgtcacgcgcccgcggaaatcggccaccgccggatcgtccagcgcggcgtcgaattccggcaggccggcgcggccctggcgcgcgatcaggcccagcaccgtgcccatcgagaacttggactggtgcaccgtgcgcggatcgaccaccggccccaacacgtcgatggcgccctgatgcacgtgcgccaccacccgcgcgatgtcgctttcggccagctgatgctcgcgcagcacctgctgcagcgcatccgccgccggatgggtatggcggcacgaggcatggaacttgaacgaggtctcggccagcgcccagcgcgtgcccagccggtcggtcaggcgcgtcggatcggcgtcgctggacatgccggcggccatgccctgcgggccttcgaggatgtggcgcgcgccggtgaagccttcctgcgccaggtaggccgcggcgatgccgttggcggcggcgcgggcggtgtgcagctgcttggaatcggcggcgtcgcgcaggaattctcacaggccggcggcctgggtgccggccgagccgaaggcgtccagcatggccgcgggcgccaggcccagcagacggccgggtggccgcggcggcggccagcgtgcccgcgggtgccggtgtgtggaagatcttgtattgcgagcgg

SEQ ID NO: 18854 - DNA, 474 bp, Homo Sapiens
aattatacaatatttgtccttttgtgtcccgtgcttatttcactcagcattatgttatagcattgtcataatttcattccttttgaaggctgaataatgttttgttgtttggatatactgcattttctttatccatttatctgttggtgggcacttgagtggtttccaccttttgggtattgtgaataatgctgctgtgaacattggtgtacatgcatctgtttgagtccttgctttcaattctttggggtatatacccaggagtggaattgctggatcatatggtaactccatatttaatctttgaggaactgccagattgttttccacagtggccacatcattttacattttcctcaacaatgcacaaggttccagtttctctacatcctcaccaacacttgctattttcatatcctaatggctgcaaattggtagcttatgggtttttatttgcatttacctaaataaagc

SEQ ID NO: 18855 - DNA, 869 bp, Homo Sapiens
cacttcaaccaggcgcatcaacgccggggtcgcggcccccaccgccgcgccggtgtaggcacgtacgcgggtcttggttttctcgcggaacacctcaagcatgcgctcggccacccccaggctgacggtggaaaaaccgctggcgaaatacggacggtacggcgagtagaaaatcttgctgtcggggtacaaaccgaaaccagcggacttaccttccatcatgtccttggctttctggatgcggtgttcgggcaccaatacgttgtcgatgatcagggtcttggtgccgctgcctttcatgccggcggcgaaccagtcatcgcgaatctgatagtcactgcgtggcaacaccgcgaagcagtaatcctgagtcccttcggtatttttacgacggaacccgacaatcgcccactcggcgtgatcgcaaccgctgctccagcccatttcaccgctgaacagcacacccccttcaacgtcttcagtgcggccaaacggcgcgatgctgctactggccgtggcgttcgggttatcgccccagacttcctgctgcaacttcgcggaaaacagcgccagttgatggctgtgggtgcacaagaggctcatggcccaggcggtgctggcacaggcgccggcgagcaaggcgatgcagtcggcaaattgcggcagggagatttccatgccgccaaagggtttgggttgaaaggcacggtgcatgccgatgctcttgagcagcgcaatgttctcgtcgggaaccttgcggtcctgctcggcctgaaaggcattggcagcgatggtcggcagaatcgcccttgaaggtcttcgaggagcgggtttggctttttcatggacggcccctgcttattattgga

SEQ ID NO: 18856 - DNA, 684 bp, Homo Sapiens
  misc_feature (425)..(459): n is a, c, g, or t
ccacgcgtccgggagaaagtaggttgaatttatccagcatctgccatatgccagatgaggtacttttcatatatatttttttcatttaatcttcacagtaattctcaatcattattgccaactgagtaattggaaagtaagtacctcttgaataccttgtcatgattcccagtcaatctgtaatgttcatctaccttgtaaaccattttatatgctaacagacatttctctgtttaataccagtgagaaagctgacctttggtggtgtaacttgatctacataaagcacgaaacactgttagtggaaggcagagttggtctctgaattctttgaactcttaacgctcgtctagtaacagcatatttatttcctttctactctttgaggtatgagtgaggaagtttgaaatgcatagtaacaccannnnnnnnnnnnnnnnnnnnnnnnnnnnnnnnnnngaaaaattacaatttatagaaaaggtaaaacgtgtattttttttccccaggattcaccagttaacattttgcttaatctgctctgctcctctttcttcctcttttttttcctgaaatattttaagtaagtagcagacaatttgacacttatcatttagtatttcagcatgtctcctaagaatggagtcctacttctcataactacaatgccacctatcacacccc

SEQ ID NO: 18857 - DNA, 264 bp, Homo Sapiens
cacccaattccagcccggctgcgacttcaccagctggcgcgactgctccagcaccggcagctcgggctgggtgcaatggatgtaggtgcgcggccggccgttgccgatgggatgcttgagcgtcagcggcgtggtgtagctggccagcgggtgcggcgtcaggcggcgcttgacccaggcctcgtcggcgctgcccggcttgaagccccaggccgcgggcaacggctcggggatcggcacggccaggccgttggtggccttgga

SEQ ID NO: 18858 - DNA, 632 bp, Homo Sapiens
agaaaaattcgccaccacctcgcaaagccgcatgcccacgctggcgctggccgaatacctcggcatccagccgcgctaccacgacgccacgaacatgggcggcgcctcgttcatgaccatggttgcgcgcgcccaggccgcgatcgaggccggattgtgccaggtcgccgtgatcgcctacggcagcacccagcgcagcatggggcgggccaacgtcgccgcgcccgaccccaatccgcacgaggccccctaccggcccatgtacaccgccagctcctacgcgctggccgcctcgcgccacatgcaccagtacggcacgacccgccggcagcttgccgacatcgccgtcgccgcccgccaatgggcgctgctcaacccggtcgcctgggagaaaaagccgctcacggtggaagaggtcctggcctcgcccatgatcagcgagccgctcaccctgcgcgactgctgcctggtcaccgacggcggcggcgcgctcgtgctgaccctcgccgagcgcgcccgcgacctgcgccgcccgcccgtctacgcgctgggcgtgggcgaggcgctcgggcactattccatctccgccatgcccgacctgacgaccacggcggccgtggcgtccggcgccc

SEQ ID NO: 18859 - DNA, 912 bp, Homo Sapiens
cccctggtcgccgagatggcggtattcaatccgttcgatttcttcctggaaccctacgccgaaaaaatccctttcagctacgccgccgatgagcagcgcgagctggcgccgtacctggaaacattaccgctgaccccgcgattcgccgcgtatctggcgggtatcgaccgcacgccgttgccggcggtggattttctggtaggcctgaatcagcgcctggctgccgacatcggttacctgatccgcatggagccgggcgtacaaactccggaattcaccctggaaaacgcctccggttcctgccgggattcggcgtggttgctggtgcaactgctgcgcaacctgggcctggcggcgcgatttgtgtctggctatctgatccaactgaccgccgacgtcaaagccctcgacggcccgtccggcaccgaggtggatttcaccgacctgcatgcctggtgcgaagtgtatttgcccggcgccggttggatcggtctagatgccacctccggcttgttcgccggtgaagggcatatcccgttggcttgtagtcctgatccttcctcagcagcgcccatcagtggcctggtggaaccctgcgagtgcgaatttacccacgagatgtccgtggagcggatttgggaggccccacgggttaccaagccctacaccgaagagcagtggctggcgatccaggccctgggccggcagatcgacggtgacctgctcaaggacgacgtgcgcctgaccatgggcgggcgagccgaccttttgtctccatcgacgaccctgacggtgcggaatgggaacaccgccgctctcgggccggacaacgccgattgtctgccgagctgtttcagcgcatgcgcaagcactacgcgcccaaggggcctggtgcattccggcaagggcaag

SEQ ID NO: 18860 - DNA, 933 bp, Homo Sapiens
cattatgaagtccttgcggatcaccggcagcgagcacgccgcacgcgcttgctgcaggtacaggtcggaaccctggaagaagtcgatgtcagtcaacaccgagaggcacgtcgcaccgcccttttcatagctcttggcaatgtcttcaggaatgaagatctcgcgaatcacgcccttgctcggcgaagcctttttgatttcagcgataacggccggctgcttttccttggcctgcttgatcagcgcattggcaaacccgcgcggtgcatcagcggttttcgccaggccttccagttcagccaggctgacccgggcacggcgttcggcaacttcttctgccttgcgggccaggattttctccagaacggtcggaacactcatccttcattctccactttgaacaccgcagtaaacgcacccagttcttcgagcttttcgcgcgccagcccggtatgcaatgcatcatgagcgagggcaacaccctctttaagactgtaggcgtgatccgcggcatacagcgccgcaccggcattgagcacaatcatttctgcggctttctggccgttttcggtcttgcgacgccccagggcatcgcgaatcaattcaagggaggccgccgggctttccaccgccaggccgtgcaggctctggcttttcataccgaggtcttcaggttcgacccaatattcggtgacctggtcatccttcagctccgccacgaaggtcggtgcggccaggctgaactcgtcccaaccatccttggagtgcaccaccagcacatgcttgctgcccaggcgctgcaggacttcggccaacggccggcagagcgcctggctgaacacgcccaccacctgatgcttccaccggccgggattcgtaagcgggccgagcatgttgaacagggtgcgcaggccaagtctttgcgcggggcgg

SEQ ID NO: 18861 - DNA, 803 bp, Homo Sapiens
gggaatggggcgtcctaactcttttaaagggtgccctaaatttcatttactggcccttttttttaaaagggtgggactgagaaaaacctggcgttacccaactatatcgcgctggagaggctcgcaccgattggccttccccaaagatggccaacctgagtggcgaatgggacgccccctgtaggtgcgcattaaccggcgggggggtggtggttacgcgcaaggtgaccgctatacgtgccagcggctcgacgcccgctcatttgccttttcttctgttccttctcgccacagtccgctgcttttcccgtgaagtctctaaatttgggcctcccgttaaggtttcgatgttgtggctaacggacgctgcgaaccgctatacagtgaataggtgacggatacggaatgagcccacgactagagtagacgttcttcgcccttagagtcgaatacccctctaaaagtgtattctcgtctactgtggacaccgtcgtacatatctgcgactgtcctttgattataaggatttgccggattccgctgatggttaaaattaggacgatttaacaaaatggacgcgattgtatacatgtatggcgcctacaatttatgttgacacctcttcgaggaatgtggccgttatcgcgatttggttgtttttctgaataatctcgagtagtatccgctcctgggaaaataacccgatatggcgtaataatatggcaagggtaaggaaggagtacagcgttcgcgtgcccttaatccctctgttgcgcttatgccttcgtgtgtcgctcacacta

SEQ ID NO: 18862 - DNA, 706 bp, Homo Sapiens
caccaccgggatgccatcgatgaacgcccccagcgctacgccctggaagaacgtcgccgccagcgagccgccgatgaaggccttgtcccacaagtgacgcttgtcgtccttggccttgaagcggaattcaaacgccacgcctcgaaagatcagcccgatcagcatcagcatcagtggcaggtacagcgccgagagcaccaccgaataggccagcgggaacgcgccaaacaacgccgcaccgccgagtaccagccaggtttcgttgccgtcccacacgggggcgacggtgttcatcatcacgtcacggtcggtcttgcccgggatgaacgggaagagaatgccgatccccaggtcaaagccgtccatgaccacgtacatcatgatgccgaagatgatgatcacggcccagatcagcggaagatcaatacccatggctcagttccccttgttcaaggtgtcgccgtgatcggcatcggcactgtcatcagccgccgacaacggacgggccggtgtgcgtttctgcccagggccaccgtgagtaggctcggtgctttcgtgggtcacaggccctttgcgcaccaggcgcatcatgtagcccaggcccgcgccgaacagcgcgaaatacaccaccacaaacaacaccaacgtaatgctcatctgcgcaaagctgtggttggacgaggcgtccgccgtgcgcatcagcccg

SEQ ID NO: 18863 - DNA, 900 bp, Homo Sapiens
ccacttaaccctgcacgctcatccaccgcaatgaaaatggggttattttcatcgacggccaggtttccccagtcgtttgtcaccctaaagccgatactcatgaagaaactcccaatatcagaaaacacgacacgggagctgcggaccaggtcagtgtattaccggtgatcaccactaaaggcacaggtgaaagcccgacgttctgggcaggcatgagactaatatccagcttcaaacctgcgtagggcgacaggtccatactgcctgcaacattgctctgcgtgcggatcgactccattttccgaatggtcctgacagagctatcaaacgtgactcgctggcttgcgtccttgcaacgaatgatcggcgtcatgtcatcaactccccgatttcaatccgcaagttgccggcggggtcgtaccaatgctgatagctgtcagtcatcaccattcgagtgccaccgactaatccgttcatgaatattcccgcctgggggtcaatcacgaaccgaggtaggccgccggcgccaatctgtgagcttttgagctgcccatacacttggccaaaaccgatggtgatgtttgccacgtcgatggcttccgcgcgcagctgcccgcccacagtagtgactggtgtaaagccgtcattagccgtcagcttgccgatgctgatcgggccgatttgcgcctgctgaattgaagcttctttcaccagcagcgtgttgatatagaccttctcgccttccagcatgaaagggttgacgtagttcggaccttgcacgccgggtgtggcaacccagaagcgtttggccaaaatggcaaaatctgccacgggcgccgttgttataggcaccaaagccgctgatcagccgtttacatctaggcgaaggtgtactgagcc

SEQ ID NO: 18864 - DNA, 698 bp, Homo Sapiens
gggggggcccccctaaaggatccaagtttatttaccggtggatgcgacgttgaaccttttctatggtggccccaaaattcaattcgcgggccgtctttttccaccgtcgggaggggaaaaaccttggggtaacccaccttattcccctggtagcaaatcccctttacgccgggtggggtatgagcaaagaggcctccacgagtcgccctctccaaaatgtgcgcactctgaatgggcaatggaactccccctgtaggcgcgcattaaccccccccgtttttttattaccctcagtgtagcccctactcgtgtcagctctctatccccccttcttttgcctttcttctttcgtttctcaccaggttcgcagggtttccccttctagataataatcaggagctctgattgaggtctcgatgtaggtcttacggaccgccgactcacaactttgatgacggagacgtctcgtagtgggcgcacgccctgaaggcagttttctcccttgacgttggatgccctttttagagtggaccttgtcccactgacaaacatagccctatttgggtttactcttgtatttaaaggatttgcaatattcggctattgttaaaagaggcgtattaccaatatatgccgcatttttcaatattttctcttcacattattgggaatttctgggaatgggcgcgcacctattt

SEQ ID NO: 18865 - DNA, 912 bp, Homo Sapiens
ccacgcgtccgtgtctctagaccttgtttcagtttcttttaatgactccctttaggctctgcttcatggccaatgcaagattatggatcacctaaagaatagactaaaagtactattgtctagtaacttcaagtttgtaggttaactcactgtgaatcaaaagcttttaaaaatcttttgtgtggtcatagtttgtagtgtcttgtacctctcatctcagaagcaattgattcatagaaaaaattatttaggatttcagattaaagatgaagaactctttcaataagaaggaactgatttggttggattatttgtttctttcacccctgagttttcatggaaatcaggtttaaaaggttagaagcagttggttttcagcattgggaaagcttatctgatcaggcatgcgaagtggcctatgtcggatttctgagctaggaaaggctaggggaggttgaggagattattgtacttgtaattcctgagcatggttgagacacaaggagaggattgtggaaattgtttttaaaaaattgttgaagttaatgcattcttgggtggatttgcaaaacagaacaaaacaaaaagttgttgaagttagttacactggtctaacaacgtatacttaccacccccatttgggctggaggaatggatctaataataatataggtgtttgtgatctaatttgaatcatgtaatcatttatcatttctgggttagatggtaaggattttctgtttcacagatttttagactgggaattgtgctattataaaataatattttacattaaataatgctatctaggttgtaatcaccttaatagacatgatttatttgggccacaaatgaactctggtaagaatggagggctggttacattattttagttttacagatgaaataatc

SEQ ID NO: 18866 - DNA, 632 bp, Homo Sapiens
cacccacgcgtccgccagaaactctcatggcaagaagtatgggagtttatgtggtgaggaagggctgagtgttctctgatgtcagtcatgctgaagtttgttttcttttgtcctggttaaggggtggtgaaccaaactattgcattttatttttccattcttaaagtctctgtatgtgaggaccccatggttgccccaagacaatattctttgacagaacaaataaatgcatcagtggcatttacatttgagcaagaggtgagatactggatttgatggtagaatattaacatatgtggctttttgagataggatcgagctttgtaaagaattggtaagtcatgatgatgggtgtggtagacttaaatgtttaaaaatgagttaatttttctaattcttagagaattgttaaaataaagatgcttggtatttcctttagtcttcacctacaagaaatttagtattgctctccacttagaaaacctatcttgattcatagacttaattatgccatcttggcctatttctgagagttcgagggccctctgtttcttgtctctttcttttctgtgtagaaaccctgaaggggtccataaggatcatgacatctctcaataagttgcggaaagtaa

SEQ ID NO: 18867 - DNA, 353 bp, Homo Sapiens
caccgccgcaagccgctcggccagttgcgccaactggtcacgcaactgctgcggttgtacccggctgatccaggcgttgtcctcggcgggaagcgtgcccgccagggtcaacaggatgtcgggggtcagcgcctggctgcggtaagcggcctgccattcgccaagggtccagccaagttgttcgttgcgcattgaggattccatcttgtatccaagtttggatttcttttagcaatcgctgggccaatcagctgcaagccaatgaatacgtggcgctggcagaaaaccggcggattggccgccctcaaccgtgctccgtgatgaagcagcaatgcgccaaaaaaagacattca

SEQ ID NO: 18868 - DNA, 215 bp, Homo Sapiens
cacatccccgcgaccctgcggaaaccccagggcgccgaggtctccattttcgtggcccaggacctgaacttcgccggtgtctatcggctgagcgcaaggtgatggacgacaccgctgtcctggaacactacctcgcgccgctgcggcccctgctcgcgccagaagacgtgaccgaactggtgatcaaccgccccggcgaggtcgggatcgaacag

SEQ ID NO: 18869 - DNA, 745 bp, Homo Sapiens
gggcggcctccctaaaggagcaagcttcgctttcgcttgtatggaaggtcacctttattcaattggggggccgtagttttttactgggcggcggtttaaaccctgggggttgggaaaatcttggccgtgacccatatcacgctttggcgaactggagcacaatcccaaagggcgcgacaaatcaaaatggccaaaacttgcacaccttaaagggagatggccaccctcattgtaaagggacattaggcttgtgaggtgtgtttgttccgcccgctggatggttaccttggggggcccgttcccttgctcctctccctatcctcctctccttcgcgtcacgcttgtccgttttcccctaaagcctgcattcccttgccgcacctcgagatcccgagtcaccgttatgcgcacatctaccgctaaaagttgcatcagcgcgaaagatctcgaatgggcgatggtccgatatacggccttgccctgagagactggttatccccatcgatatagaagactgcttctcaagcgggactactgtcccgctagatggactgatccttagagtactggcgactttgcgcatacaggtaattggtgaattacggacctagtaaaaaatgacttgtgtaataaactataactaaagttgaaattaagtgccgctcattgtgacggcccctgatcgctaatgttcagtaccccaaatgctatctgctagaactctagacatgatccgtcagagcat

SEQ ID NO: 18870 - DNA, 924 bp, Homo Sapiens
ccatagttggccagcaatcgcaccagggcctggccgcccgtcaaggttttgctttgcatcgtcatctccttcacacctgggcgagacggatcaatgcatcgaccgccgtggcgccccgggcattgaccagcaatgggtttacatcgagttccagcaactgcccggcgttggcgcaggcgtagtcggccaccgcacgaatcgccgccaccagcgcctccatgtcggccacttcccgcccgcgaaagccttgcagcaatgcggcgctgcgcaggctgagcaaggcattgcggatcgcatcgtcggtggtcggcagcaacaggctgcgactgtccttaagcaattccaccaggattccaccggcaccgatcaccagtgccaggccgaaatcgttttcgcgtttgatgcccacaatcagctcggccaacggcggcgtggccatggattccaacagcaggtgatcgaacggtacatctggcgcatagacagcaatccgctcacgcatatgggccagggcggcggtcaaggctaagccgtcctgcaagttgagcgccaccgcgcccgcttcggttttatgcggtagatcggcactgacggccttgagtaccagcgggtagcccagcactttggcatcggcaatggcccgtgctggcgtgctcaagacaccggccggcgtggtcaggccgaaagcacgcaaagcctgcttggaatcccactcgttaagcgactgtccgagtgcttccagcgcttgcgggcacagcgggcaccagtaccgattcgccacgggccagcagcgcccggcgattgttttggtagtcggcaatccggccccaggccgccagcgcgtcttccacgccctgcaacgccgcaacactttgtgcatgcaggcgctcgcgagcgtgagcccggcaccattcggggaatgcc

SEQ ID NO: 18871 - DNA, 648 bp, Homo Sapiens
  misc_feature (114)..(206): n is a, c, g, or t
cccaatagacccgcacagatgcaccctccccaggttaccggttctttaaacgcggcaggtgtgatggttaagggagcgggactgtaacctttgctcagcgccctaacggcgcgnnnnnnnnnnnnnnnnnnnnnnnnnnnnnnnnnnnnnnnnnnnnnnnnnnnnnnnnnnnnnnnnnnnnnnnnnnnnnnnnnnnnnnnnnnnnntgttcacaggacctcgaaccagaggacttgattaggtgtatgtcttaggtgctgtgccatcctctgacacagagtttttctgctggtaagttggaatctaggttcttatatggcaatctcggtcattcggtaatatgcttgagccaatttgatctatactgtagtttataaggagttttcagaatcgagctatttgtgaaatatatttgattttacaaattttaggcatattttcataaatgtacagctgaactatatgtagattttggggaatgttgagcgaagtctcctattgtatttttcgaatactctctaattattatcgcgctaagaacaaatcacttattatatgtattatgaatattagaaaggacggatgtgaggtttaactttttctgtgtttccttttctcatttattgagatggtatgcgtcatcgattt

SEQ ID NO: 18872 - DNA, 285 bp, Homo Sapiens
caataaacggtttaccctcaaagagcgcctgctgagcagcgagctgctgtgtcatgactgcctgatggccattcactcccgaccaccaatccgggtagatatcgcctgcaagcacttcgacaatgtcgctggcccaagaagtaaaatccgagaccatactggcgccggcctgaacgaacgcggaatagcccacgaacccccagggatcacagcaatatgctgcagacgctcggtagaccggcagtgctgctatccccagagctaaagctgttgcagcaatccagc

SEQ ID NO: 18873 - DNA, 243 bp, Homo Sapiens
  misc_feature (119)..(144): n is a, c, g, or t
  misc_feature (168)..(176): n is a, c, g, or t
cgaggcttccccgagcttgcctcttctttctggccacttaaattccggggaattcctttctttgggcctcgttttttttggcactggttgggaaaaccttggcgttcctgcccttaatnnnnnnnnnnnnnnnnnnnnnnnnnnccactgggggaggaccgataaggnnnnnnnnnattgcccctctctacatggcttgggccaggggggccgaggggagccgcccccctggggcgctttggt

SEQ ID NO: 18874 - DNA, 427 bp, Homo Sapiens
tgttccatgctttttggcggctctgtcggccgcggcggcggttcctgcttcgacgccatcctggcacatccgcccggcaccgtggccggccatatccgcctgaccgaacagggcgaggtcatccagagcaattacaaggatgcctaggtcggccgctggcacctggagctgctggtctccgccacgctcgaatcttgcctggctcctcgcgccgaggccaccatctcggaagactcgcacatggcgcatcatggcccggccatgtcgttcatgtccgagaccgcgcagcgcagctaccggggcctggtctattatttttcgcgcttctccgaatacttcttcgtctccaccccgatcgccgagatcgtcggcctgatcatcggctcgcgcccggcctcgcgcaaagaagggccagcgcatctaatac

SEQ ID NO: 18875 - DNA, 668 bp, Homo Sapiens
cccttaccctacaccgtgcaggcgctgaccaatgccatggtgcgcgccgacaagtggatccagaaggccggccccgacgagatcgccaaggtcgtgccggagacctacctgctgggcgacccggcggtgtacaaggccgccatcggcaagagcctcgaaggcctgtcgcccgacggcatgatccccgaggacggcgccgccaccgcgctcaaggccctggccgcgtatcaagcggatttcgacggcgccaagatcgacccgtccaaggtctggaccaacgatttcgcccgccgcgccaacgagaagtaccccaatggctgacgccgcgctatcgctggaaaacatctgctgcacttttgtctcccgcgacgaccgctcgcagcgctacaccgccgtcagcgacaccagcctggccatcgcgccgggcgagttcgtgtcggtggtgggccccacgggctgcggcaagtccaccctgctcaacgtcagcgccggcctgctggcgccgtcgtcgggccaagtaaaggtcttcggccagccgctgtcgggcatcaattcgcgcgccggctacatgttccagggcgaggcgctcctgccctggcgcagcgccctcgacaacgtggtggccgggctggatttcgccggcgtgccgcgcgccgaggcgctcgagc

SEQ ID NO: 18876 - DNA, 353 bp, Homo Sapiens
  misc_feature (59)..(175): n is a, c, g, or t
ccacgcgtccggtatactcgatttcatgtgtatgtcgcagtaaacaaaaccaaacctcnnnnnnnnnnnnnnnnnnnnnnnnnnnnnnnnnnnnnnnnnnnnnnnnnnnnnnnnnnnnnnnnnnnnnnnnnnnnnnnnnnnnnnnnnnnnnnnnnnnnnnnnnnnnnnnnnnnnngggggggccccccaaaagaacccaacctaaggtacccgggcgggcaaagccaaaactcttctaaagggcccccaaatttaatttcccgggccggcttttaaaaacgccgggaggggaaaaacccgggcgttccccaattaaaccccctgggcacacacccccttttccccaggggggg

SEQ ID NO: 18877 - DNA, 764 bp, Homo Sapiens
ccccaaaacgtccgcaaattcttgttttgtctccacacccagaaggcaagttttgtcagagctggggaataatttcagatatttgacatcttgattataaagggcttctgaacatctgtgtttactgcctttggaatacaaacaggtgcaactgagggactagctacactaccaccatttatctgtccaaggcaagagtatcaccaaggcctttgctccagccttacttggcatctttgcgcaagatagtcagagcaaacaatagtaatggacacttctcacacctggccaaggctgttggtacccacgaaatgacagcaaagatgagaggaaactgaattgcaagagcaatatgaaaccccaaccaagaggagtactctgcagttctttggctttggtatagagtggccactttctctaggacctggaagaagagtttgatggctaagaacgattgtgatcctaggtcttctttgtacgcatctccatatttaggccagatctgcctcctgggaagggaaggggccaatgtcagcctccaggtgatttctttaatctgacattacaaagagaccaacagactgccaattctaccacattcccctggtgggtactcgactatgtagttttctctatgcttctggtcaactctgacacatcttggaattcttgtaataagaaaagaaatttttatacttttttctccttccctgagtcctgtggacccacccctgaaatactaaaaacaagggcaataattaaag

SEQ ID NO: 18878 - DNA, 908 bp, Homo Sapiens
  misc_feature (301)..(317): n is a, c, g, or t
ccacgcgtccgagacgttatttcacagaagctgaaaaagagaccttagataacatttgtttggttagccacacggttgagcacaaaacaatgtgtagatgtgttgaagattagggcaggaggctcaacttctcggtgacctttttttgcttcacaacaagccaattatagttgaatcattttctctcttagctagttgttactacaaactttataagaaaaacaactagacaccttctagttttaattaataccaactcctttagagttagagactttttaaaaagaatcattgagcatannnnnnnnnnnnnnnnnaagaatttacactctctaggtcttctatttttcctgtttatttccttaaacagaaataaattcaagcatagttttatgttttattagaaataagccactgcagttgctagaactgacatgctttcattttcaaggggttaacttttattgcatggcatagattattagtaatatcctgcattgtatacttttccaaaaagggttggactcctaaggattagaatccttataagcttgagggaaagctgaaactaatttgaacagtaatagaagggattatttttaatttcatagttaacactttacaatggattagatttattacctagtataatccgtagcagatcagatcaaagtttactgttttaccaatatattcatttgaaaaatacagtggaggaaaagacactttagatggtagttttatggtgcttttctctgctgtacaaagtgctttgtcatcatgaaatgttaaccctatgctactttttctgcatgcttcttaatgtcatcttaatgcttaattgtcctacctgtaatattttgtattaaattttttaagagttccttgtaattcttaccattaaaata

SEQ ID NO: 18879 - DNA, 735 bp, Homo Sapiens
caggacgaggatcaggccggggtcgcatcccgcttgattccacgctggttgcgcaactggcgcactcccgatgtgttgctgcggctggtgagcccgattgtgttgttgctgctgtgggaactggcctctgagctgggctttattccggtccggatcatcgccgcgccgtcgcagattggcggcaccttgtgggcgatgattgtttccggtgagttgggcaagcacctgctggtgtcgctgcaacgggcgctgctgggcttgagcatcggcgtcagtatcggcgtggtggctgcgctgatcaccggcctgtccaagcgtggtgaggtgatcctcgactcaccgatgcaaatgctgcgcaccattccttccctggcgctggtgccgttgttcatcctctggttcggcatcggcgagttcaccaagatcgcgctgatcgtcaccggcaccacgtttccggtgtacctcaacctgttcgccggcatccgcaacatcgaccccaaattgatcgaggctgccaacaccctcggccttaaccgccgcgagctgatctggcatgtgatcctgccgggctcgctgccttcgttttttgtcggcctgcgctattccctgggcatctcctggctggccctggtgttcgtcgagcaaatcaacaccaccgccggtatcggctacctggccagtgatgcgcgggacttcatgcgcaccgacgtgatcgtgatctgcctgttgatctac

SEQ ID NO: 18880 - DNA, 657 bp, Homo Sapiens
ctcggcgtgcaggccgtcgaatacgacgccatctacttcttccgcgtcggcagcgaaggcttcatcaagcggctgcaacgcattcccaccgccactggcctggtggtcagggccaaatccgagaacaccaagtacgacgcctgggacatcaccgaaggcatggatttcgaggtcttcggccgcgtgctgaaggtctggcgcagcgaggacttctaacccccatggcaaccccttcccgcctgtcggcccccgaaaaaaccatcctggtctatggcgcgctcggcgcgctgctggccttggcgctgcatgccgcgctgctgaaccgcgtgtggccatggcacaacctgttcgccaccctgttcgcgatccagtggatctggctggtgccgctggccggcgccatgctggccggcatgcgcgcgggcaggcgctggctgctggcgctggcggcctacggcctggcgctgcccgcgctgcacgcgtacgggctggtcgcgctgctgggctcgcagcccctgccctataccgacagcggctcccggtccctggcgacgctgatcaccgccgccagcggcttcatgctgctgccgctgatccaggcgctcgaaccgtccccggcccggctgggactatcccgccgtgttccgcgcggcctgg

SEQ ID NO: 18881 - DNA, 284 bp, Homo Sapiens
ggttcaaacatggacacatcaaccttcccggtctatcctttgataattagagattggcgatccggctaattggtaaaaatgagctgattaccaaattaccgcgatttaacaataatacgctcacaattagtgcacttccagaatgtgcgcgaacctattgtaattttcaatcactcaaatgatcccgtactgaacataactgaatattgctcatatatggaagaaagtagatatcactttcgtgcgctaatccctttgcgactttgctacgttttgtccccaaa

SEQ ID NO: 18882 - DNA, 956 bp, Homo Sapiens
ccacgcgtccgcatcgaggttttttcctatttcccccgccccctgcccaattgctagaagtatgatagtgaaccaatttaaacagaatctttgtggtcacatgcaaatatttttataaaacagttgttttataaaacaactatttagatgtggaattgctgaaataggctgtattcgtagttgagctttggtaagttgtagtaagatcctgctaaaccccgtaagtagagttcaaaaaattggaaatgcttaaatgtgcaatcataatattgaaaaataatactttttaataagtctgtggagctacaaaaaaacttacaaaagtaataatatgacacattgtgcaaaactgactgcataatgattcaaaaagccccaaatgataacaatacattcacttcttaaactcctctgagaattagggttggccaaatcattggagacatttgccaatcacattcagattaatttctggttttcctatttggtttactgttagacagctttcttccaaaaagtcttaattatttatccttacttatatccttgccagcacttggtgttactgtacttaagttttggctaggccaatgggcaaaaatggtatcttcttgtttgaatttacatgctcctgatttcagccatgcatggcatctttttcaatatttattgcccatttgaatctcttctgtaaatttcctgtttcacatattttctgtgtttttctattgagttatttttcttagtgatttatgttaggtatttatttgtatttttgatatctaggccagttagcttagtagacatcttgaaatattttggttgtgcacccctacaaataaaaaagtttttgagtatataccctcaagtacgaacattatacatgtatttatttaaaaagtatatacatgtaatgctgtcaatctgtgtcttacatattagtaaagctatttttt

SEQ ID NO: 18883 - DNA, 908 bp, Homo Sapiens
ccaaacgtccggcttaggatatggttctgtgcatagtaggtactcagtaaatgttcctagaatcataaaatcctcaacagatatgttactgagcatctgcttttcatgataagcactctatcagatccttgggatgcaaaggtaaataagacaaatcccttttacccaaagagctcaccatcaagttgggggagggaaagtggaattcaaaacatgttaataaatcatcatagtactgtgagataagtgcaattaagaagctagttataaagtataggggaaatagaggagtaatcatgtctgaaaagtcaggaaagtcttcctagaggtaatttttaagctgattgtttcagaattagtagaagcttgccagatggaaaagtccaggcaaagtgtaacatgaatgggaaaggccacagtctagaaatggcagagtgtgttcctagtttgtttgtttgtttgtttgtacctgccttgttccaggaaggatttaatgtggtttatattccagtcctttaatgctggaagggctgagatgagactgaaagatgggcaggaagtatatcatcacaagctttgtgtttgatgttaatgtgtatgatttttatattatgggaaataagctcttagaggagtgatataatcaggtttgtgttttagaaatctgtgtaatgaatgaatgaagaaagaaattgaagaatcatgtaacatatgtgatcgcatttttgtaaaagaccatgtgtgttatatgtgtttatatatatacttgtgtatgcaaaggtaaaatctgaaagatatatgctactgttcacaatgataccccccaggattggatggaggggaggggcttctgtgtttgttatgtatgctggtggaaattgtgctttaatccataatggttgattttt

SEQ ID NO: 18884 - DNA, 313 bp, Homo Sapiens
tcccgggtccaccgatgagcctgcaaggcctggggcgccatgctttcctgggagatccagtaggcggcgctgataaaggtcaggttggccaccagcaagacggtggtcaacaagaccagcagggccgccagcagtttttgcccaaccggtagattttcgagacgctggcgcagtggcatcaaggttttcgctgcaaaggaacaagcaggcagggtagcgcgtgcttcagtcgctgggcaatccgcgtgcagacagttgctgtaccaggcggacctgaagttgttgcaggtgcggcaaggtcagttggtgacgt

SEQ ID NO: 18885 - DNA, 403 bp, Homo Sapiens
ggtgtgaagaaaatcggtgcccggcatgccccaaaaaagccgggccggtcggaacgccggtcgggctgccgtccgccgtggccaccttgcccagcgattccatttccagctgctgcgcccagggcaccacgtggaagaggcgcgaatcgtacggcgtgatgaccagcgagtcgaaccccagcacgctacggttgacgacgccggccagggccagttgcagcggtgcgttctcggccagcggcgcatggtggaagtgctcgtccatggcggcggcgccggccagcagctggtcgaaggtgtcgttgcccttcgccagcgcgaccggcaggccgatggccgaccagagcgaataccggccgccgacccagtcccagatctggaagatgtggtccggcgagatgcc

SEQ ID NO: 18886 - DNA, 683 bp, Homo Sapiens
ttgccggagccggaagcacccagcacgccgagcacttcacccgccgtcaggttgaagctgacctgatgcaaggtcggcacacgccgccccggcgggcccgcgctgacctgctcgaaactgacattgcccttgggcgccggcaaggccatctgctcgccctggggcgggaattcgcgcatcaggttatccaggcgctgataagccagcttggccgaactccattgcttccacacggcgatcaactggtcgatagggctcaacacccggcccatcaggatcgaaccggcgatcatcattcctgccgtcatgtcgcccttgatcaccagcaacgcccccaggcccagcaccaacgattgcaggcacaggcgcagggatttgctcagggaactgatgatcgagccggtgtcgctggccttgttctgcaaacccagaaactgcgaatgcaccttgaaccagcgcttgcgcaatgcgccgagcatgcccatggcctggatggtttcggcattgtgcaggtggctggtggccaactgggtggattgctgggaaaacccgctggcttcacccaggggctttttggtcaggtattcgttgaggcacgccagggcaatcagcagcactgcaccggcgctggcccagacacccagcccagacgttgaacaggaaggatcacaaacatgtagatc

SEQ ID NO: 18887 - DNA, 769 bp, Homo Sapiens
catcttcaatggagccttggtcaaccgctggccgtcctgccagatccagtgcgtgtcgatggcggtgatttcccccggagccgcggcagccacctgggtgaacatcgccagggaaatatcgaagtgattgttggaatgcgagccccaggtcaggccccactcgtggcacatctgcgccacgcgcaccgagccttgcatggtccagaagtgtggatcggccagtgggatgtccacggactgcaactggatcgcgtgacccatttcccgccagtcggtggcgatcatattggtggcggtcggcagcccggtggcgcggcggaattcggccatgacttcacgcccggagtaaccgttttccgcaccgcaagggtcttcggcgtaggccagtacgtggtgctggtcgcggcacagggcgatggcttctttcagtgaccaggcgccattggggtccagggtgatgcgcgcatcggggaagcgctcggccagcgccgtgaccgcttcgatttcttcggcgccgcgcagtacgccgcccttgagcttgaagtcattgaaaaccgtattgcgccttggctgcctctgccagacgcacgatggcttcgggggtcatggcctgttcgtgacgcaggcggaaacagtcttcggcatggtcttcactgcgataggccaggtcggttgctggcgatcaccgatgtaaacaggtagccgagcatcttcaccgcgtcgcgttgctggccttcgccgaaaagggctgccaccgggacttcaagga

SEQ ID NO: 18888 - DNA, 932 bp, Homo Sapiens
ccctttaaaggtccgaaaaaatgcatggatgtctgagccaggaagacttgtattacaatgatggctttgacaagtgacaagtgatcaaagtgtgccttgatcactctctgatctccatcctgatgatggagatagcaatgtttacttagtaggagtattataaaggtagaggccaagtggttagaatcatactcagtaccagacttgtaagaggcactcaagaagtggaaactattagtattaaatattagtttggagctcaggggagaaattgtctggaattagactctcaggagttgtgaatatctgtggaaacttgggcaatttacaatttcccgggcagatggtatagagaaagagacaaggacccaagacagaacatgcacaattaatttaaattttaaatgacacttaacatttcaccacatttcaccggtttaaattcaactaatttagattttatgatattgcaggcaaaactgggttgcaacttacttttgtgctatttatgagaaaattaatagggagaatgtgattcagagttcctaatgtggggatgtttaacctacttaaacaagtaaactttttaacgttttgtgaggatcaatttagcaggatccatttatgtagagaccatgtgctacttgaaatgatgtagagatgtgaaattagaattttggagtaaaaaaagaatatagatgattagcacagccccctcattttaacgatgagaaaaatagaggaataaacagggtcaactgatttatgcaagcccacacagaataagccacaaaacggagttgagaagccaggcccacatgactcctgaaaaggttctttggttgggctgggcatgaattcttgcattaaaagtcatcaacattttttttctaggccacacctggttagccattagcgtttttgcaaattct

SEQ ID NO: 18889 - DNA, 308 bp, Homo Sapiens
ccccacgcgtccggattattattttacatctttaaagagaatttttatttaggaaattaacattcagcctaatgttatatctaacatggtgtccttttgtacaattgtatcaaataaagaatagaaactatattatggtttctagtgatgccctaaccactagtgtttcatttttctggtgttccctcttacgtgcacaccccttgctcccctttgggttgacttataatctgacttttgtgacagatgttaggaggtggagcaaaggaatttcagaccaatcagttaagagactgctgtggggtaag

SEQ ID NO: 18890 - DNA, 312 bp, Homo Sapiens
aagttgactcttgttcaacactgaaacactactccaccttatctcgacttactccttgtaattataaagattttgtcgtattcggcaatttgttaaaatgatctgattattcaaatttatcgcgattgtactcatattacgcgcatgatgtttagtgcctctccctgaatgatacgcgaccctaattttaattctcacactatcaaattgtttccccagaggaaataccgagcatagtgtatattattagaaaggagattgagttccatatccgtgtgccctattccttttgggcattttggctcttgttgt

SEQ ID NO: 18891 - DNA, 637 bp, Homo Sapiens
cctaaaaaaagtccccttcgatgtcgtcacggaccgaggccaggtcttgcctggttggccatgatttcctggcccttctgcgacagcaggtagtccatccacagcttggcggcgttgcggttcttggccttcttgctgatgaacgccacgcgcgacagcaccagcgcgtagtcggtcgggtaggccacgcccagcgacgggtcggtcttggcgcgggtctcggcgtacgagcccaggatgttgtagccgaccaggttctcgcccgacgacacgcgttccatcatggtgccggtggacgactgcacgatcaggccgcccttggcgatgtccttgagcgtctcgaagtacttgggatcgttggccttgtcctgcacggccagcatgaagcccacggccgacttctcgatgtcgtaggtggtgaccttgttcttgaacttgtccggctggctggcgatcagcttggccagggcgccgtgcgtggtcggcacttcgttggccgggatcaggcgcttgttgtagatgaacaccgccggttcgtaggtggtgccgtaggccgaatccttccacaccgcccaggccggcagcttggcgatctcgggcgacttgtactgcagcgcgtaatctgtggccagcttga

SEQ ID NO: 18892 - DNA, 230 bp, Homo Sapiens
tctcacgtggaggcgggcaattttcgcccaccggaatgatcaccaagacacacaaagtagaccttgggctcccatagaagaaaaagaagaagaaagtggtcaaagaaccagagactcgatactcagttttaaacaatgatgattactttgctgatgtttctcctttaagagctacatccccctctaagagtgtggcccatgggcaggcacctgagatgcctctagtgaag

SEQ ID NO: 18893 - DNA, 524 bp, Homo Sapiens
ccacgcgtccgtacactagtagtagcggaatgaatgggtacaatcttgatacctggtatcttagtctgttttctgttgcttataacagaatatctaaaactgagcaatttataaagaaaagaagtgtatttcttactcttatggaggctgagaagtccaaggtcaaggggctgtatctggtgagagccttcttgctggtgggaactctcttcagcgtcccaaggcagagcacagcaccacatggtgagggggctgaacgtgctaatgtgctagctcaggtctctcttcctcttcttataaagccaccagctcccctcccacagtaacccattaatccacgaatttatgaatgaaagaacccatctgtgagaaagcagagccctcattatccaatcacctcttaaagaccccacctcccaatactgccacactgggaattaagtttcaacaagagttttggagggtacaaatattcaaaccatagcacctatgtacaacaattaagaacattcggtggggtgcgg

SEQ ID NO: 18894 - DNA, 849 bp, Homo Sapiens
accggtccggaattcccgggtcgcctttaaaaacccgtgctcttgagcgcttgggcgacactttcggctagctgcaaatggtcttcgaccagaaggacacgcatgggtttttacctcgttcgggggtggtcggcgccacgctttgccggggagtttacaggcgcaacctgtgctgtgaagcccgaaaacattgaaagacgactgaaaggttagtgaaagcttcgccctttagcatccagccacggtgggtttcgcctgccgagctatttcacccatagcgcccgaaaaacgcctcgaagcgttttcgccaaaataagaacaataaacggagtacacccacgatgctgcgcacacagccgcctgctcgttcttctcgtttcacccagaccgcccttgccagtgctgccgcctttgccggcttttcgcctgtaggccaagccgcctttttcgaggacagcaccgccaccctcgaaacccgcaacatgtacttcaatcgcgactttcgcgatggcaccagcgcacaacaatccaagcgcgacgagtgggcccagggcttcatgctcaacctgcaatcgggctacaccgacggcaccgtcggcttcggcgtggatgccctgggcatgctcggggtcaagctcgactccagccccgaccgcaccggcaccggcctgctgcccacccacgatgacggccgcgccgccaacgaatattccaaaactcggcctgaccggcaaagtgaagacgctccgccaccgagctgaagatcggcgcactgatagcccgagttgccgatccctcaagcccaacggaggggcgcatcctgccgcaaaacgtttgaaaggcggcctg

SEQ ID NO: 18895 - DNA, 228 bp, Homo Sapiens
ccatttaaaagtccggactagtcctaacagttctttttaaaagtccatttgaaacttaaatattggaaaaggtcactgtttctgctttatggcactgggttaccttttccaataaaacacaaacagtgacctttgtaatgactaaaatttcaaccgagtatagtttcatacctatttcttgctttctcttaacaaagaatttttgtgttttagaaacatctctttcac

SEQ ID NO: 18896 - DNA, 282 bp, Homo Sapiens
ggtccggaattcccgggtcgcctataaacaggcctcgacccgcaagccgtccgcggcggtgccggtgaaggtgcattccgacacgccgcgatcgcccgccacccattggcggccgttgttccattgcgcatcgggaaagttcttccaggccgcctcgaaggccgcgcgcaccgcctcgcggccactgtgccgggcgccccaacgctcggggccgcccaccgtttcaaagaaacagtcctcgctcatgaaggacatcagggcgtcgatatcgtggcggttcca

SEQ ID NO: 18897 - DNA, 511 bp, Homo Sapiens
ccacaacgtccggagaagggtcccagaggtggttagaagtgaagctaaataaaacaaatgggtctgatcatgaaagatatgtttagcctttaaatttttaaaagttgtggtaaaatatatacaacatttatcgtcttaaccatttttagtgggttaagtgttaaatatattcacattatcgtgcaatccaatatctggaactgttttatctcacaatactgaaactctatgtctgttaaataacaattccccatctcctcctgccctagccccagggaagtatggtgactatatatcatcaaataaaaaatgtcaacaaagagacagaaattgttagaaagaaccaagtgaaagttttgaaattgaaaagtgaaataagagtgattagaaaatcactagatgacctcaatagtaggttttagcattaaagaaataattagtgaatttgaggataaatgattagaaatgaggccatgtgaataggagagagaaaaaacaatgaaaacttgtt

SEQ ID NO: 18898 - DNA, 840 bp, Homo Sapiens
ccaagcgtccgccgagccggggccatggcacctgcaaggtgtttctcagcaagattgaggaccgtgtttcagggcgtggggcattgggctttgtccacatgggctggcctgaagcccagccggctactgccacagcgggcttctcccaggctgctctcggtcggccgtgcggacctcgccaagcatcaggaactcccggggaagaagctgctctctgagaaaaagctgaaaaggtactttgtggactatcggagagtgcttgtctgtggaggaaacggaggcgctggggcaagctgcttccacagtgagccccgcaaggagtttggaggccctgatggaggggacggaggcaacggtggacacgtcattctgagagttgaccagcaagtcaagtccctgtcgtcggtcctgtcgcggtaccagggtttcagtggagaagatggagggagtaaaaactgcttcgggcgcagtggcgccgtcctctacatccgggtccccgtgggcacgctggtgaaggagggaggcagagttgtggccgacctgtcttgcgtgggagatgagtacattgccgcgctgggcggggcaggagggaaaggcaaccgcttcttcctggccaacaacaaccgtgcccctgtgacctgtacccctggacagccaggacagcagcgagttctccacctggagctcaagacggtggcccacgccggaatggtgggattccccaacgcccgggaagtcctcactgctccgggccatttcaacgccagacccgccgtggcttcctacccgttcaccaccctgaagccccacgtcgggatcgtccactacgaaagcccccta

SEQ ID NO: 18899 - DNA, 847 bp, Homo Sapiens
cctgaaactcgacttgagctcggttgaatagcaccgtctgccggcaagccgccgcgagttccctgatcgggccttggagctcagcaagccgttgactgatcgcttccgggctatcgtacccatcgagagcgtccatcagctcaatgaactggtcgtcgatcgatttgcgtccgatctcggcgtcccattcggccacccgctcggagcaacaactgcagacgccctcgccacggctgtaatccacccgcagccagtaacagggcccatcctctgaaacgcaggcgcacatatcagtgcacccgcaaccgatacactcagcaatcatgggcaccccctcagctcatcttcacaggcacggttaaagccggcctgccactcttccgccaactttgttccagccggatacgggttatcgtccagattctttccgtcacgaaacgcctggttgcccagctgccaggcagcgcctgcagcgggctgctcagtagtcattcaacgtgccctcggcctgggtctgctcgatcaaccgcacgagctcggtttcaccctgaacgcgaacaacctccgcgagatgtcgctcagcagcggagatcaagcggcgcttcgctttcatgtgcagcaggccgcactgccgacctgtcttgaactcggaaatgacgtaggcgacgtgctccagaggcgcaacagggggatgaatggcgaaacggaacgaccgccctgctatcgggtagtcgaatgcgcgaacccacgcgaacttcactgaagatgagcccgcgcccgttcgagcggggtacaagcatggtcgcttgaactgactttcccgaccacgacagcctccgaaggctta

SEQ ID NO: 18900 - DNA, 722 bp, Homo Sapiens
ccttaaacggccagttggcgcaggtgatccgggtcgctgtagtcagcccgcaggtgttcacccagcgcagccgcgcaggcgtccggcgccgggtccaggaaagcgaagttcatccccagcggcgtacccgccagggccagcatgcggcccagttggccgccaccgattacaccgattttcatcgtcaacaacctcaggcaatgcgtgggtctggattgtccaggacgctgtctgtctgttcagcacggaattttttcagcaccgcgtggaactgcgggtgcttggcgccgaggatgctggcggacagcaaggctgcgttgatcgcgccggccttgccgatcgcaagggtggccaccggaataccggcgggcatctgcacgatggacaacagcgaatccacgcccgagagcatcgacgactgcaccggaacgcccagtactggcaggtgagtcttggccgcacacatgcctggcaggtgagctgcaccgccggcaccggcgataatcacctcgatgccacgggattctgcttcatcggcatactggaacagcaaatccggagtgcggtgggcggaaaccaccttcacttcgtagggaatgccgagtttttccagcatatcggcggtgtggctaagggtggaccaatcgggacttggagcccatgatcacgccaaccaatgcactcatcgtcgtgcctcttctctctgaggcgcccgcaggcgc

SEQ ID NO: 18901 - DNA, 492 bp, Homo Sapiens
ccataaaaagtccgagaatcacttgtgtgccaggcacacaagttgtatgggggagatagacagatgaataagcaaagaccaccagagagctgtatcctagagcttggcatttctagtagctttttccagtgcaaacattctcaaatctgtactagtttccattgctgtactgaggtgtttggttgccacaattaagcaagacagctttttcccaatttgcttgaaaaaaatactgtaattagtctctccctttcataaaattttcttaagaaattgctacttctgataatactgacagaaggtaacataataaatactaaactaatactaatggaaaaacttagaactaaccatgtttaacttgagggctttaaaaatggttacttgtgcttaaactctgatttttatattgtacatttatatatgctatttgtgtatatttgaatatatgtatgtacacataggcatttttttggttagtaaaattattct

SEQ ID NO: 18902 - DNA, 911 bp, Homo Sapiens
  misc_feature (789)..(802): n is a, c, g, or t
ccacgcgtccgcaaaattctgctaaatttctaacggacgctaatgtttacaacttctctttgagtcagaaggttttagttattactaaaacatgcttcctcaattccaagcctcttcattttaatgtatttgtaactaggcaattacacagtctggagagatccttcgtgctcactaaatatccatgctctttcttccatttcccagccttctttgcagttttcctggactcatgaaataagaacaaaggcattgtgcatcgccttcaggttgaggcagctaaaagctagtaagcctccttcatttccctcttcccctgacagtgggggacctgtgctctagagggcatccccgcataaggagagtggcggcccggcccacattcaactgtgacctgagaaaggaatgaaccgtgatgatgtgaaagaatgctgtggcctttgtgtgttaccacagcatagcttgtcctatcctgtctaatacacacatttaaggtaaagaggattttcccctgcaaagctaatattacatctatgacaaatgttatcattattgtcatagaatccaaaaaatacaaattctatttatttaacttcagtggtaaatgagaaactttcgagaagcagtaattgtatctagagaagctattctcagttgaaggtaggggcagcttccagacaatccctagagagcactcccaaacccctataccttccccaccctaatcctcttaccctccagatttggagacaactttttcttctacatacttttgataaccacaaattnnnnnnnnnnnnnncaagattccaggagcatccaccagttgagccgtgaacaatgcaagtttaggggtggtgacccctgcaagtcaaaacccacatacaatttttgactccccaaaaacttga

SEQ ID NO: 18903 - DNA, 883 bp, Homo Sapiens
cggtaggttccacgctaaatctcctgctctgaatgtttacccgcgccgctcacgccggcaaaggccgtgcgtagagcttcgggaatggcccggggtttcaaactattggtgcgaacacaggccaccaggaactgcccctcacagagcagcgttgcatccgtagcccgcctgacctgctgtttaaagcgcaggctggcacggttcaattcggttatttctgcgctgaccagcagttcgtcgtccagtcgcgccggcgcgtaataacgagcctcgctggaatgcacgacaaacaacaggtcctcccctgccagctgggattgggcaaagcccagctcccgtagccgctcggttcgagcccgctccatgaactttaggtaattgacgtaataaacgatgccgccggcatcggtgtcctcgtaataaacgcgacagcgatgtgcgaacgactgatccccgttttgcgcgcgcatactctagtgcttactcctcaggttgccaatccggccaggcaactgtttttcattctgtggcacatttctaacgaaagaatgacgacgccagccactaggacagcacaaacaccgaataaatcgaatcgccaagcgtttttaatcgtctactgcatcaaggaattcgtctactacgggcatctcgcccaatcgtgacggaatgtttaacccaaagtgcagatacgcatgccgggtgaccacgcgccccctcggtgtacgcatgatgtagccctgctggatccgtacggtttcaagtacatcctcattgtgtgccgctcttcgctgatggctgccgcgaggctgtccacacccaccgggccccgtcgaacttctccgatcatggtcaacagcaggcgccgatcctggtggtcaaa

SEQ ID NO: 18904 - DNA, 804 bp, Homo Sapiens
ccacgcgtccgactgttcttccctggctcttccgacaataacaagttgtttctttaatcatatcttaaccgaaaatgtataaaagattaaatatttatgtacaatgggttgttctactatagaattaagatgagggaatttcagatgaggaaaatacccttttgaaatgttagttttgaacatgtactgttgtgcaatcccaaagataattcatgactccttaaatttgccttggcttatagcttaatatagggaaaatattgccagcgttttcagtcattctgtgcatgctgctttaagcaagagatttatatttgttgagaggaaatattgctacttcctgcacttccaccctctgcagccggcaccgtccctactgttgccattaattggagctgtccttaagatggtcaccatattcttattcaggctgttgtcattttccccagagatggtttgtttaacgaatgataggctctgtgcctggggatgttagcagactctggggtttgtacagtgatgccttctccctggcccagagctgaatattcatctagaattaaagttggatttgatataacaaatttctttctatacaggttttacataagagagacagtaataatgtcaaggatagcctgtgtgggcagaaattggtagtcgtgcttttgaatgtcagctgtagagccaactctgattatctagccattgatcatacaaattgatagaaacattagtcagtaattttagcttcttgccaaattgttcacaacatctaatgtaatgtgatgtgatgaagataag

SEQ ID NO: 18905 - DNA, 334 bp, Homo Sapiens
  misc_feature (158)..(252): n is a, c, g, or t
  misc_feature (270)..(285): n is a, c, g, or t
ggggggggccccccaaaagatcccaactttatttcccggggcgggaagctcaaaacctttttttaggggccccctaatttaatttcggggcccgcttttttaaaaggccgggaggggaaaaaccctgggttaacccattaaaacccctttggacccannnnnnnnnnnnnnnnnnnnnnnnnnnnnnnnnnnnnnnnnnnnnnnnnnnnnnnnnnnnnnnnnnnnnnnnnnnnnnnnnnnnnnnnnnnnnnntgtaccgcccattaaacnnnnnnnnnnnnnnnntatacgcccacggggacccctaaattgcccacccccaaagccccccctc

SEQ ID NO: 18906 - DNA, 331 bp, Homo Sapiens
  misc_feature (106)..(134): n is a, c, g, or t
cccccacgcgtccgagattgagtaactgtccttacacccaaataaaactaattttattatacattttggaaagaaaaaacttttttcctcaagatgctgtctaaannnnnnnnnnnnnnnnnnnnnnnnnnnnnttcaattaaaaagtatctgagtacctagtatatacccagaatgggcaatacataacacttggtctctggccttcacttgtttcaaggtcccttaacatgaacacagagatctagccccagatctccatttgaaaactcttcagatatcacactcatccaagattttgatgagctgaactttctgaacttggtagtac

SEQ ID NO: 18907 - DNA, 1016 bp, Homo Sapiens
ggggggggcccctcaaaagaatccaatttaattaccgcgggctggcaatctcaagctctttcttaggtgccccctaatttaatttcctgggccgtcttttaaaaagccggggatggggaaatctctgcgtttcccaattttatcgccttgccggaatgtccccttttcccccgttgggtaaatacgaaaaaggccccccccattcgcctttcccaatagtggcccgcctgaatggggaaggggaacccgcctggtacggccgatttaaccccgccgggggtggggtttacccgcccggggacgcttacattgctcgcggcctaagcgccgcctctttggctgttcttccttctttttctgccccgtttcgcgggttttcccggtaaggctataatcggaccctccgcccccaaaaaactgtattagggtgagtgtccacgttattggcgcacccccccctgaataaccaggtttgccgccccttgcacgatggagttcacgttctctaaaaggtgattcgtgttcctaaactggaccaaccggccacccttacttagggctagtgtttaaatgaggctggataaaccaattttacgcgaattaagcaaatattagcctgcaatttagggtgccctttcgggatagtggcgcgaaacctatttgttatttctaaaaactttcatattgatcggctcatgaaataaacctgtaattgctcatatatgaaacaggaagaagagatttcacattcgtgtcggctttatcccttttcgggcttttgcttcttgattggccaacccttaccctgggagtaaagatgcgaaatctttcggtgcacattggtcaactccgatcgacctcacgcggtaaactctgaggttttcccccagagcgttcccagtaatagacataaagttcctgcatagggacggaattaccgaatatgcccccggcaaagacatcctgtggcggcatcccatttctccaaagggttgggtggaattttccccccctcc

SEQ ID NO: 18908 - DNA, 267 bp, Homo Sapiens
caaaagcatccgggttttcaggtatatttttatatcacttgcccataaagattgtttagttgttgttctgtctttaattgttttcttgtttgattgctttggcttatagctcgggttttatgttaagtagtagtggagatagtgggtgtccttggctctgcacctgacctgagtggggctgtctctagtgcttccctattaagtaagctgctggttttgggattgagatttatatagttttatgtgccactgcacctggcttatgat

SEQ ID NO: 18909 - DNA, 780 bp, Homo Sapiens
cccatcagacgtctacagcctggaccgggagatggggatgcaggtcatcgaaggtctgtttcaggacgatgccgtgcgtatggcctccatcggccaccccaacgaaaccatgctcgcggaaaaaacccgcgacctgcaacaatccccaacccgctggctgaccgacctgattctgggccaggagcgcacgttcaccacgccactggtggggcgcgggccttatagcgagtactacggcgacctgagcatcaccctcgacaccgccacctatggcaaagggtttctcgtcagttcggtgatcattttcatctccggggtgctgcgggccctggccatgggcctggtgttgtacctggtctatcactggctgctgaccaagccgctgtcccgcgtcatcgagcacctgagttcgatcaaccccgatcgccccagcgagcacaagattccgcagctcaagggccacgagaaaaacgaactggggatctggatcagcaccgccaaccagttgctcgaatccatcgagcgcaacacccacttgcgccacgaggcggagaacagcctgctgcgcatggcccagtacgactttctcaccggcctgccgaaccgccagaagttgcaggagcaactggacaagatcctgaccgacgccggccgctggcagcgccgtgtcgcagtgctgtgtgtggggctggatgacttcaaaagcgtcaacgagcagttcaccctaccacgccggcgatcaattgctgctggccctggccgaccgcctgcgggcccaca

SEQ ID NO: 18910 - DNA, 462 bp, Homo Sapiens
aacatagtggactcttgctccaaactggaacaccattcaacgtcgaattcgcctatgggttaataatgagcttgattaccaaaattatacgcgagttttacaaatataaccgcttcacatttagttgcgcctttcggggaatgtgcgcgaaccccaatttggtatttttctaatacattccaaatgattccctcatgaacaaacacctgataatgctccataatatgaaaaagagaaatatgaatatcacatttcctggccccctatcctctttttgccgcatttgctttctgttggctcacccaaaaccgtggtgaagtaaaaatgctgaatacatgtggggcacggatggttacatcgaactggatcccaaacacgtaaaatctctagaagggttgcccccaaaaaagttttgcaggaaagaaaccttaaaagtatcgcactgtggcccaggataacccc

SEQ ID NO: 18911 - DNA, 263 bp, Homo Sapiens
ccattaaagcgccggtcagcagcagccagtgggtggcgcccgggcccatcaaacgccggcagcagcacggcgtggatcaccgacggaatgccgacctgtacttcgggcatgccgaagacgccgtcgcgcgaacccaggcggatgtcgcaggccgccgccagttccatgccggcgcccaggcagaagccgggcaggcgggcgatggtcggcaccggcaccgcgcgcaccgcttcgcacaggtcgcgcaggcgggtgatgaaggc

SEQ ID NO: 18912 - DNA, 425 bp, Homo Sapiens
tggaaaccttggccacataccctcaaaaacagccagaaatcctgcttgttcactcggggatagaactcggccttggccgggtcgcccggcaggctggcgaagcggcccatgttcgccacggcacggctggggcgatagcagtcgaataccttcaagccgtaaccctgcctggccaactcggcctggacccgcaccagggcctttgccgcgtcggcagacagcacgcattcggcagcgttgtagccgtccagtggcgcaccggtgaagttatgggggctggcgtagcgaatgtcctgcgcgatgctcggatcgaggcttcgcaggtattccttgttggctggcattggcgtgtctgccgtgaccggcgcaccgagcaccatgagggtcagggcagcgagtgcaggggaagagtagggcatgggcgg

SEQ ID NO: 18913 - DNA, 238 bp, Homo Sapiens
  misc_feature (42)..(51): n is a, c, g, or t
gaatctctggattattagggcaagatcccctaaacttgggtnnnnnnnnnngttgtgcaagcatttttgtggacaacttgatgctctaaaatacaagtaacaccacattactaacagtggctttgttaggaagcagaattatggaagaactttcatgggtggctttacatatttctataatgttttaattttctataagcatgtatttcgtaaacttaaataaagaaaaaagaacact

SEQ ID NO: 18914 - DNA, 730 bp, Homo Sapiens
ccacacgtccgaccactactggataaggtagatagttctttagtggcaagagagagttctggtactcttggtagatgtatcaagtattggactggaactcctctttcaggaggacccagaagctgtattttcttgcgtctccagctaaataaatgtaggtggggcaaaagcaatcatactcacctcatgcgtgttgaaaattgacaagacctatgcatagccatcaggtgtggtaaaatagcagagtatcatggcagaactgtgtgttcatttaagaacaatgggcaaggctcaagacaaaataatacaggaccgtcgcatttctttttctttatcccaccctccccaacctgagagttcacacacaggattgtattcttatattttctttctattcctccagtgaaaactcaaagatcaaatacactcatttaccttaagccataataaagctaaccaatgaggcttacttaatgcactctctttcccaagagctaattttgtttttactagtgaaaaacctgtatatagcttcagtcagcattctcaaagtacagccatgtgccactgtacacaaaatctttagcaataaataaatgaagatttttttaaaaaactttaatagctatatctttatctgttttggaaaaataactagtatttccaatgttatttcagttattgctgtttaagacatgactgaggtacacagttaagtttaaaatgagtc

SEQ ID NO: 18915 - DNA, 881 bp, Homo Sapiens
ccctcgcgctttttcaggacgcgcgtcttgcgcaggaccagcaggcccagcagcagcacgacgccgcacgccaccagctgccattccaggcccgccagcagccaggcggcgacaccgcccgcggccaatcccagcgccaccagcagcaagtagaaggttcccgtcgccagttcgcctatgagcgccagcgcggccagccctaaccaaatccacatagttacgttcgcctgaaaggatgagtcggtcagcggattgtacgtatttccatgacgccgcggtgacacccccgccgcccctggacaatcgcctggattatgatgtgcgctggctgccgtccccggccgctggcattttccacgcacacaccccaatgaccgctgcaatctcctccgcccgccccgtcctcatcctgcacacgggcgacccggacgatacgctcaaaagccagttcggtggctatgccgagcagctggcgcgggcctccggcctgacgcccgacgcccttgaagtggtcgccgtccacgccggcgaacgcccgcgcgcgccggaccagtaccgcgccgccctgatcaccggctcgcccgccatggtcaccgacctggaaccctggagcgaagacaccgccgcctggctgcgcgaggccgccgcggccggcctgccgatgttcggcatctgctacggccaccagttgctggcgcacgccctgggcggcaaggtgggctacaaccccgccggccgcgaagtcggcacccagacggtcgaactgctgcccgctgccgccggcgacaagctgctgggcgggcctgccgcccacctttccgggcgcaaatgctgcatgcgcagaccgtgctgcatttgcggccgggcgcggccgtgctggc

SEQ ID NO: 18916 - DNA, 513 bp, Homo Sapiens
ccccttaaagtccggggactcgtgggttttgagagatttctgcccctttggggggcacaaaaaaaacattccattggcctcaattctatcacagtttgaatccttgctctctcagatcttggtggcttgacccaaaatgcctgtcctgcccgttgattgcaactgcctttcctcttcaggttgacctaggtattctctcaaaattactgtgggacctgtggtaactgacctctgaaagctgtaactccctcaataataacaaaaggtatttttatttcacatctccagggaattccgaggaaaaacttaacaagtactgtctgatcctgttcctatattttcaactttgcccatcactcggatgctgctctttttcttggatgaccaaccctcccattttgcctgggactttcacattttgccgcaatcccaagtcctaagaaactggatgaactagtgcaactggccggttactcttgcccccttgtaactgcacccggttgtgaccatcca

SEQ ID NO: 18917 - DNA, 796 bp, Homo Sapiens
cataaacgggccgcaaagagcatcttgtgcgaacccttggctccctttacaacccaacctaaaattcatctagatcacctggacttttatgttgaaaggatttttcccccagaataggacatttgtttcccatctattctggcttacaatactgaagagtcccagtccatatttatgaaggaagcagccttaaagtgttaccatgaacactttataaacaggcattgtgggcctttgaaaagaaagctgctgatgtctgagttttatgggagtcctagccagctgtttaagtgttcttcttaacacttaagtatattttgtaacagaagaaaaatgaaaattagtatatctgcgcttcataattatcatattaaagagttgagtcgattttagcaactaaactattgctctccaaatttccttaattcattaaataaaggggttaaactagaagacgatctctgatatcttttcaccttaaggcaacaaatctttgtagagtatttgtgaattaaatcctttatgaaaaggtgtcccttgtaaatgattggggcatgttgcctcttttccttcatatttttagtttctgctattcataagaaaataagaaaaatactaacttcccttaagagtaactacttaatgtccaaaaacccctcaggttctgcaactatgatgcactgatttatgatgtttatttatatacctctcagaaaatttgaaatgaccaagagatttacaaatgcaatgttcagccaaaaatgtttttaacattctaaaggatacttatattttt

SEQ ID NO: 18918 - DNA, 428 bp, Homo Sapiens
ttgccggcgccgttgctgcccagcagcgccacgatggcgccggccggcaccgacagcgacaggccgcgcagcacctgcaccgccttgttgtagaccacctcgatgttgttgatgtccagcaccgtggatggcgacgcggcgtgtccgggagtcacgggcgcctcactgcagcacgatccagtcggaagccggcaccatctgcttctgcttggtatcggcgcgatagatccggcccaccggaatcgaattgcccttgatggtgatcggcacgccgatcagtccgccggtgtcgaagtccttgataccctccagcgccgccttcatgttggcgctggtcagctccttgcccgcttccagcgtgcgcttggccacctcggtgaacagcatcgccgccaggaagccctgcatgtagccggtgctctggtatt

SEQ ID NO: 18919 - DNA, 654 bp, Homo Sapiens
gagtgagaaagaaagatggtattgtctgttaagtgccttgggttccagagagaggtgaccaggtatgttgtggctgtcttaaggggaagattattgtcaggggccatttggaaagttctttctggctgccatggcctttcattgctttttgtggcatgttagcagcacaaccagatagggaggaggtggtactccagttggttccttttgtctcaggcttattctctggtgcagcttggtgggctggttgcaaccgtaggtaagaacctgagctggtagcccctgggggtatggctggctggcctgctttccttctttcccactgttttcttgggaaggtctctacagacctcacctcttttaggtgtgaggagataaaatagtccttattatcccttatttacagccttcatagagtctttgtagtaatctaagttaaggtcttaatgttcttatttagttctgtgtccccccaattcatttgggtattggcttttcttaatgctgatttcaaatctttggatgaaaatatattatgagaccatctcttctttagatgtgacaaaggtaataaccatggggcaatccacactgtgaaaaaagcctacgtgtagaaagcccttgcgacactagttttaagccctcacatgtgtt

SEQ ID NO: 18920 - DNA, 969 bp, Homo Sapiens
  misc_feature (660)..(668): n is a, c, g, or t
atcaccctgcataccgtcaaagtgcagaacttcgacaagaccatcgtctcgattcccacctggcgcttgatgtccgaatccttcaagaactggcgtggcatgcaagcctcaggtggccggcggatcaagcgcagcctgtatatcgacgccagcggtgtgcgtttcatccgcgacgacgaagagctgaagctcacccaggtacacctgctgaccgactacatgagccgcaagaaggccgagctcatggcctggaacgaagcccagggaaatgtcgccgcgatgtcggccaaccgtcggcgcatgaccaatatcggcaccttccgcgcgtatgccttggcctatttgaaaagccatccggaaatccagccgaacatgacctgcatggtgcggcagatgcagaccacggcccagggcattccgctggagatctactgcttcacccgcaccaccgcatgggctgactacgagcggatccaaggcgatatcttcgattacctgctggcagtactgccggagtttggcttgagcctgtaccagcagccgagtggcggtgacttgcgggcggggatgttgccggcggtgctgggggccagtcacctgcccccggcggaaaaggcagtgatgtaacaacaaaaaacggcacaacctgcgttgtgccgnnnnnnnnngcgttcagccttacttgacctgacgctgcggcgcaccgtgcaccatggtgtaggcgtaatccacgcccatgccgtaagcaccgctgtgctccaggaccaggcccatcaccgcgtcgtaagtctctttgtgagccccagtcacgctggtactccagcagcacttgctgccaggtgaccgggtaccgcgccggcctgaatcatccgctgcaccgacatgtcgtgcgcttcctttgctggtgccgcccggaaggcatcggtgacaatgtacacctcgtaacccttccggccagggcttccaggg

SEQ ID NO: 18921 - DNA, 372 bp, Homo Sapiens
  misc_feature (93)..(159): n is a, c, g, or t
  misc_feature (170)..(185): n is a, c, g, or t
  misc_feature (224)..(246): n is a, c, g, or t
aaaccgcggggcggggaaaacccgggggtttccccattttatccccttgggaccactcccccttttccccagggggggaaaaacaaaaaaggnnnnnnnnnnnnnnnnnnnnnnnnnnnnnnnnnnnnnnnnnnnnnnnnnnnnnnnnnnnnnnnnnnnccatttaaccnnnnnnnnnnnnnnnnttcccccccgggggcccccaacttttgccggccccttannnnnnnnnnnnnnnnnnnnnnnctcccccgttggcggggttttcccggtaagctctaaatcggggcgctccttttggggtcccatttttgcgctttcgggcccctcaaccccaaaaaatgtgttagggggagtgttccccgaggggcg

SEQ ID NO: 18922 - DNA, 930 bp, Homo Sapiens
caataaggaacgagcaggcgcggatgtggtcggcgatgaccttgagcgaattgttttccaggtccttgatgccggtttcgcgcgcggcggcggcgatcaggtgctggaacaggtcgatttcgtagttggagtggacgtgctgcagcacggccgcgatgcgctccaggcccatgccggtatcgacacaggggcgcggcaggcgcggcatgttgccggcggcgtcgcgctcgaactgcatgaacaccaggttccagatctcgatgtagcggtcgccgtcttcctcgggcgatcccggggggccgccccagatctcggggccgtggtcgtagaagatttccgagcacgggccgcagggaccggtgtcggccatctgccagaagttgtccgacgcgtagcgggcgcccttgttgtcgccgatgcggatgatgcgctcggtcggcacgccgacttccttggcccagatgtcataggcctcgtcgtcttcctggtagacggtgacccagagcttgtcggcgggcagcttgtagacctgcgtcagcagttcccaggcgtactggatggcgtcgcgcttgaagtagtcgccgaagctgaaattgcccagcatttcgaagaacgtatggtggcgggcggtgtagcccacgttctccaggtcgttgtgcttgccgccggcgcgcacgctgcgctgcgacgacgtggcgcgcgtgtacgaccgcgattccttgcccgtgaagacgtccttgaactggaccatgcccgaattggtgaaaagcaagggtcgggatcgttgcccggcacgagcgacgacgaaggggacgatggtgtgtcccttgggacttgaagaatttgcaggaacctgcttggcgaatctcggacatttcatcgtggatgaagcagaatttacgccgaatcttttgattatagaggggttgt

SEQ ID NO: 18923 - DNA, 913 bp, Homo Sapiens
cgtctcaaaggtatccaactttcatcaggcggcgatgcgagggccacccttttataatttgacaccaagggaaatggctggggccctcccttttacaccccctggcggggaaaaccccttccccttctcggcttattgccgtagaggcccaaccccttctcccttccgggtttaacccaaagaggccgccaaatgtgacctgtcctgaagcttgccattattgatggcggagtgggagggtcgggttacgcgacatttaccctggagggttgcggggtcccgccccttggacttttacctttgcttccttccttcgtccgcgggttttcctgtttttcctttattttgcgcgccggcggccggcttccagttcaagctttaggcgggcgcacccttaacgcttcatatttgttgatgttcagcgtctcgagcactcgcactgtagaaacggttgattggtctttgacgggtgaatctgcgattataaagggttatcctgtttacaggtggaaacaggatataaactagagctctgtgtcatattgtaaagtatttagcgatttgcggctattgtttatttttaaggatgttcgatattcgactatgtgttcagattagctaaattaacaagcttcgggcaattgtagcgtatatggaccgtacccaagcgggaccgcggggacttgggcagtactctttgtgtttgaccaaaatccgatatatttctctcaaggcgaaccgcgatatgattttcagttgcgaagtgcacatttttggttttgtctcttgctctctgctccttatccgcgatttcgttaaagtgtttagtccccgaagcgtgagaggatagtatattgattcggtcgggcaggatgtatactcatacgcttaacacgatgagtgcttagagttt

SEQ ID NO: 18924 - DNA, 360 bp, Homo Sapiens
  misc_feature (79)..(125): n is a, c, g, or t
  misc_feature (149)..(208): n is a, c, g, or t
gggggcccaacccaaaaaacctttcccaaaccgaagtcctgaaaaatttcccccggtttcctctaaaaatcttatgggnnnnnnnnnnnnnnnnnnnnnnnnnnnnnnnnnnnnnnnnnnnnnnnatggtgtaaaaggggcttaattcnnnnnnnnnnnnnnnnnnnnnnnnnnnnnnnnnnnnnnnnnnnnnnnnnnnnnnnnnnnncccccccttaatgggggcgggccccttgtttcgaggggcccccccaaaggaatcaaactttaataccccgggatgggaaatcataactcttttaaaatggcccccaaattccatttcccgggcgtcctttttaaacgtcctggatgggaaaa

SEQ ID NO: 18925 - DNA, 1113 bp, Homo Sapiens
  misc_feature (43)..(136): n is a, c, g, or t
  misc_feature (142)..(688): n is a, c, g, or t
ttaaatatttttattatatacttttaaacatatagaagatagnnnnnnnnnnnnnnnnnnnnnnnnnnnnnnnnnnnnnnnnnnnnnnnnnnnnnnnnnnnnnnnnnnnnnnnnnnnnnnnnnnnnnnnnnnnnnngggggnnnnnnnnnnnnnnnnnnnnnnnnnnnnnnnnnnnnnnnnnnnnnnnnnnnnnnnnnnnnnnnnnnnnnnnnnnnnnnnnnnnnnnnnnnnnnnnnnnnnnnnnnnnnnnnnnnnnnnnnnnnnnnnnnnnnnnnnnnnnnnnnnnnnnnnnnnnnnnnnnnnnnnnnnnnnnnnnnnnnnnnnnnnnnnnnnnnnnnnnnnnnnnnnnnnnnnnnnnnnnnnnnnnnnnnnnnnnnnnnnnnnnnnnnnnnnnnnnnnnnnnnnnnnnnnnnnnnnnnnnnnnnnnnnnnnnnnnnnnnnnnnnnnnnnnnnnnnnnnnnnnnnnnnnnnnnnnnnnnnnnnnnnnnnnnnnnnnnnnnnnnnnnnnnnnnnnnnnnnnnnnnnnnnnnnnnnnnnnnnnnnnnnnnnnnnnnnnnnnnnnnnnnnnnnnnnnnnnnnnnnnnnnnnnnnnnnnnnnnnnnnnnnnnnnnnnnnnnnnnnnnnnnnnnnnnnnnnnnnnnnnnnnnnnnnnnnnnnnnnnnnnnnnnnnnnnnnnnnnnnnnnnnnctgaaacacaactcaacctaatctcgtgctattcttggattataagaatttggcgatttcgcctatgtggtaaaatgagcgtgataaacaaaattacgcggatttaacaaaatataacgccgtacaattagtgggcacttcggggagtgtggcgggaccccttatgggttattttcaaatcatcccatatgattccgtcagagacctaaacctgatgtagtgcttccatatattgggaaaagagagatatgagtatccaaactttcgcggtgcctttataccctttttggcgccgtttttgcctttcggtttttgctcacccaaaaagcgtgttgaggttaaagagtgctgagattacgttgtgtggcggaggggggttactccaacgtggatcttacagagcgttaaatttcttgaagagtttt

SEQ ID NO: 18926 - DNA, 424 bp, Homo Sapiens
ccttcagcgccacgctcaagggcaggcccttgggatcgacttccatttcattgctggcgaacggtgtcagattggagacgaccgcgcggccccagggatcgatgcgcaacccgctgccgctggccacccgcgcgccggcggcatgccgggcttcgaccacgacggcggtatcgcccagcgcgggcgtgaatacgacgccaccgccatatgccaccacgcctcccgacaccgtggcgccatactgcgagaacccgcgtccgcccgatgcatttgccgccatggtggcgtagggcgatgcgtaagccgcgctgccccccgccacggaggacgctgccgccccccccaggctgcgactcgcattcacgccataggtcagggcgccgtcctcgcccgtcgccccggtgaccgactgttgaacatcggt

SEQ ID NO: 18927 - DNA, 325 bp, Homo Sapiens
ccacgcgtccgggaatgtatatttaggtcatgttaaataaaatggctggaggaaggagggaagaaattaggaactgcagtacatcatcaccccaggtgtaagagttatttctctcccagtgcagaaaggggagtgtggcccctggctgtacctgagcttcctcttctccatccctgagacatcacagaatcacccgggttctgacctctccacttctagctctcactgacatctggatatcttgatgcactgcctgtttgtaacaacatatacttctttgctgaatgctaataaacttctgggttcaagagggaacccctcagtc

SEQ ID NO: 18928 - DNA, 830 bp, Homo Sapiens
ccttcgatctgcacctgacgcaccagcgggaacatgtccgggtacaggcgtgcttgcaggaaggcgttcgggtcgatgttcttggcggtggcgtgggcttcggccttgttcagcacatcgctcagggcgttgagcatttgcttgaagaccgggagggaagcggcgtacagggaaatagtcatgacagtctcgacagttgtggcagggtttgaaacagcggcgattatagacatgccggccgccagcgccgcttgtcttttattttttcaggattaggctagtgggctcactgcattagggaaagcgcgatgaccaccgagcacgacaccacttccgaagagccgcgcctgaacagcacggaaatccgcatcctgggctgcctgatcgaaaagcaggctaccagccctgaaacctacccgttgaccctcaacgcgctggtgatcgcctgcaaccagaaaaccagccgcgaaccggtgatgaacctcagacagggccaggtcggccagagcctgcgggccctggaaggtcgcgggtttacccggctggtgatgggcagccgcgccgaccgctgggagcatcgggtggacaaggccctggaactggtgccggcccaggtgattctcagtgggctgttgttcctgcgggggccgcagacggtcaacgaactactgacccgcagcggacgcatgcacgaatttgaagacaccgagcaagtggtgcatcaactggaacgcctgattgcccgtgggctggcgttgttggtgccgcgtcagtcggggcagcgggaagatcggtacatgcacgccttgggtgacccggcggatattgaa

SEQ ID NO: 18929 - DNA, 597 bp, Homo Sapiens
gcattaaaggtcaccctgcgcgccaacggcctggaaccccaggcactatataaagagagcagagcgtcgcacatcagctcccgcctgatcgtcaacaaagcttccatgaaaatgcagcacgcccgtatccaggcgttgatcgacaccctgcgcaaggcagtggagtctcgacaccgcggttgactcacccgcgcggccctaagccgcgcccgtctatccgcctcatagccagaattctcaggtgcccaagcggaaacgactgctagtttagggcgcctgagtttttgccaattctattgaggccctcgctatgaccacgtccactgcaattgcccgactcaacgctgccgacccggatttctcccatcatctggatcatctgctgagctgggaaagcgtgtccgacgatacggtcaaccagcgggtgctcgacatcatcaaggccgtgcgcgagcgcggtgacgcggcgctggtggacttcacccggcagttcgatggcctggacgtcccctccatggccgacctgatcctgccccgcgaacgcctggaactggccttgacccgcatcaccgcgccccagcgcgaagccctggaagt

SEQ ID NO: 18930 - DNA, 420 bp, Homo Sapiens
ccccattgtgctggcggtgtacagcccggtgatcaagtccgacccgtggagcatcttcaagagcgtgctggccaacccgttgatcatcagtgtgatcgcggcggcgccctttgcgtacttccagattggcttgcctggctggctggaatcctccgggcagtacctggcggacatgacgttgccattggcattgatctgcatcggcggcacgttgtcgctggcggcactgcgcaaaagcggcgacatggccctgagtgccagcctgatgaagatgatctggctaccggtgctcgccacccttggcgcgtggctgctggggttccgtgggccggagctggggattctgttcctgtacttcggtgcgcccacagcagcggccagttttgtcatggcgcgggcggcggagggcaatcatgagct

SEQ ID NO: 18931 - DNA, 779 bp, Homo Sapiens
cccttcatccccagctctttgatcttgcgagtcagggtattgcggccccagcccagcagcacggcagcgtcgcgacgacgaccggcggtatgcttgagggcggtttcgatcatgatccgctcgaaagccggcacagcgctgtccagcaggttcgactggccacgtgccagggcctgatcggcccactggcgcagtgcctgctcccagttggtcaccggtgccgaatcctgcggcaggctcagcagctcaggcggcaggtcgctgatatgcacttcgcgacccgaagccatcaccgtgatccagcggcaggtgttctccaactgacgcacgttgcccggccatggcaggttcttcaggtattcctcggtctcgcttttcagcagcttcggctcgacagccaactcctgggcggcgcggctgaggaagtggcgggccagggtcgggatgtcttcgcggcggtccgacatccgtgggatgtggatacggatcacgttcaggcggtggaacaagtcttcccggaatttcccggcatgcaccagggtttccaggttctggtgggtcgctgcgataatgcgtacatcgaccttgaccggcgtgtgcccgcctacgcggtaaaactcgccgtcggccaggacccgcagcaagcgcgtctgggtgtcggccggcatgtcgccgatttcatcgaggaacagcgtgccgccatcggcctgctcaaaacggccgcggcgctgttgggccgcgccggtgaacgcgcctttttcatggccgaacagttccga

SEQ ID NO: 18932 - DNA, 859 bp, Homo Sapiens
ccccacgcgtccgataagtttacacatgaaatatgaaagctccaacataatgctgttgcatgctaatattaaagctactatccccaacaaatatattgtttgctattactactttgccagattaagtgacttggtgtccgctggaaagcagccagtgctgagagtacaattggtacttgtatctcagctattttctagtttgctcgtgtttgtatgccttcctagagtcatttgtgcttctttctgaacttgttgattccagtcgtacttgttttgttatgaaatttaaatatgtaagttgataaaatgtgacggaaaaagaattgtttctaagaagactaagttgactgctttggaaatacctggtaagggtgagttgtctgattaggtagatgaaaacgattaaaagccatgggacaatcataaaaacgtagaagtttttaatttgcaagtgttttttcacttctcattacactgagaacacttagaggatacatcacaagtgtgcttcagagaagaaaagtattaaggagttgaaataacagacttatttaaagaaaaagtcttggacctgtatcaaataattgaactaaagtgtcttttaaattaaaatctttaagataggtttgtatcacttaaaatccaaaaacgtttttcctctgcgttaaacaagttgaccatcttctgcatgtggctgcatgtgaacataatgtaatgataagctgttatgatatctttgtaaataaatgtaataaaaagaagtattcatgctacttagaaaatataatgtgctaacgcttacataattaagtgtctaaactgtaagaaatattttgtgtatgaaatgttggagagaaga

SEQ ID NO: 18933 - DNA, 754 bp, Homo Sapiens
cacccacgcgtccgtatttatttcatagcattatggagaattgaataccatcatgcacgtgtatgcttatcatagtgcttgacatgttataggcgtaaaataaatattactaatagctgttggtcataatgagattgttgaacgaccatgtttactgatgatatatggtgacagcaagagaacatataataaatcccagtagtgaagctgtgacaatgatttttatgatgaaatgagaagcaaagtaacttgccaaatagcatatgatgggaccatacactgaaaaaggaagtattatctgcttttgtgctggaacagtcgtggttaagataagtccattgctgagtgaggaagcattccgataaggcatgacagtagtccatattttctcacagtccccagatgtgctactgtgttttagaattagacctgaagagacaataaatgactgtgatggctcaatgtaagttaaagcaccaatcattccttttcaatcattccagtcttgtcttctccaaaaattctctacagggtgcaggtaaaatattttaaaaatgtaaaattgatcatggcactcacctagttaaaagcattcaaaaagtccccaatactgtcagtgtaaaacccaaagcattctacaaagtcctctgcaattgccctcattgctccagtcgcaactgggaccactaccctgcttgtcccaccctactgcagcattggcaagttacctgatatcctgagtctcttttgcttc

SEQ ID NO: 18934 - DNA, 825 bp, Homo Sapiens
ccccaaatgggccgcatcaaggcggctgatggactggacgcgccggcgttccgcgccttgctggcgctggagcgggtgccgcaggcctgggtcaaggtctccggcatcgaccgcatcgcctcgggcaagcgcccctttgccgaaggcatcccgttcgtgcgcgccctggtggacgcgctgcccgagcgcacgctgtggggcaccgactggccgcatccgaacgtggcgggcgacatgcccgacgacggcgaactggccgacgcttttttcctggcctgcccggacgcggaaacgcgccggcaggtcctggtggacaacccggcgcgtctctacggcttcctgtagccgcgccatcgcccgatttcgggcaacaagaaaacacgacatcccgaggagacaatccatgttcaagaaaatcgtattcgccggcctgctgggcctggccagcctcggccccacggcgcacgccgatggtccggtgcgcctgatcatcgccttcccgccgggcggcccggtggacctggtcggccgggtgctggccgaacagctgggcaaggagctcaagcaatcggtcatcgtcgagaacaaggccggcgccaacggcaacatcgccgcggcctacgtggccaaggccccggccgacggctcggtgctgttcctgaccagcgtcggcgcggtgtccatcagcccggccctgtacaaggacctgccgtacgacccgggtgcgcgatttcgcgccggtgtcgcgcgtggtcaaaaacgccaccgtgttcgttgtgaatcggccaacccggccaccgacgcggccgacttcgtcaagcgctc

SEQ ID NO: 18935 - DNA, 934 bp, Homo Sapiens
ccgcccgcctggccctgggcggcgtcgcccacaaaccctggcgtgatcgcgcggtggaagccgcgctgatcggccagtccgtcagccgcgaaacctttagcagcgccgccgaagccttgctgcaggacgccgagcctttggaacacaacggcttcaagatcaaactggcacgccgcgcgatcgttcgcgccctgagcgatgccgctgttgcgggagccacatcatgagcgcgatcggcaaaccgttggaccggatcgacggtctgctcaaggtaaccgggcaagcgcgatatgccggggaatttcccgaagatggcctgctgcacggcagtgtggtgtcgagcaacatcgccaagggccgggtcatccgcattgacgcttccaaagccctggcgctgccgggcgtggtgatggtgctcgatcacctcaaccgcccgaaactggccagctacgacgacagctacgccgatgccgatgccgccgacggctcgccatttcgcccgctgtacaacgaccgcgtgctgtacagcggccagccgttggcattggtgattgccgataacctggagctggcgcgtcatgccggctctttggttgagatcgaatacacagccgaaccttccgagaccgacctgctggccttgcaggaccaggcgcacccttcgccacaaacaccgcccaagccgcgcggcaacttccaggccgaatggaccggcgccgccacgagcctggatctgcactacagcacgcccatcgaacaccacaacccgatggagccccacgccagcaccgtgctgtaccagccggacggcaccctgcatatccacgacaagacccagggcccgcagaactgccaggcttacgtgcagaaagtcttcggcctggataaaagccaggtgcgaatcttcgctgcgtttgtcggtgtgcttttggtt

SEQ ID NO: 18936 - DNA, 273 bp, Homo Sapiens
cctctaaaacgtccgaatacatctatttttaattcaaatatatggtatgagtcattgtgtttagatcttgcatccatctggaaattattatttagtagtattttattttaaaatatcagatgctttttttcttcccagatgctgttttagatattagagatataatggtgacaagatcaacaatatctagtttctctcagagctaatgttcctgtaaggggagacagcccacaaagatgattttaaataaaggtaaatgccataaagatggtg

SEQ ID NO: 18937 - DNA, 730 bp, Homo Sapiens
cccactgaacgagatatagcccaggcccaggccgataccaccaatgaccccggagccgatccacatcagccagatctggtgggtatagatccccaatgcggagatcagcaggccgccgcaccagcacaaggccgatacgacaccggctttacgtggcccggcatgttccagccagccgccccagatcgctgccgagcagcccaggaagatgaagaacagggtgtagatccagcccagcatggagatgggccagtcgcattgcgacgagaagacctggctgataaagctcatgtccggcgcgcaggcgaccggtgcggtgatacccagcgccttggacaacggcaaccagaacaccgagaagccgtaggccatgccgatacacaggtggatggccagggcggccggtggtacgagccaacggttgaacccgggcttggcgataatgcgctccttggacaggaacgcaggctgtgcagcagtatgacccgccgcagtgctagtgctcattggtgtttcccccagttattagtatgtgtccgtcgggcgctctctccctcggcctagcacgcaaagcgtggccgtttttttgagtaaagctccattttggcgcgacgtttagccgcagaaggcggacgaacacgcagagattagcatctgtggatgacagaaaaaccaaactgccatcaccttttccaggttatctgtctttttgacgccaaaatcccgtttt

SEQ ID NO: 18938 - DNA, 405 bp, Homo Sapiens
gttaaaaatgagctgatttaccaaatttaaacgcgattttaacaaatattaccgctaccattaaggtgccactttcggggaatgtgcgcgaacccctattgttatttcctaatacatccaatatgtatcggctcatgagacatacctggataatgctcataatatggaaaaggaaagtatgagtatcacatttcgtgtcggccttatcctttggcgacattggcctcttgtttggtcacaaaaccgtggtaaagtaaagatgctgaaatcagtgggtgaccaatgggtactcaactggattcaacacccgaaaatccctggaggtttccccccaaaacgggttttccagtgtaaaactttaagggttgggttttggcccgggttttacccggtttttaaccccgg

SEQ ID NO: 18939 - DNA, 248 bp, Homo Sapiens
  misc_feature (97)..(106): n is a, c, g, or t
cttctgacaagtaaattaaattccctggaaaaaccgacgttttatacgtctggaaaaaacaaaaccctggccctacttaatttaatccccttgcatnnnnnnnnnntttcctggttggtatcgaagaggccaggcccgatcccccttcccttcccttgcattgcccgaccggaatggggaatgggacccgccctggcgcgttacattcggcggggggggtgtggaggctacccgcgacgggaccactt

SEQ ID NO: 18940 - DNA, 765 bp, Homo Sapiens
  misc_feature (53)..(151): n is a, c, g, or t
cacccacgcgtccggaacacaagactccggaagcatgccagcgtataaaaccnnnnnnnnnnnnnnnnnnnnnnnnnnnnnnnnnnnnnnnnnnnnnnnnnnnnnnnnnnnnnnnnnnnnnnnnnnnnnnnnnnnnnnnnnnnnnnnnnnnacactttgcctcattggttcgtgcctcagcttccaatctggacatggagcacaataacagtgggcccactgctctccgaattcctgcgcgcacttgaagggagtgtctggtgcaggcatgcagggaggaagaatgactctgagcttgaccattcaacttcgaaactttaacatcaatggatcagcacacactggtgtacggtctgctatgcatgcagccctgtgctaggcaaaagaagtatcagaccaggaactgacagcctcactgcaacaggaagagaggcttcacacaataagcgtttcattcaaccaggctggacctgtgcttattgagttgaacatcactgagcacaaaatgcaagccagacaccataagagctgtaaggatgataaagatgtctttctaccctcgagagctctaagtgtggtcaggagagaaacacatgcaaagattatgctggctggaaggaaatgctggaatgaaggtggaagcattctattcatctaaaagcaccggtaattaacgatgctaataaatgtataatccctttgtaaacatctcttcacaaggtcataaagaagaagactgaatgaaggacgccaggctttcatttt

SEQ ID NO: 18941 - DNA, 337 bp, Homo Sapiens
cctataacagcggcatgtgcttgctcaacgtgagcagcgactggatcttgaaacggctgaagagccagttgcagaaccttcccggccacgcctcggatgactgtccacccgccccccgagacatccgggggcgggttcctttcagctggtgagcaagggatctgcgcccaagtcagcgaggcgtttatcgcggcgttgctctgcggccttttgcaggcggtcagcctccgcctggctcaaaagtccagcatcagccaaggcgtcaatatagccccagacgtaggccattttgacacgcacctggatcggatctgcttcatctgtaatgagctttagt

SEQ ID NO: 18942 - DNA, 723 bp, Homo Sapiens
atgctcgacgatccacaagcgcgcgcggcctggagccgcaatggtctggccttcgctgagacggccgacctctatagcatgccgcagtacgctgcggacctgattctggcggagccaaaccgatgaagttgattcttgccgaaccgttcaagaccctgtgggccggacgcgatgcgttcgccgaagtcgagaagctggacggtcaggtgtaccgtgaactggacgcccgccgtaccttgcgtacggaagtggacggccacggctttttcgtgaaaatccaccgggggatcggctgggccgaaatcctcaagaacctgatcaccgccaagttaccggtattgggcgcgggccaggaatggctggcgatccagcgtttgcaggaagtgggcgtaccgaccatgaccgccgtcgcttacggcgaaaagggcagcaacccggcggaccaacactctttcattgtcaccgaagagctggcaccgaccgtcagcctcgaagacctgagcatggactgggtcaagcagccgccggcgcctgtgatcaagcatgcgctgatcgccgaattggcgcgcatgaccggcatgatgcaccgcgccggggtcaaccaccgtgactgctacatctgccatttcctgctgcacaccgacaagccgctggtagccgatgatttcaagctgtcggtgatcgacctgcaccgtgcccaggtacgttcgaagattccgttgc

SEQ ID NO: 18943 - DNA, 601 bp, Homo Sapiens
ggggggggcccctttaggggttcccgttttacttgggggggcttgcaaggtcttaccttttttttggggtcacttaatttcatttccgggggcgtttttttaaaaggcggggagggggaaaacctgggggttacccactttattcgctttggcgcactcccccttttccccgggtggcgtattaaagagagggccctggcaatgtggacgcccctgtttgcgggccttttgcgcgggcgggtgtggtgtttcgccaggtgtgacgcctacatttgccagctccttatcgcgggctctttttgctttcttcacttcctttcttgcggagtgcgcgggttttcccgtaggttttaatgagggggctccatgggggttcgattgatggcttagcggcccccacccaaaaggtgtgataggggtagtgtgcatgattgggcaatccccgaaaaccgtttcccctgtgacttggattccagttcttaatgtgacttctgtcccaatgaaacaccctacccattccggcaagtcttgtatataaggaatttgcagtttcgcttttggtgaaagttgtggattaaaaaataccgcattttaacaatat

SEQ ID NO: 18944 - DNA, 797 bp, Homo Sapiens
agtgcgcgtgccttcggcttcgtaattgcgccggcccatggtcgccgagtaattccagtgcacggaactgacgtgataaccgtcggcgccgttctcgatctgcagcttccagttgccgtcatacacatacgacgaactgccccgcagcacttccaggcccagcggtgcctggtccaccatctggtcgatgatcacccgggtttcccccaggtagtcgctgagttccggcaccgtctcgctgaggctaccgaacaggaaaccgcgatagttttcgaagcggccaaggcgcttgaggtcgtgggagccgtcacagtcgaagctgtcgggataggcgccggtcttggcgtccttcactttgagcagcttgccggcgttgctgaaggtccagccgtggaacgggcaggtaaatgagcctttgttgccttgtttacggcggcagagcatggcgccacggtgggcgcaggcgttgaccaggccgtgcagcgtacctttcttgtcgcgagtgatgaccacgggttggcggccgatccaggtggtgaagtagtcgttgatctctggcacctggctttcgtgtgccaggtagacccaaccgccttcgaaaatgtgcttcatttccagggcaaacaggtcggggtcggtgaagatgtcgcggcggcagcggaacaccccggtggcgggatcttcctggacggagtcgcgcaattgtcgggcgagtcggtcgaatgtgctgatcatggggtaagcccctcggttgttctttgtataagcgcccccaccttatgtgcttgccctacccc

SEQ ID NO: 18945 - DNA, 579 bp, Homo Sapiens
  misc_feature (51)..(60): n is a, c, g, or t
ccgggaactgggctggcaatagatttacgtacccgaacacgctgacaacgnnnnnnnnnncttggcattacaataactctcatgctgcgactcctcaatgactgaacacaaaaaagcctccgccgtgcttgactcttgagggaggccgtggacaccacgtcacaacctgtcgcatgggaaaacatcagtaagaacaataccgcattgattctcagcgcggtggctatcgctattgctctggcggcgggcatcggtttgtatggctggggtaacagggcgccgtcaatcagaccgccaccagcgatgccctgtctaaccaactgaccgcgttgctgaagttccaacatagccaaattgccgagctggaaggcattaggaagcgaaagctgcacaacttaagcaggcgaatcgttttgtagaaccgctggcaattcttttggataaagtccaacaaagggtcaccgccatttccggcagcgatgctctgtctggctgctggctcaaggatattttctggtgaaactcgcccgacggtatcgatggagcgatcaggacgtcacgaccgctgcagcgttgctg

SEQ ID NO: 18946 - DNA, 724 bp, Homo Sapiens
ctgcgcctgggcgtggcggcagacgcggccactatcctggacctgcgtccggacgtggtggtgctggcggtgggcggtcatccgttcctggagcagaacgagcactggggcgcggctgaaggcctggtggtcagcagctgggacgtgctcgatggcaaggtggcgccgggcaagaacgtgctggtgtacgacaccatttgcgagttcaccggcatgtcggtggcggacttcctggcggacaagggttgccaggtggaaatcgtcaccgacgacatcaagccgggcgtggccatcggcggtacgtcgttcccgacgtactaccgcagcatgtacccgaaggaagtgatcatgaccggcgacatgatgctggaaaaggtctaccgcgaaggcgacaagctggtggcggtgctggagaacgaatacaccggggccaaagaggaacgggtggtcgatcaggtggtggtcgagaacggcgtgcgtccggatgaagagatctactacgggctcaaggaaggttcgcgcaacaagggccagatagacgtcgaagccttgttcgcgatcaagccgcagccgtgcctgagcgagccgggtgaggggtacttgctgttccgcatcggtgactgcgtggcccagcgtaatacccacgctgccatctatgacgccctgcgcctgtgcaaggatttctgatccaacaccgaaccaatgtggactcggtcaaaaatgt

SEQ ID NO: 18947 - DNA, 784 bp, Homo Sapiens
ctcggcctgccggacggcgacggcaaacagttgatcagcgaactgcggggatggctggcggtgccgatcctggtgttgtcggcgcgggatcgcgaagaggaaaaagtcgccgccctggacgccggcgccgatgactacctgaccaaacctttcggcgtgcccgagttactggcgcgcatccgtgcgcaactgcgtcggcacgggcaaaccggcaccgtggcggccaccagcaaggtggcatttggcgagattgaggtggacctggcgacccatgaagtgtggcgccaaggcctgccggtgcacctgacgcccatcgaataccgcttgctgtgcgcgatgattcgcgggcagagccgggtgctcacccatcggcagttattgcttgaagtgtggggactggactacgtggaccgcgcccactatctgcgggtgcatatggcgcatctgcggcagaagctggaggccgacccggcccagccgcagtacttcatcaccgagttgcaggtgggctaccgactggtgggcttgtgaacagatgcgcggcggcgaaatcgacaaacacgcgaattttcggcgagaggtgccggctggatggccacagggcccagaactgaccctggtcatcggaatggccgtcgagcacggtttccagctggccctcggcgagtgcttcgcgggccagaagtccggcacgtaggcaatgccatggccgtccatcgcagcccggagcatggcttccatattgttcaagtcaggcggtggcaggcgcaattgggtgatggcc

SEQ ID NO: 18948 - DNA, 359 bp, Homo Sapiens
  misc_feature (244)..(256): n is a, c, g, or t
taaatacgcgtgcgtgccacgatataactcttctaatgtgtcccaaaatttattttctggggccgtctttttacaaccttgtgagtggaaaaactgtggtttcacccattttaatccctttgcaacatccccccttttccccctggggtataatagaaaaaaggcccgcacatatcccccttcccaacttttgcccccccaaaggggaaaaggggacgccccctgtaggggcacattaaccgcnnnnnnnnnnnnntttacgcgcagcgagacctctacttttgcgagccctaaagctaaaaatcggggcccccctttggggttcaaatttagggctttagcgcccctccaccccaaaa

SEQ ID NO: 18949 - DNA, 626 bp, Homo Sapiens
aggccgccgcgggagcggccgatggcgtgatcaggcggctcgatgcgcagattcgtgtaattcgtcaggtccccctgtgtcccggggcaggttggtggcgtgctgatgggcgcggttgatcgtggagtccaccgagacttcccagtcgatcagcccggcggcgtcggcatgggccagcaggacgctgtggatcttgtcccacgtcccatcaccgctgaagcggcggtgccgcttccacaccgtctgccacggcccgaagcacccgggtaagtcccgccacgcgatcccggtccggtagcgatagatgatgccctccaccacggtgcgatgatcggcgaacggccgaccacgacgcccctgcgaggacggcatcaacggagcaatcagctcccactgcgcatcagtcagcaactccgttcgagacacacaccgagcgttccagcgaccagcccaaacctttgggagacacgccctagccccggcgcctgtcggccgctgaccgtatggtcgcggtgtggtgcagcactggtcccccatgtcccaggtgcaggccggcgtcgagccgggcacctggtacatgttcgatcgcagccggcgcatcgcgatcatccggctcgtcgaggtcc

SEQ ID NO: 18950 - DNA, 573 bp, Homo Sapiens
  misc_feature (126)..(138): n is a, c, g, or t
ccacgcgtccgccatctataagtcctcatttttgatgcatttcaaagaaaattgcaaacttaagtacagattacctgtaaacatttcatgcatattgttaaccagagttcaatagttgttaaagannnnnnnnnnnnngaggtgaagtttacatgcagtgaaatgcacaaatcttaagtgttggatgcagtgaggtttgacaaatcacatacttgtgaaacccaagccctgatcaagataacattatcatccccaggaagtctcttcatgcttcttcccagtcaaatctttctatcccattcccctgggtaaccactcttggttctgagttttccccaatagattagttttctgtttttctaactacataaatgaaagtatatgctctcttgtgtaaggcttctttcagcataaggtatttgggatttatctatgttgtatgtatcaaaaatttattgctgaatattatttcattgtatgaatatgccatagtttatccttttgatggacacctgggccgtttccagttttttttacatattataaataaagcttctatggatatttttctgt

SEQ ID NO: 18951 - DNA, 225 bp, Homo Sapiens
tataacgtgctggtctgcgttaatcgcaccaatgcgcaagaccgttgcccgtatatgattttttgtgccatgcgggagtcgaattcgtccgatttattcctgtggtcgagcgcctggctgatgagaccattgccggcgatggacttaatttacatgcgcctggtgatattcagggtgagctaaagaaatggtcagagctccccgatgagttcggggattttctgg

SEQ ID NO: 18952 - DNA, 226 bp, Homo Sapiens
ccacgcgtccggataacaccctgaactccaccttgcgagacaccgttcggcctggatgggcaaaattgacatccacttattcaaatttttgatgccttcttctttggattcttatcctaagctgaccctcaatggggacctgtactatgaggggaaggagttcaagacacgagtgaaggagaagaagccgtgaggtctgtccgatgagctcaggatttttctgggg

SEQ ID NO: 18953 - DNA, 256 bp, Homo Sapiens
gcttaaaggctgttatcgcttacagggttgctgaagaagatgaaacatcagcctgccatcgtctagaagagacattggcagttaaaaattagcacctccagtgtagtcgcctggcactgcccatcatgctgagggagcagattcttcccaaggcagcttcagctaggagtttgtaagcaaggactttgtgacacatttgtcccctggaactgagcctttttaactgtccctgtgaatgaataattttgagtgacct

SEQ ID NO: 18954 - DNA, 716 bp, Homo Sapiens
cacacggcgaagatcgctgccgcaccgtggttcgccctgccccacttcaccgcgccggaattcaactggcaggcgatcctgtttatcgtcccggtagccctggccccggccatcgaacacatcggtggtgtgattgcagtgggcagcgtgaccggtcgcgactacctgaagaagcctggcctgcaccgcacgctattgggtgatggtatcgccaccaccgctgccggcctcttcggcggcccgcccaatacgacctacgcggaagtgacgggcgccgtgatgctgaccaagaactacaacccgaaaatcatgacctgggcggcggtgtttgccatcagcctggcgtttatcggcaagttcggcgcgctgctgcaaagcattccagtcccggtaatgggcgggattctatgcctgctgttcggctcgattgccgcggtggggatgaacaccctgatccgccacaagatcgacctcggcgaagcacgcaacctggtgattgtgtcggtaaccctggtgttcgggattggcggtgtgctggtaggtaccggcaccggccccggatgactttggcctgaagggcattgccctgtgtgcggtggtagcgattgcgttgaatctgctgttgccgggcaatgacggctgggaagaacaagaaaccggatgagccgttgctgtaaggcttatctttttggtgttgctgatgggcctcatcgcgg

SEQ ID NO: 18955 - DNA, 489 bp, Homo Sapiens
  misc_feature (57)..(242): n is a, c, g, or t
ccacgcgtccggcctgaagcttaagctttatgatgagttttatggtaaactcaactnnnnnnnnnnnnnnnnnnnnnnnnnnnnnnnnnnnnnnnnnnnnnnnnnnnnnnnnnnnnnnnnnnnnnnnnnnnnnnnnnnnnnnnnnnnnnnnnnnnnnnnnnnnnnnnnnnnnnnnnnnnnnnnnnnnnnnnnnnnnnnnnnnnnnnnnnnnnnnnnnnnnnnnnnnnnnnnnnnnnnnnnnntatatatctaatttattaatatatttatgtaaaattaaggctcatttaattatattaaaggtattatgtatcataccatattctgcttaactttggatgttgtttagggattaaactctcaattgtggtctaattttatactacatatgattcatgtattgcctactgagcaagtaagcaattttcttaattatggacaaatattatgctggcagacctgtgcatattaaactgaaaaaatactttt

SEQ ID NO: 18956 - DNA, 714 bp, Homo Sapiens
ccacgcgtccggtatgcatgtgtgtgtttgtgggtggtggtagaaaatgtttaccttacagaaaaagaatagaaattataaacttgtgtaagtgtgggatgcatgtgtgtgtttgtgggtggtggcagaaaatgtttaccttacagaaaaagaatagaaattataaacttatttcacaatggcatttcccttaaaaaaacttaagtttttcagtaaagaaatgtagtattttgtgaaatactgaaatgtacgtagccttttgaaaggaaaggcattttacctctgctctctttcttctttcagtactgtgtgcatttttgtgtccattgtttaaatgtaatgatattggacaaaaaatttacagcaaaattaagtcagttctgctgaaactggattttggaattggagaatatattaatcagaagaaacgtgagagatctgaagcagacaaagaaaaaagtcacaaagatgacagtgaattagacttttcagctctttgtcctaagattagcctcacggttgctgccaaagagttatctgtgtctgacacagacgtctcagaggtatcctggactgataatgggaccttcaacctttcagaaggatacactccacagacagacacttctgatgatcttgaccgacccagtgaggaagttttctctagagatctttcagattttccatctctagaaatggcatgggaacaaatga

SEQ ID NO: 18957 - DNA, 536 bp, Homo Sapiens
ccccaccccctgacccgccgcaagcgcatcagcttcgacgcgctgcaggcctacccctggatcctgcaaccccacggcagccccatgcgcgacgtcctggaacaggaattccgcgcccacgacaccgccctgcccaagggcctgatcgagtccgcctcgatcctcaccaccaccaacctggccatgaagtccgacatgctgggcgtcatccccgactccgtcgccagccgctacgcccgccacggcctgctcgccatcatcccctaccaactccagcacaccctgaccgccttcggcagcatcatccccaaggaccgcccgctgagcgcgcccgccaggcacttcgtggacctgctgcacgacacggaataaaggcgcgccacacccagggcaaataccaccagcccccgacgcaacacaccgcgtaagccccaaaaggccgcccgcgcggccgacctggggcgggccccgcaaacctctccatgcccccgccgatctgacaacgcgacgccccaagactctcgcagcccctcgcg

SEQ ID NO: 18958 - DNA, 823 bp, Homo Sapiens
cccccacgcgtccggaagggaccaatggccagcttgctgaaatgtaatgccattcttaaaagccagctaagaatcagaccgtattagttaaggacccataagagtagacatttagaaaaagtgaaaaatggcaagagtggcccaatcttttgagagtttagagaaaatatcatttggaaagggagtagctctccttctattttagccttattattacggtatctataaagcaatgccatattctaaatctgcagaaataaaattctaaggggcgaaagtccaaggcagaagtcaaaagttttgcaaggaaaccgatgaggttgctgacctgagctgggcagggttgaacaggcgagtgccaagatcaaggtctctgattgtctctccttgaaaggtaagcagagaactagggctatcccataaattaagtgggagattggaaaggggtgcggacttctgtattggggagaaggtcttggatgaactggggcagagaactgccagagagagtacctaggaatacgttgttagcaggagaaagaccaagttcagatgcagacttgggaaagtaggtaacttgaccaaaggtagcaaaattagactacccaactggattgtgaatgcagtttatgaaatggatcaggacaggagcaaaaatagattttctagaaactgcagactcctgtgattggagcagtatacaaagtacagcaacatcagactagatctcacctgaggtgctgggtgagaaatctttatggaccagatggaagagggcctgtgtataagaccttaggaaggaggtttgggagggcagcctgac

SEQ ID NO: 18959 - DNA, 300 bp, Homo Sapiens
ccacgcgtccgatgattggcaagcactggttaaaaaacaggtaaggctactcttagatttctaactcaacatagttaaccactgctcttctgtcttttccttcaacttttaatcttttactccctagttctttatatctttaaaatgaacaaatttgtttttatatttttggtctacagtagaattacatattaataatataataaaaagatatttcattaacaggttggtactgcatccatgtggggacaatagaaaaaaagtactcaaatagacatagcaaatggactctattcttat

SEQ ID NO: 18960 - DNA, 439 bp, Homo Sapiens
ccacagcagcgtggccaagaccaccaggaaccacacctatatgtcgccgcccgaggtgaagcagccccctgactacttcagcttcagttccagtaacgtggtaggcagcttgagcaacaccctcagtggcatccagttgatcaaccatccacccacacaaggcgggctcttggggttggtgctgaatttggtggtcggcctggtgacgggtgttctcaatctcctcaccagcattatctcaggcgtgctcagcccgctcctcgacccattggtcaacaacctgctgaccggcctgggcgtggacctggcaaaagtcgaaatcggtgccaacctgtcctgcaaccccagcgggcgcgcaattctggtgatctgagcacatcaagcccgctgatcatcggccaacacgctaacctattaagccgccccaaccttgtggctg

SEQ ID NO: 18961 - DNA, 402 bp, Homo Sapiens
ggaaggggcggccgctcaaaagaatctaagctaaagtacggttacatgcaacctcatacctctctaatagtgcaccttaagtccattgcgcgggccgtcttttaacagcgctgtgattggaaaaactgtggttatccgaattttattgtcgggcgatcacatcgctgttgccccggttgaataatagagagagcccccatccagatccccttcctagtggttgcgcaactagaagagtgtatggaacccccctgtaccggcgctataacccccttttttaatataaccgcgactgtaccgctacattggccggcgccgtagaagcgtctcctttctttactccttacattgcgcgcagtgctgacgcgcgtttcctgtatgctataagttgggtgttcgtat

SEQ ID NO: 18962 - DNA, 361 bp, Homo Sapiens
ccttttgagtttgagttcactctcttatagtgactcttgttccaactggaaaaccttcaaccttattcgggtctattctttgattataaggattttgcggatttcggcctatggttaaaaagggcctgttaccaaaattttacgcgatatttacaaaatataacgcttacatttaggggcactttcggggagtatgtgcgcgcaaccctattgttaatttctaaacatcaaatatgtatcggctcatgaacatacctgataatgcctctatatattgaaaggagagtatgagtaatcaccattccgtgtcccttatttcctttttgcggattttgcctctcggtttgggcaccccaaaacc

SEQ ID NO: 18963 - DNA, 465 bp, Homo Sapiens
  misc_feature (191)..(423): n is a, c, g, or t
gcaaccgtccgaaatattataaattatcgcacacataaaaacagtgctgttaatgtgtctattaaatcgattttttgttataacagacactgcttgtccgatatttgatttaggatacatttttatgcgactttttggttacgcacgggtatcaaccagccagcaatctctcgatattcaggttcgggcannnnnnnnnnnnnnnnnnnnnnnnnnnnnnnnnnnnnnnnnnnnnnnnnnnnnnnnnnnnnnnnnnnnnnnnnnnnnnnnnnnnnnnnnnnnnnnnnnnnnnnnnnnnnnnnnnnnnnnnnnnnnnnnnnnnnnnnnnnnnnnnnnnnnnnnnnnnnnnnnnnnnnnnnnnnnnnnnnnnnnnnnnnnnnnnnnnnnnnnnnnnnnnnnnnnnnnnnnnnnnnnnnnnnnnnntggggagatgggtaaaatggttgtcactattctatctgcagt

SEQ ID NO: 18964 - DNA, 367 bp, Homo Sapiens
ccacgcgtccgtcccttttttgattcagcttatacccgggctgaaaacctcaatttatgttcatgacagtggggatttttttaaatgtctacattctttctaataaactgttggaagacttcttggctgtccttttaagtgtctggcttactgtaatttttatgtatttaccatttactggaatggagtttatttgaggaagaatttgggattattcctctgtttgaaaaaagaggcttgctgtaatgtcacaggaaaccttttaaaagtggatctgtaatagcatattgtagatgcactttgcagcagttggaaaagaaagtgttgtgtgatttgattgaaataaaactaaatgtgttgtcctcct

SEQ ID NO: 18965 - DNA, 431 bp, Homo Sapiens
  misc_feature (283)..(292): n is a, c, g, or t
gcggaaaatgcctttgccgaattatccgccacgatcaatgtggtcagcagcgccggcatcgaaatcagcatggcggtctggtagtggatcaactcgcttccgtcacccgccttgcccatcgccatgttggcggcaatcggcgccatggccaggccgatggagataatcaccggcccgatcaccaccggcggcagcagccggtcgatgaaaccggtgcccttgatcttcaccgccagccccaggaaggtgtaaacgaaacctgccgccatcacgccgcccatgnnnnnnnnnncgaggccgaattggcctttggcgagattgatcggggtgataaacgcaaagctcgacgccaggaacaccgggacttggcgcccggtgaccacttggaacaataaggtgccccaatcctgcggtatacagggcgacgtttg

SEQ ID NO: 18966 - DNA, 580 bp, Homo Sapiens
cttttccttgctgttcttgccggtgtggatgtaggcgcaccgtgaagtccttgcaggtcgcgggcaccacgatgtggttgggcgcgaacttcttgccgggctggccttcgacgtcgatgctgcaggcgggatcggcggcgtgggcggcgccggtggccagcagggcgacgagggcgagcgggtaacggtattgcatggggaggcgtctccggggacagggaaaggcgtcagccgcgcttgagggcgcggatgacgatggtgagaaagaagggaatgccgaccagcgaggtttttttgccgaccgggatcagggcgccgggcagcacggtcttggaggcgaccgaggccagcgacaggatcagggcgccggccagcgcgctgccgggcaggtattagcgatggtcctcgcccagcatcaggcgggcgatgtgcggcgccaccaggccgacgaagccgatggtgccgacgaacgacaccgccagcgccgccagcgcgctgacccgcagcaggctcaccaggcgcaggcgcttgacgtcgatgccgaagctggcggcgcgttcctcgcccagcgcacggcggt

SEQ ID NO: 18967 - DNA, 685 bp, Homo Sapiens
cacccgatcagcagcacttgcgacatcgcgctgcgcttcggcccgcagccgagttccagcctgatcgcccacgtcatcagcgcaatgacgccgcgcctgtatgcatccgccgcctatctcgacagacacggcgcgccgcggacgccggccgacctggcccggcatcaatgcctggtcggcgcgccgacaggcgagttccaatgggtattgcgctcagacacgcgggaagagagggtccaggtatcgggcaaggtggcggccagcgattccggcatgatccgatccctggtccgcgcgggagtcggagtcgggccgctcttgaagttcgaggccggggaagccagcggcgacaggattgtccatgtcctggagcgatggtcactgccgcaggttcccctggtcgccctgctccccacgcgcaaggcgccggcgagagtcagggcgtttctggatttcattcgtcccaatcttcaggaatgctgaattcctcgagccgcatcgatggacatggccacgctgatcagtaccaccgccgcgatggaagccgcgaacacccgccgcgcccagcgcgcatcatcgctggccgagaaccccgcgagcgcggttttcagccagtagacgccgctcaggagaaccgttgagaggtacagattttccacgtatcccaaacgcgggaagcgcaagc

SEQ ID NO: 18968 - DNA, 665 bp, Homo Sapiens
cactccctggtcggcctgcgtcacggtctgcaggaacagcttgcggtagccgcgctcggcggccggacgctcgaccgggccggccgccatgcggcgcgccagctcggcatcctcgaccagcagggcgatttcgcgccgcgccaccgacaggcggatccggtcgccatttcgcacgtaggcgagcggtccgccaatcgcggcctcgggggtgacgtgcagcacgatggtgccggccgccgtgccgctcatgcggccgtcggaaatccgcaccatgtccttgaccccggcgcgcgccagcttcttggggatcggcatgtagccggcctcgggcatgccgggcgcgccggtggggccgatgcgcttgagcaccagcacgtcgtcggcggtcacgtccagcgcctcgtcgtcgatgcggcgggccatgtcctcggcgtcctcgaacaccacggcgcggccttcatgctccatcagcttgggattggcggccgactgcttgatgatggcgccgccgggcgccaggttgccgcgcagcacggccaggccgcccaccggatagatcggcgcggcgacgctgcggatcacgtcctgcttgaacggggcgggggcgtcgtccagctcctcgcccagggtgcggcccgagacggtcagcgcgtccaggtgcagca

SEQ ID NO: 18969 - DNA, 439 bp, Homo Sapiens
acactttgcccggctggccgactgccgccacctgaacgcggtggccgcgatcctgccggccaaggccgaattcagccaggacgtgttcgagcgcgccgaccgcgtggtggtggacgacctggaaaacgcccggcgcggctcgcgcgaattgcgcgaacgctatggcgcggacggcgcgccatgggatggcgtggcggtgctgggcgacctgctggcgcgcggcgagacccgcgcgccggatgcgcggctgacgctgttcaagggcatgggcatgggcctgtcggacctggcgatggcgcgggtggcgtacgagcacgcccgcgataacgggctgggcgtcgccttgcttccccagacccgcgagaacctgctgctggcgcaaccctgattccaatctcccccttcgaatcatcatgacgccggcgcgaaccgccgccgg

SEQ ID NO: 18970 - DNA, 551 bp, Homo Sapiens
caccatccccaccatcagcgccgccaggaaggcgccgcgcacccagccgatgccaccgatgacgatcaccaccagcgtcaggatcaggatcggttcgcccatgccggtctgcgccgacaggatcggcccggccatcaggccggccacgccggccagcaccgcgcccagcacgaacagcaacgtgttcaggcgcgcgatgttcacgcccagcgcgcccaccatcatgcggtcggtggagccggcgcggatcagcatgcccagccgcgtgcggtggatcagcgcgtagcagcccgccgccaccgccagcccggccacgatgatgagaaagcggtacagcgggtaggtgacgccgagcagatcgatggtgcccgacagccacgatggcaggcccatgctgatgggcgccgggccccagatgatgcgggtcagctcgttgaagaacaggatgaaaccgaaggtggcgagcacctggtccaggtgctcgcgcggatacagccgcgccagcgcgatgcggtccagcagcaggcccagcagcgccatgcccgccacca

SEQ ID NO: 18971 - DNA, 274 bp, Homo Sapiens
taatagctcttctataatgacactaaattttcattcacggggcgaaaattttattcgtcttgactgggaaacaacgggctttacccaaaaaaatcgcccgttacccaatccccctttcgccagctggtccccctttaaaaggcccccaccgatcccccttcccacccattgatcaccctgaatggcaaatgggaccgcccttgcaaatggcattaagccctgcgggggtggtggttacgcggggggtgtggggtatacttgcaaggggcccact

SEQ ID NO: 18972 - DNA, 821 bp, Homo Sapiens
cacccacgcgtccggatggccacacctataagaactaaggtacttagaaggaccgtgccttaattgcccaacattaatctatgtgaggccctgtggaggactctaaaaacagtgtcagtgaagcacaattctcctgtccagaggcttctgccaggtgcttgcccaatgtgtggcccagagccctgagatttgtaagcttcatcccatcacagagttcccttgcttttcatttgaccccagaagtgattgcaagttcttttcaacagttgaatatttgaaaggattttattcttgatccctgtacagaattatcttatcagtgatttgcttaatgttagagttccaagaaatttaatttgaacttgtaaatatctttatttcattggaagattccaatgggtggaaaagaacgaatggcaggatttcctcctcttgttgctgaagacattatgttaaaagaaggactgggggcatctgaagcagtggccgacatcaagttttcctctgcaggttgggtttcagtaacacctaattttaaggacagactgcatctccgaggctatacacctgaaggaacagttttgaccgtccggccccctctcttgccatatattgttaacatcaaaggacagcgcatcaagaaaagtgtggcctataaaaccaagaagcctccttctcttatgtacaacgtgaggaagaagaaaggaaagataaatgtatgagaccgaccttgttcactccagatattaactgtattgaacacaacaaaatacattgaatttgtattaaacatataacgcataaataaagctcccattctt

SEQ ID NO: 18973 - DNA, 268 bp, Homo Sapiens
  misc_feature (157)..(217): n is a, c, g, or t
gggggggccccccaaagggtcccacctttattacccgtggctgccaacccctaactcttctatagtggcccctaaatttaatttccggggcctcctttttaaacggccggaaggggaaaaccctggggttacccaacttaatccccttggaacccannnnnnnnnnnnnnnnnnnnnnnnnnnnnnnnnnnnnnnnnnnnnnnnnnnnnnnnnnnnnttgcccaccctgaatgggaaaagggaacccccccggaacgggccattaaac

SEQ ID NO: 18974 - DNA, 716 bp, Homo Sapiens
ggggggcgcgctctaagagacaccgttttacaacgccgtgactgggaaaaccatgttctttaatgggggtaaccaacttgcatcacatgcgcgtttttttaaaaggggggagagcggagaagccggggcgtatcccacttctcacctgttgcgcaacctcctcgttcaaggggaggcgatatgaagaagagcctcctccgcgtccgctctgccgaatatgcgcaccgtgagggggacaagtggcaccccccttgaacgcgctccttaccctgtcttgtgtgggtgtacccccgaattgcccgcatacccttgcgagcccaaatccggggcttcctttaggttctgcattattgttccagggtcccgaggtaaacaataggtatgaagagggggcccttaagggctgcactagatgcactgagtgcccccatccaataatatcatatcgggagtagtgcacttagtggaccaacgctagaaagcgagtttccccctgtggattggatcactgtacagaagtgagccgactggtccatgaggaacaccaccaaccgattccgcgaatatccttgtgatttaaggcgatttccacagttcccacttgtggtaacagtaccgttaatgacaaagtatcccgaatagttaaattactatagactcccattggggcgcgtctggacagaaactgggacgatgcctatttatttttaagaaac

SEQ ID NO: 18975 - DNA, 747 bp, Homo Sapiens
cacaccgccgctacccagaaaatgactgtgaatgcccagcaggcgggtatcccgctggtgtacgtcaaccgtcgcccggacatccccggcttaccggccggggtgggttatgtcggctcggacgagatcaaagcgggcgagattcagatgcgctacctcgcggaaaaaatgaacggcaagggcaacctcgcaatcatgctcggcttgctctctaacaacgccacccacaaccgcacacagggcgtgaaaaacgtactgaaggattaccccaacatccatatcgtcgaagaacaaagcgccgactggcagcgcagcaaggccatggacctgatgaacaactggatcgtctcgggcaagaaaatcgacgccgtggcggccaatgccgatgaaatggctatcggtgccgcgatggcgattacccaggccggtatgcaccctggcaaggacatcctggtgggcggcagcgacggcggacccgccggcctggatgcgatcaaaaaagatctattggtagtcacggcctatcaggacaacaagggccaggccgtcggctcgattgacctggcgctgaagatgatcaggaagcagccctacacggcggagctgaccattccctatgaacagatcaccaaggacaactatcaggcctttctcaccccttgattgttatcagcccagcgccaagcagaccggccagccccgacaaacagagcactcccactccataagcgagggtgcgccagggct

SEQ ID NO: 18976 - DNA, 398 bp, Homo Sapiens
cacgtgccggtcacgcatatcgacgcctatcctacggtgctggacgccgtcggcaacaccgagccggccttgcgcgaaggctatcccggccattcgctgttcgacatcgcccgcggcgagacgccgcggcgcaacgtgctggtggaatatcacggcatgggttcgaccacgggcgccttcatgatccgccacggcaagtacaagtacatcgaatacgccggctatcccgcgcagttgttcgatctggaagccgaccccgaggaactccaggacctggccgccgatccgcgccacgccgataccgtgcaggcctgccgccagcagctgtatctgatctgtgacccgcaggcggtcgatcgccaggccaaggcgcgccagcagacgctgctgcgcgagaa

SEQ ID NO: 18977 - DNA, 359 bp, Homo Sapiens
caccacggattccatcggcacttcgccctggtagggacagcccagcgcgcagctgatgctgccgcgcacgcggatgccggcttcacgggcggcctgcaccacgggttcgaagcgcgcgatggattcggcgatcgagcagttgatgttcttttgcgagaaggcctcgctggccgcgccgaagatgacgatctcgtccgcgccggccgccagcgcgccctcgaagcccttcatgttgggcgtgagcaccgaatagatcgtgcccgggcggcgctggatgcgcgccatgacgtcggcgccgtcggccatctgcggcacccacttgggcgacacgaacgaggccgcctcgacgttgggaaaac

SEQ ID NO: 18978 - DNA, 412 bp, Homo Sapiens
cacccacgcgtccgtaaatttatattacagtttaagaaaaccttatgaggcatcactagccactgttaatatctatttgtattcttataccttttcaatatatttgaacaaatatagtttctggcactatttttatactaggaaaaggagttactatgtatattatgcttagcttttaaggcattttaaataaccatgaatgttgatttcattactttcctttcctccatcacgagagtcatttcagatgactctttcatgacaaaatcactttaaaggaacacttacctccgattcctgtataaagtcatgagatggtcaaggtggttttccattgtgcaaattcttcacctgtcagtggtttcctcattttgccatgctttgtaaaaataaaaagaatgatcaagtaggt

SEQ ID NO: 18979 - DNA, 623 bp, Homo Sapiens
cgcaggcccagctcggccatccaggccgccagccgggccgccggcccgaccagcagcggctcgatgtagccggcctcgcgcgcctgcaccgccgcccccaggctggacgcgcacagcggataggccaccgccgtgcgcacccgcccggccgacagcgccgcggcccgcagcggctcgaacaagcggtcgctggccatggcgtcagccgcgcaccgggtcgatcggcagcggcacctcgcccggctggaacggctggttgacgtagcgcttgtacttgtccagcaggcgcagcggctgcttgagcgcgtcgcggcggaacggatcgcccagctcctggctcaccatcatttccagcacggtggtcttgccctcggactgcgccttgcacgcggcctgcagcgccgcgccgacctggtcggcatgctcgacccggatgccctcggcgcccatggaccgcgccagttccgcgaagttgggattctgcaggttgctgccgacgaaacggcggccgtaaaagtccacctggtttttcttttccgcgccccactggccgttgtggaacaccaccgccgtcactgggatgcgctcgcgcacgcaggtcagcagctcctggaagctcatgc

SEQ ID NO: 18980 - DNA, 269 bp, Homo Sapiens
ttaacgccgattttacaaagatatagcgctagcatttaggtggcacctctcgggagttgtgccggaaccctattggtatatttcttaatacatcaattagtattcgtcagtgagacataacgctgaaaagctccaaataatggaaaagaaagatagatatccacgtgtccggtgccgcctaatcccttttagcgattttgctcctgttttgctcacaaaagcctgtagaatgagaacgggaagtacgttggggcagagggttactcgaa

SEQ ID NO: 18981 - DNA, 673 bp, Homo Sapiens
  misc_feature (93)..(148): n is a, c, g, or t
ggacgttccccgaacgtgacgtgccaaaggcaaagaaaatgggatagaaaaggtgattagaggacctgctccaaattgcagcaatattcaccnnnnnnnnnnnnnnnnnnnnnnnnnnnnnnnnnnnnnnnnnnnnnnnnnnnnnnnnttgtaattcaagaacatttcctggagccgaagctcaggcatttccagacagaaagagccactgaggaccccgtgaaagggatgaaaacggaaccacacaaagatccaccttcacaggacagcagagatggagacaaaaagaaggccccaaaaactttcaggaaaaaacccgcagaaacaggttccataccaaggccccggggttgggatgccgttgccggacccacaagcagcctcgggagccggggaccctgcggcgaggttttctcaactcgcagggaagcgaaggccttggtgggggcccgccctgtgcccttcacaggcagctgcagctgcgggcgtggtgggggcccaccccgtgcacctcacggggagctgcgaggggcttgttccacccaaacactgagaagacaagaaaggggagtgtggggcccgggaaaatcccacccaggggagaagcaatgggacctttgtgacacggaccacgaagcctgcaagacgccagccctgccccaggcccgaggga

SEQ ID NO: 18982 - DNA, 463 bp, Homo Sapiens
cccccaagcgtccggttcaacgagaatgaagccatccaatggatgcaggaaaactgggtgatgtctgcgcgacagggaaggcgggagagatgccacagtccagatcgcctacctgtgctcccctcccctcccccggttttcatctagatttgggttttctcgcttggcctctcccgcaaccggagtgtgaaaggcagtggagggaggaccttgtctcctgttgcctttaaccctctcccgcccgccgcccttggccctggtcctcgctgtctctccatccctcgtgtccttcctttctccttgcagcgctcctacttcaccgtcctcctctgtctgccgctcctcatgcggatgccccctttttagtacccctttccccacgcggttccctttccggtttcatagagagaccgggtgggagggaggaggggacaatgaaaacagtaataaatgaatgaacccg

SEQ ID NO: 18983 - DNA, 664 bp, Homo Sapiens
ccacccacgcgtccgatcctgggcgttgcgttaagttgcttaactttcattctgtcttacgatagtcttcagaggtgggaacagatgaagaaaccatgccccagagaaggttaagtgacttcctctttatggagccagtgttccaacctaggtttgcctgataccagacctgtggccccacctcccatgcaggtctctgtggggtctttgggatggatctcctagggctgggctggaagcctcatgtactgttgtcttctaggtaaccaccctgaagagaaggggtggcatcaggaaccgcagggaaccaagcagcctttggtccagtgctgctccttggaacagttgagtgtggcctcaaaccattctcctgggtagctcagtcataaaacaccgaatgcctgcctcaaaatagcctctgagggaagggagctgttgacaagtgaagccctcaggttgtgtgggattccagcaggttattacagcttgtggggggagggagggtccattccaccagctttgaatcccagggtcccctcagcttcactgggccacagtgtctgtcccaggaagaagcaaatggacagtgaggatgatggagagactacagctgccttgtctaaaacctgggatcttaaaagtgttattttggcttttatttttt

SEQ ID NO: 18984 - DNA, 529 bp, Homo Sapiens
accttgttgggcaatagcaatctcaccccttcgctgctggaagccgtaaaggccctcatcgcgaaattggtcaacgccatccccactcagaacatccccaaggcctgggagggcactgctcaaggtaaggcattcattgcggggcagtatattgagcaggccagatcctcggtcgccgcaaactccttgaaccaggctgttgccctgcgcacaccggtcgctggcctgggcgccgctgcgatggtcaataaggcggacatctctccgatggagcttatggaaaccctggtcaacggtcggtttcaatcgcctgactggtacaccatgatttctggcttctctaccgaaaacctgctgcgcgagcagaacaagatgcaggccttcaagctgtggatggatcttcagtctttccagcagatggagcgtgttgaggcaatgctcgcgaccaatcttgccatggacgtgaagtccgattcggcggcacagctcgaagtggctcgaagcgccgcggcgaaggcggggcagtgat

SEQ ID NO: 18985 - DNA, 901 bp, Homo Sapiens
caccaggacgatggcagtgccggcggcgcagttgggaatgggagtgcgcttgcacaagcgccgacgagcgatagcgacgctatgccctctcttgcccaggcgccgggtggcgcggatcaacctgctctcgcagcagcccctgtggtggccgccggtgatgatgcaggaatcgtattcgacggtggccagctcgcttcgatcaacatcttcgccgaagttccgcgtgaaccgttcggcatcgacatcgtggcgctggcatctgccgctataccaatcatcgaaaccgcgctggaaggtcgggtccagcgccctgcagaagagacgcctccagcaggacaaggtggcctgctcgacgagcaggctacccgagtgtcgttgaacagtatcgccttgggtcttggggcgcccgccgctgaagcaggtgcaatggtggagaacatcattcaggccgcgacgcagggctccgaatacccggttcctcctaagcctgagaaagcgggcaaggaccaggaaatggaggatgtcatgagcaacctggagtcgctgattggggggcgtgcatgagcattgagttggccatgtcccgccgagatttgctgaaacgctctgtagtggctgggatcaccggcatgggggccttcactttcagcgccccgttgctcgcttcaccggcttgctgctgcctgccaattacgcgaaccaggcggacgcagcggcattctgggcaaagcctcgggtgttgaacctctatcggccatctaccggcgagcacaagcagatctgctactggcgagatggccacctcgatttggctggataccgcgaggcctgctacatgctgcgagatgtccgtgcaggcaaggctacggagatcgattgcggctgctcaccctcctccggg

SEQ ID NO: 18986 - DNA, 224 bp, Homo Sapiens
gggcggccgctctaaaggatccaagctttcttacccttgcatgcgacgtcttaacttttttttattgtcccctaaattcattttactggccgtctttttacaactttttgattgggaaaaccttgtttttacccattttaatcgccttgcagcatttccccctttttccacttggcttaataccaaaaaggcccgcaccgtttgcctttcccaaaatttgcccc

SEQ ID NO: 18987 - DNA, 201 bp, Homo Sapiens
cccccacgcgtccgatctaaatatattaagtaaaattacaccattcacttgttgggaaaataatctttggtttggaagatattaacataatgggcatcttagaatcataaatcacatgaaatgagagacaatgcaatattgtataattcctggatgatgcaattgttttaattgaattttcaagtgccattataaagtttt

SEQ ID NO: 18988 - DNA, 847 bp, Homo Sapiens
ccacgcgtccgctgggccagctcagctgctgactggtggaggcctgggctgaggcagggaggggagatgcctgcagcagccaatgcacagctgggggtctggtgagactgtgtgtgatctgggctacagggctttctctcctgctggcctgtgctgcctctcgccctgcccttgtgctctggagctgcccctcctctgagccatgtccaagaaataaagcgcatccatgcctccctgcacctgcagtcttaaacctgttgggctactcaattgataaacttcccctgaggtggaataggcaggatctggtgaaagtttggaggtggatggaggtgagggtaccttctagggctctgacttggtggaatggatggggctctttatggagttcaggatcttaggaggggagagaggagaagggagggaattcttttctgcttgtttagttgcaagtgttttgttgacagtacggtacaccaaacataaggtcgggggtgagaatagagggagagagacttgagaggcttcagaaatgcacggtgcttctaatcatgaggtcacccaacgagaggctggggagagaggcgcagtaagccagggtggagcgctggagaagccgatgtttaggaggcaggtgggcaggaagaagctgggtggggagtcaagaagacagtctaggagatgggaggaggactggggaagtggagtcctggaagccagggaggtgatgttccaagaggaagtggtcaacctcaacagatgaagtgaggcctgtggagggacaagtggagtgctacaggccatcactggtgaagcagtggggtcacgcacctgtggtgggtgagaa

SEQ ID NO: 18989 - DNA, 345 bp, Homo Sapiens
  misc_feature (56)..(64): n is a, c, g, or t
gaaaacgacgtggggggccctcctgaatgggaaaacactgtcgttacccaggctannnnnnnnngacgccgtcccccttaaacccgcgggttaccaaactataggcctgttaacaatctccctctttcaactcgcgcagcctgaatgaagagcgggacgcgacatgccctcccgcattattctcgccggtgtggtattaggcagcccctgagtgctccccatgatagcgcgctagcgcgcgctgctatcgctttcttgccttctattctcgccacggtcgtaggcgctgcccgtcaacctctaatccatgcgcttcctttagggttcccagctattcgcttccgg

SEQ ID NO: 18990 - DNA, 667 bp, Homo Sapiens
ccacccacgcgtccgttaaaatctgcaaatatctgggacctcctatctcttaagagcctcaatagttctttcttttgtgtttccttctgcctttacagatcttattcagggcttctcagcctgaacccccaaccagattaatttctccacagctggaattccaagtgcttggggataatgatacctctgacctttcttccttttgggaagtacttgagtgtgcagctgcatgaggcctcagcaggagagagattttaggtccaagaagctataccagtaggacaaggcaggaaaatactacactttcaggatcaagcccctctgactctcatttggaaactggatgtttgctaagcacctgcttcttaaggatgccgagggatttaatgatactcccagaaacctggagagattaatggggcctatggagaagtgctctgaactcactgttgggacttgaataaaattaaccattgtcatgttttcagaacaactaagctgttttatatttcatgtgcatgaaagccctagaactaagttgtgttatttccagaaatgaaatagatcccacagttagatgatgtggccattatgaagtaccaaatttataaaaatcactggaggtctgtctgagcagtacctaataaaatatagtatactgaaagtg

SEQ ID NO: 18991 - DNA, 284 bp, Homo Sapiens
cacccacaacgtccgcctcagcattaaatgctttagcaaatgacacattaaacctacctcatttcgatgaatatctgtttgagaattattgaattaatgcttgttaacttttttcatataatatttattattattagaagaacttacaatgtgttcaggtagtgtttatacactggacttgtgtaattacttgtgtaataaccatgaacaaaatgcaaggtttaacctttggttctgcccatgaagcatgtaatctttcttacacattaaaatcactgaatgtg

SEQ ID NO: 18992 - DNA, 719 bp, Homo Sapiens
ccacttaagaacagcacctggccgcgcaccaccaactggttgtcacgcacgtccacttgctggatcagcccggacacgtccggggcgatctgcacgatgtcggcacggatgtggccgtcacgggtccagggggcgaacatgtagtacatcaccatgcgccatacgacgacgcaggcgaaggtcaccaccaataacgtcaggactacacggccgatggtcaaaaaaggttttttcatgtcatgaggtatcgactgagtgaatccactgcgcccagcaacagagcgtagagacccacattgaacaatgcccggtgccagaccaggcgatagaagtggacgcgggtcaacagcccgtgcaccaccaggtacagcacatacgtaatgcccatcagcaccagcagcgtgggcaggaataccccgctgatatccagatcaccgatcataaaggcgctccatcgggtaacggcgcttccatttctgtgccgccgagaaattccacgccgggcaacaacgccaggcgcaagccactgagggcgtgcaacaagtgcaggcgggtttcgtcctcaccttgcaggccctggccgttgagggcgcggcgggtacggtcgagggtcatcagcagaccgctgggggccggcagacgttcaccggctttcagcaggccttgaagtaaccgccgacgccttcccctacctggttcaacaacacacgcggaacccc

SEQ ID NO: 18993 - DNA, 309 bp, Homo Sapiens
acattaaaacgtccgttccaaagtaaagtgcaagacctttatatccttgtaaaaaaaggactttccccctccgttttgtttaggctgcagtggttgagggtgctagaaatttaatctgtgaatataaaagatactactatagctgtatttggacatactgttggatattttgtaggtttattcacaaatccttagataactagtaaaacaaaaagtttaataagagtttatgttcaccttgtttcccaagaatggtactatgcaattttgtcgttttgttttcttgcctaagtgatatagatttttata

SEQ ID NO: 18994 - DNA, 795 bp, Homo Sapiens
cacggcaacatcaaccgcatgaaaaccggccacgtcctgcgcctgccggattcggggcaaagcaccagcctgccgcagccccaggcgattgctgaagtgactgcgcaaaacgcggcgtggcgcgaggggcgtcgcggcggtaatcagcccgccggcaaggcgcaactcgacgccaccaagcgtacccaggccggtaacgcgcctgcgcagaccaacaccaaggacaacttgagcctggtctcggccgaagcggccaagaaaggcgtaaagggtggtgctggcgacagccgggccttgaacaacaagctggcggtgacccaggaaagcctggattcgacccgtcgcgagaatgaagaactgaaaagccgcatggctgacctgcaaagtcagctggacaagctgcagcggctgatcgagctcaagaacaaccagttggccaagttgcagaccccgggtggcgctgcggcgcagcctgctgccacggctgcgatgccggctgaagtggctgcacaaccggcggcgccggctgcggcaaccccggcagcaacccccgtggctgcgccggtcgagacgccggtcaaggcggacgcggcgccggccatcaccgaaggcaaattcaacgacctgctgaccaacccgatcgtgctcggcgtgatcggtggcgcggcgggcctgctggtgctgttgcttctgctgctgtgggcgcgtcatcgcaacgcgcgccttgaagaagagaagcacctgcgcatggcgcgggccctggctgaagagcccggaatttgcgccgaacattga

SEQ ID NO: 18995 - DNA, 280 bp, Homo Sapiens
cacccacgcgtccggttggcacacaggcagtagtttgttcacctctgctgtaagttaatttgggttaacctttgtaggagaaattacagattatttttgtctttgttcatagtttttttgtttagggactgtagtggattatggccaagcagcagtagctagttaagtcttaatcatgaaggtagtagaaacctagaataaaattattatgcccttttcactcatttcataatatgtttgtattgccgtgttgaaaagccaaataaaatacaatccagtt

SEQ ID NO: 18996 - DNA, 514 bp, Homo Sapiens
cacctggtgcagctcgacaaacttgtcaataaagcttttgcacaaggcttcggttttcgtcgcgtccaggcccagttccggcggcaggtccgagcgcaggatgatcccgttgacccgctccatcacgtagaactcggcgccgatcaccgactcgtcggtgcaatgcacgtaggccttggggcaatacgggaaaccgtccttgagctggttgagaatccggtattcgcggcccatgtcgtgggcggacttggccttgtggccaaagggcgggcgacgcagcacgaattcctggccggggtattccagcaggtacgtcaggttcgaggcaccacccgggaactggctgattttgacgttgccgctcaagcccgggatatgggccttgaggtagggatcgatgaggctggcatcaagttcttcgccggggcgaatctgggtcgattggtcattaagcgccatgcttatcccttctgcttattcttaaggccttggactattggctaatctaatgtgc

SEQ ID NO: 18997 - DNA, 700 bp, Homo Sapiens
ccacgcgtccgacctccccggaggcaggctccaggggctaggtttgcttacctgcttcttccccaaggcagcctatggagtcatcctggctcctggcagcctctctcccttgcagagtggggccgagctcttgtctcccatatcccccggtactataagattgctgttgagcagtgtcagaaaatgacctcgggtctgaaaactggacctctggctgtttacagccctctgcctcctaggcccaaagtggaaagatctgtgcacctggtttctgttgggcataggagctatttatggaataagatgtgggggaggaggacctgtctctaacctactgtacatcaagcacagcgccctgcactttcgcatgcattcttattaaatcctctaagtgctagatgctttttatggctttcggttttataaatggggtagggaccaactgaaagacaggaaaataaggcccttgatgccattaatcttttatcctcttgccctcattggtatcttcatcccaccttgggtcccagtcccctctcctgttcccacaccacctgtcacatgcaagggatgatggctgtctgctcctgggtctatgctttgtggaagaagatgctgtggagggagcatatccaagctctaaagtggcattctctcccaccctttgcagttctgcctcctgggggcattgctggccccc

SEQ ID NO: 18998 - DNA, 649 bp, Homo Sapiens
cacccaactcgaacgcgaggtcaagcagcgccaggaggaaacccatcgccgccagacgctggagcaggccctggccgcgccgctggcggcgggccgcgtgacgctcatcaacggccgcatcggcatcagcggcagcgtgctgttcgcgctcaattccgaccagttgcagccggagggccgcgaggtgctcaagagcctgatcgagccgctgtcggcctacctgaaggccaacaacgagatcctgatggtcagcggctacaccgacgaccagcaggtgcgcgagggcaaccggcgctttgccgacaactgggacctgtcggcgcagcgcgcgctgaccgtgacccgtgcgctgatcgacgaaggcgtgccgtcggcctcggtgttcgccgccgcgttcggcgccgaacaacccgtggcctcgaacgccgacgaggaaggccgcgccaggaaccgccgggtcgaaatcacgcctattcccaagccgtccaacggcacggaggcgccgcgtggccagtgatggcggtcttggccacgcgctgacgaccgaggcggacgcctcggccgacgccggcctgccggcggacaacgcgctgcgggcctggctcgagcgcggcgactaccggttcgatttggttcggtttcctttttc

SEQ ID NO: 18999 - DNA, 433 bp, Homo Sapiens
cacccacgcgtccggcagaaggacatcttgctttcttgaacctattacatctattcaaaagtggaagttttcacaggtaacctctctgtatcaagtaacacaagatcaaataaaacacgagcaatccttgtttcgtgcctgaaccagacaggtgatattgaaatcagttatacaaatgtgtactaactcttcataaagactatccaaagagggtattattatcatctgcatttaatagatagctatcctaaggctgttgtaaaatagattctcggatcatacctatatgaagcagagaactggatttcctttcctggcagtctgactccaagatcctttcttagaaacaattatactgtaaaaactgagaatgaataaaacccaacattggagactgattttaacatctgttaatcttaaaccattaaataat

SEQ ID NO: 19000 - DNA, 716 bp, Homo Sapiens
ccccccggcgcccagggtttaggttacgggcgcctgctgctggagttcaccgaacgccaggccaggcagggttccatccgcctctataccaatgaagcgatgaccgaaaatatcgcgttgtacgcccgcaaagggtatgtggaaacccatcgcgccgaagaaaacggtctgcgtcgggtttacatgcaaaaagagctcaccgcctcgcactgaaggagttcccatggaaaacacctggctggcccaggccaagcgtttgcaagcgttggcctccacggggctgcacttctgtaccgatgacttcgagcgcgagcgcctcgaggaaatcgcccagattgcccacagcatgctggcgcagttgggcgaggtgccgctggagcgcatcaccgggctggtgccggattttgccaagcgctattcaacgcccatgattgatgtgcggggcgcggtgattgagggcgaccggatcctgttggtgcgcgagctgacggatggctgctgggcgttgcctggtggttatgcggatattggtttgtcggctgctgaaaacatcatcaaggagatccgcgaagaagccgggctgacggtcaccgcccggggcgttgtacagcgtcacccaaaaggccaaaggcttgtaccggccggatatccgcgacttctacaaactctattttctgtgcgaacgggttgatccaactggccacaaacagcggggt

SEQ ID NO: 19001 - DNA, 600 bp, Homo Sapiens
cacaaggcgctggagcatggcgtgggcgccgtctcggtgtgcaattcgcatcacttcggcgcggccggcgtctatgcgcgcatcgccgtcgagcgcggcgtggtcgggctggtcaccagcagcgccaacggcgtcatcatggtgcccacgcgcggcgccatgcccatgctgggcaccaaccccatcgccttcggcgcgccggccgcgcacaacgagccgttcgtgctcgacatggccaccaccaccgtcgcggccaacaaggtcaaggtctatgacttcctgggcaagccgctgccgccgggctgggcggtggacggacagggcgagccggtcaccgcggccgacagcgccatgcagttcatcttcaagcatcccgagggcgggctgacgccgctgggcggcacgccggccatgagcagccacaagggctacggcctggcgatgatggcgcagatcctgggcggcacgctcagcggcagcgcgctggcggcgcgccgcaatgtcacgcgccgccccggcgagcccgatgacgtctgccacttcttcctggcgctcaatcccgacgcgttccgcgccagcggctcgttcgagtctgacatg

SEQ ID NO: 19002 - DNA, 247 bp, Homo Sapiens
  misc_feature (51)..(62): n is a, c, g, or t
attacgcttaaatttaggtggccttttcgagatgtgtggcggaacccctannnnnnnnnnnnaaaacatcaaatagtacccgccatgaaaaataacctgaaaaagctcaaaatattgaaaaagaagaaataagtattcaatatttcgtgcgcccttattcttttttgaggatattcctttcgtgttttgccccccacaaacctggtgagattaatagatgctcaaatacatgggtggcgagaggttt

SEQ ID NO: 19003 - DNA, 592 bp, Homo Sapiens
  misc_feature (233)..(341): n is a, c, g, or t
taacactggcgcgggtgggggcccgggaatgggcctgaccctgggccggggtctgggtctgaccctaggcttgattgaggccccctttgaggcaaaggaggaggcggccccggccgaggcggtgggaccctgggccacaactctgttgtctgcggctccccggctggaaggcgtgtctggcgccgccccaccggttgcttgtgtgggaaaaatccgctacaaaccctgttcannnnnnnnnnnnnnnnnnnnnnnnnnnnnnnnnnnnnnnnnnnnnnnnnnnnnnnnnnnnnnnnnnnnnnnnnnnnnnnnnnnnnnnnnnnnnnnnnnnnnnnnnnnnncctttgagcacatcccctctttcccagctgtggggtaataaacaaagaggcccccaccgatccccttccccaacttggcattaagcgcgcgggtgtggtgtttaccgcaagtgaacctacctgccagcggctaacggcccgctctttcgattttcctccatttcgacagtaagcggatccaggaaagctaaatacggactcccttaggttctattatgcttatggccctcaacaaaaacctgataggtgag

SEQ ID NO: 19004 - DNA, 290 bp, Homo Sapiens
ccacgcgtccgtgaaaaggagggtcaggagggagacacaacatatttttgatcatgaaaaagtatcttaattttaaaaaagtgaaaatgccattttattttgaatcccttttagaactcacgacccaagttcatcaatgttgaataatatcacgtttaaataacaaaaaaatatggactttaaaaaatctcaaattttttagagacagggtcttgctctgttttccagattggagtacagcagtgcattcgcggctaactgcagcctcaagcactggggctcaagcaaac

SEQ ID NO: 19005 - DNA, 877 bp, Homo Sapiens
agcggtccgcctcgctgatggacagctcgatttccgggtagcgcgccatgaattgcggcagcgccgggatcacgaagtacttggccagagtgccgtgcaaatccacccgcaggcggcccttgggggccaccgagcggaaggccagttccgcctcttccagctccgccagcagttgcacacagcgcaggtaataggcctcgccatcaagggtcgggcggacgcggcgggtgctgcgctccagcaggcgcgtgccgagccaggactcgaactggttgagggtgtgggtcagggtggcacgcggcaggttcaggtcatcggccgccagcgtgaagctgctgcgttcgtaaatcctcacgaacactttcatcgctttgacctggtccacggcgcgcctccattgttggcgattcttgaacagtcaaggcaactctggcgtatttatcggcctgggtaaacatgtgaatctgcttccacacccaaccactcccccaaggaaaccagatcatgattacccaagttgctatcgttaccggcgcctcacgcggcatcggcgccgtggttgccagacaactggctgccgacggttatgccgtcgccatcaactacgccaacagcgccaccgaagcgtcaaggctggtagtggagttgcgccaggccggccaccaagccatagcgatccagggcgacgtagccagcgccgccgacgtcaagcgcctgttcgacgagaccgaagcccagctgggcaaggttgatgtgctgatcaacaacgccgggattctcaaggtgctgccgctggcccaacacagcgatgagctctacaaccagaactttcgaacatcccatacccgcggcaccttcacgcctgcgtgaagccgcc

SEQ ID NO: 19006 - DNA, 727 bp, Homo Sapiens
tcgggcctgcaactgggtaccggtgtggccatcgttggcactcagaagaacttcagcgccggtaacttgcagcaaaccggccagccgctggacttggcggtcaacggtaagggtttcttccagatcctgcagccggacggcaccaccacctacacccgcgacggtacgttccacctggacgccaatggccaggtcgtgaccgccaacggtttcgcgctggagccggcgattgtggtgccgaacaacgcccagactttcaccgtcggcaacgacggcaccgtgtcgatcactgtggccggcaacccggcctcccaggtgatcggcaacctgcaaaccgccgacttcatcaacccggccggcctgcaggcgattggtaacaacctgttcctggaaaccgcgtccagcggcgcgccgcaaatcggcacccctggccttaacggttttggtaccaccctgcaaagcaccctggaaacgtccaacgtcagcaccgttgaagagatggtcaacatgatcaccactcagcgcgcctacgagatgaactccaaggtgatttccaccgccgaccagatgctttcgttcgtaacgcagaatctgtaatcaagtctatggggcgcccttgaaggcgcctgcaacaccgtgaggtatgggtcatgaatcgctatgtttctgttctggcatgagtgggattgctgcgctggcgggctgtgtcgcgccgacgccaaagccc

SEQ ID NO: 19007 - DNA, 323 bp, Homo Sapiens
taaagaaccgggcacgatcaccacgcttttaccggtgcccggctggggcttggctgcatcggcggccgaggccactaacggtgcagcgagtgccatggcgatcgccagggaagaaagaatacgcatgcgactctccacaggccttggggcctgatcattgttgtgaaagggttaacggcgttggccggacaacacgcggtccagtgaccaggccccgccgccatacgccagcagcggcagcaacagcccggcccaggtcaggtgggtcggccaggcatcggggtacacgaacacctcgatcaccagggtcatgcccaacagcg

SEQ ID NO: 19008 - DNA, 441 bp, Homo Sapiens
cggctaatgtgttaaaaatgacttgatttacaaaatttacgcgtatttaacaaatattaacgctacattttagtgggcacttcggggaatgtgcgcgaacccctattgggttatttctaaatcatcaaatatgatccggctcatgaaacaataccttgataatgctccataatatgaaaaggaagagtatgagtattcacaattcctgtcggcttattctttttgcggcatttgcttctgttttgctcaccaaaaccttgggtaataaaaatgctgaaatcagttggtgccagaatggttaactccaactgggatccacaaccggaaaaatcttgaaagtttcgccccgaaaagcttttcaataggtagaaacttttaaggttttcgcattggggcgggaaatacccctatttggaaaccggggaaaaggccaacccttgg

SEQ ID NO: 19009 - DNA, 441 bp, Homo Sapiens
  misc_feature (69)..(123): n is a, c, g, or t
  misc_feature (307)..(382): n is a, c, g, or t
aaatacataatcttaaaagaaaacataagatactttattttaatatacgtgactaaatgtaaaacctannnnnnnnnnnnnnnnnnnnnnnnnnnnnnnnnnnnnnnnnnnnnnnnnnnnnnnggtagcattcagcctagaggcaactgctgtttgttaaatttttcctgttcatatattttgcacattttcttatgggttagttttcttctcattgttttgggaagttcttaatatatttggggtatttatctttcattcgttgtctgtgtaacaaataacttctgccatatgggttgtctgcacnnnnnnnnnnnnnnnnnnnnnnnnnnnnnnnnnnnnnnnnnnnnnnnnnnnnnnnnnnnnnnnnnnnnnnnnnnnnaatggagttgatttcttttctcattcaagcttttgagaataaattggagttgaattttt

SEQ ID NO: 19010 - DNA, 255 bp, Homo Sapiens
tatcttcggtctatttggtaaaaattgagctggattaaacaaaaatttaacgcgatattaaaacaattattaacgcttacatttaggtggacactttccgggaaaatgggcgcgagaacccatatgtgtttatttttctaaatacattcaatatgttacacgctcagaagacataacccgagaaaagcgctcaataataatggaaagggaagagtagaaatatccaccatttccgtgcgccctttatctcttttt

SEQ ID NO: 19011 - DNA, 799 bp, Homo Sapiens
ccgccggcagcgcccgccacagctgctcgcggatcgcgcggttgtggcggacgctgttgcagtcggatccctgcgccaccaccagcaggctgtcggcggcccgcgccggatcgcgctgctgcaggtaataggcgatcgacgagccgtcggggcgcggcaagcggccctgctcgatcagttgggcgtggacgggcaggcaggcggccaggatggcggccgatagcagcaggcgaacccagcgctgccgcaatcgcagacaaacccgcggcgtctctttgatttttgtacccagcgtcatgctgcgaaggatacgccatgtccaggcgtccgagttttcgcccacggccgccgcgtcaaggctgctggcgtcatagactgcctcgttgcaatcatgggttgccgtgcgcgcgccaccacaccggaaatctcattgcgacagcggcaaaaagcccaatgcctggcgggcattcatgcctcatgcgcgcgtacgcgcacattctccagtgggacccacccggcagccccatcggacaatctcgtcgcccacacccacccgttttgttgacgcccgccatgcaggatctcgcccggaaccacatccaattccttgttggtgaagtcctcccgcaacgaaagcggtgccgtccccgtgccgcgccaggatctgcccgggcacgaaacccgcctcttgcctgggcgccgagcacaggtaccattcgggcccacccttccgccccgtcatatacctccttcgaccgataacgatcgcccgttttcaagaccaggggctcggggaatt

SEQ ID NO: 19012 - DNA, 693 bp, Homo Sapiens
  misc_feature (507)..(515): n is a, c, g, or t
ccggaattcccgggtccacccacgcgtccggaacaaggcatttcactgagggttggaaagctgaaccataaaggaatctacatcaacaattcccctcaataaaaaagttcaatagcagagatttttgcaaaaagatttttaaaagaaaagagtttttcttaatgtctcacttgctggcccagattctttttcactggggaatatcgagtattgttttgatgattggaaagttgactttttatcaatttagcacttgctctaaaagaccatattttgagcccaaaactgagctgtaagttttaagatgtgcacgctttctgaattgtttatcctccttgacacaaggccactggagaaacttgcaccaaaagattacggttaaacaaaacgaaacttgtcctccccggaaaagaaatgatgtgggaagaacacttcccctttggtaaagctactgcaaattaaaaagaaagatctcagtgtgaagttggtgatgttttgttgcaaagnnnnnnnnngtgcaatgaaaactccatcagctctttcagctgagaaaaagaacacaggaaaatgaagtgcagggaagactcacaaagctcttttggaaactggagactagaagctttacaaggatagccttttgtgagtggattgggcccctgagtggattgacgatttccactggtatggatgaag

SEQ ID NO: 19013 - DNA, 495 bp, Homo Sapiens
ccacctgaccgtgtggctggccatcgtgggtgtggcgccgttgttcatctcgcgcttcacgcgcaaggcggtctacggcctgagctttttggtggtgtacccgatcgttgcctacttcctgctgcacggcgggatcttcggcatgaccaacgtggccaccagccaatggggcggcttgatgctgaccctggtgatcgccaccgtcggcattgccggggccttgcccctgggcatcgtgctggcgctgggtcggcgttcgaacatgccggcgattcgtgtggtctgcgtgaccttcatcgagttctggcgcggcgtgccgttgatcacggtgctgttcatgtcttttttgtaatgttgccgctgttcctgccggaaggcatgggcatcgacaaattgctgcgggcgttgatcggcgtgatcctgttccagtcggcctacgtggccgaagtggtgcgcggtggcttgcaggcgattcccaagggccaatacgaggcc

SEQ ID NO: 19014 - DNA, 742 bp, Homo Sapiens
accggtccggaattcccgggtccacccagaggggcggcccaggcgggcgcggcccattgggcggagccgatggccgtggcgccgggcacctgcgccgaggcgatggtggccagcacccagtcggtcagttgcagcgtcagcgccaccaatccggtccatagcgcggccagcacggcgaaaccgagccagatgatttttttcattgcggggtactccggtgattcaggaaagaaacgccacgatagagcggaaagccattctgaaaaaccagcgtctttgtgacaatcattaagaaaaaaccgaagtcttggcatgcgccagtatctgctgcaccagcggatggtgctgcccgcggcggttgcggatgccgtagatctcctcgtgcacgctgtcgcagcgcgccagcgggcgcaggccgcgcagcagcccgacgtcgtcgccgcccaggcggctgagcgggaacacgcccaggccgcgcgcggcgaacaccgacatcaacgcgctgtcctcgaactcgccgaccacgttgggccgcaggccctgttcattgaaccaccggtccagcgtctggcgcagcaccgagtggccggtgggcagcagcaccggcaggcgctccaggcagtgggggaagtcctggctgtcggccttgcgcaccagccgcgccgggccgtaccagtccaccggcgaggacacccagccgggtcgctggtcaggcgcaggttggggttgggccggtgcgccc

SEQ ID NO: 19015 - DNA, 692 bp, Homo Sapiens
gcaggtaccggtccggaattcccgggtccacgacggtaattggccgctccactacgaatacgacctgcaaaaccgcctcaccgccgagcaccagggctggggcacgctacgctaccgctacgacgaatgcgggcaactcaactacctgcgcctgcccgacaacaaccgcctcgccttccaccacgacaaaggcggcgaccttgcctccatcgaactgaatggcaaaacgctcacctcgcacctgttcaaatccggccgtgaacatcagcgccagcaaggccaacttctcagccactaccactacgacgaccagggccgcctgcacgcccacgccatcacccaacaggaacaacgccaccagcgccgccaatactactacgacaaacgcggcaacctgacccgcatcctcgacacccgtaaaggccagcacgactaccactacgacccgctagatcgcctgacccgtgccaaccattcgcacgacctgcaggaacgcttcgtccacgatccggcgggcaacctgctgatgcaagaccgcgtcgggcccagcatcgtcaaaggcaaccggctcttgatgcaaggcgacccggcattacgactacgacgccttcgggcaatctcctgcgcgaacgtaggggccgagcccagcagttggttacagaataccgctacgactgccagcaccgactgat

SEQ ID NO: 19016 - DNA, 908 bp, Homo Sapiens
cacgcacagcaactgcggtgcgccttcgagttgcagcaacgaatccccgaggctggaggtagtcagcagcaaccgcggctcggcgtccgcgatgatcgacagcaggcgctcctgatgatgacggcgggtggactccggcgggtaagccggtactgcgatgacaccggcatacaggcaaccaaagaacgccgcgacataatccggcccactggggaacaacagcaccgcgcgatcgcccaggtttgcgttggcctgcaaggcggcggcgatggtgcgggcgcgcaggtcgaggtcgcggtaactgaggacgacgctttgctcggccgtctcggcaaggaagcgcaacgccagttgatccggggtttgtgcggcgcggcgttgaagggactggaccagggtgcggggaagttcgaaggcgtccatcatggggttcctgcctgaaatcggcttactgggaaatcggggaatgtatggccggggggcttgttcagccggcggcccgggccatctgccgcgcggcgtcattgcgccagcgggccaagtgttcgtcggcgtaacgccgtatacagcgcagtacagaactctcgtgctgcaccaggaagaaatggtgaccgtcgaacatgtcgagggagaaaccgctggcggtgtcttgctgccagtctagcagttggtcggcacgcacactgtcctgcttaccgccaaagacatggatcggcaggggcagcggctcgcgctcgccatactcgaaactgccgcaaagaaagaagtcggcccgcaggatcggcaacatcaactgcatcagttcggcattggccaacacctcttcgccggtgcccttgagctcacgcagcgggcgatcagttgctcgtcgtttttctcgatggcgtattcgctgacatcgcgacggg

SEQ ID NO: 19017 - DNA, 725 bp, Homo Sapiens
gaactaaatcatacagatatctcattttagaaatagaaaattgccatttagaaaaaaagacccatttttgccaggatgtctagagagccttttttataccacttatatttatcagagaaccacttactcactttctactttgtcagtcttattttttatgtcttatttattctggagactagggaggcctaatgaaatcagttctgccctgtggatttttaggggctccagaaaattaaccctagaaagattctgaaagatcatcttgtcctacagtcttgttaagacccaaacactgaaacatttgatctaggccactccatcagttagtggttgagggaggcacattatttatagaccatgatctgtctctctgccagaccagaataactccatggaatgtttctatccggtccaattggttcagttatttcaatacattattgctgctgcacactgagcccaagcacagtgaatgctctttgtggcaggtacatacgccaaaattaggttaaattttcccttcagaaatttctttttaaatacccacacatgaacaaatggacagttggctccacgtgtaagtcacaatcttttacatagattaaattaaatttataaaattttatctttaattgacaagcaatattcatatttatcatatatttatgaggtacaatgtgatgttttgatatatgtttgcattgtaaggatgatgaaatcaa

SEQ ID NO: 19018 - DNA, 705 bp, Homo Sapiens
  misc_feature (414)..(458): n is a, c, g, or t
cacttcaagcgtccgcggacgcgtgggctgtgctgtgggggccctaccttctggcagttatgaatgaggcaggcactgggagctggagaggcagcagtctcttgctctgagggccctctggcagcgccttctttccctgaggtaggaggaccctcccctggtacttaattaattgcagtccctgttctgctctgttgttcagggtgagtggctggcctggttccaggcccacctgattagcccacctttggcaataagtcacatttctcttcctcggctctgtgtcccaccataaccccttacgtccccttccctggacttttcacctttgccctccaggcattccctgctgagtgggcactttcccacatccagggggtgggagcagaccaaggttaatcttgtcctggctcnnnnnnnnnnnnnnnnnnnnnnnnnnnnnnnnnnnnnnnnnnnnnggctgggctcacaacagctcaggccaagggtctgggatccaggatcactacagagctggtagctgggcctggctggagctggccagtggttcagcagcaagtctggaaaaggaaaagccgtgggcgcatctccgccagacctcctgtctgaaagagagcccatctgctcctagaatctccacagctacatctgcagaggaggaggggtagtgaggcaagtgtgaggtttggttttaaactgaaaagg

SEQ ID NO: 19019 - DNA, 538 bp, Homo Sapiens
acaattaaaaaaaccgtcggggctcaagtacaggtactcggcgaacctttcccatgaactcgtggtacaccggcaggccgatggaaccgtcggcgtggaataccggcgcggcgcgcaccagcgtgctgatgttgaaaaacggtgaagtgaccaattgccgaggtgcagaccagtgggtgccgagatcgtccgagaccatcacgttgatcgcactggtggcccagccgcctaccgacaccgagacgtagaacatccacaggcgattgtccggcgccagggcgatcaccgggttgcccagcttgcggatgtagcggtgagtgccgtcgcgggtgctttcccgggtagcgagtacttgctccgggccccattcggcgcttttggcgtcaaagcgcgcggtgcgcacttgcacatcggcggcaccttcgcgagaaccggcaaaccacacggccatcaggtcgccgccgggcagcgcagtgaccgaggaggaatgcacaaagtcattgagctgcgaagagacaaagcggctgctgtattgcgg

SEQ ID NO: 19020 - DNA, 726 bp, Homo Sapiens
cacttcaaagcgtccgcaggtatatccctgatatactgatttcctgtcttttgggtatatacccagcagtgggattgctggatcatatggtaactctatttttagttttttgaggaaccaccaaactgttcatagtggttgtactaatttacattttaaccaacagtatacaagggcttccttttctccacattttcaccagcatttgttactgcctgtctgttggatgtaagacattttaactggggtgagatggtatcttactgtactttttatttgcatttaccttatgatcgatgatgttgagcaccttttcatatgattgtcacttctatgtcttcttttgatcaatgtctattcagatcttttgctcactttttgattggatcatatttttttcttttgaattgtttgagctccctatatattctgcttattaatcccttgtcagaggggtagtttgcaaatatattctcctattctgtgcattgttgattgtattatttgctgtgcagaggttttttaactggatgtaatctcatttgtccatgtttgctttgattaccggtgcttgtggggtattactcagaaaatcttttgcccagatcaatgtccctggagattttctcaatatttttcttgtagtagtttcatagtttgaggtctcagattaaagtctttaatgcctttttaatttgattttgtaaatgggggaagatagaggtt

SEQ ID NO: 19021 - DNA, 810 bp, Homo Sapiens
cattgaatccaccaggccttccgctgccagcgccggcagcatctcggcgcagatgtgcgcgatgtaagcatcggcacggtccacgtactccggcggcaacgcgtgagctgccaggcacgtgctgcgtacgctcaccggcagctcggtgccgaggcggcggatcacccgcagaatcttgcgctcgctggccagatccaggccgtagccggacttgatctccacagtggtcacgccatcccgcagcaaactgcgcaggcgctttcggctactttcaaacagttcatcttcggtcgccgcacgcgtggcgcgcacggtgctggcaataccgccaccggccgctgcgatctcggcgtagctcacgccttccagacgctgctcgaactcgccgctgcgattgccgccgaacaccgtgtgggtgtggcagtcgatcagcccgggcgtgacccacgccccttgcaggtcatgggtggtcgcgtagtccgccttcggcagttcggcacgcggaccgatccactcgatgagcgtgcccgaggtcacgatggcggcatcctcgatgatcgagtatttgccctgggccatggttgcgacgtggcagtgttgccaaagcgttttcatcaacgcctccgttgggttatcgatgagacaaagccgggtcgtaatgaaccttggctgcttgcccggcggcgggtttgacccacagcagataggcaacgatcagcaaaacgatccatacggcacccaccataagagcagcctggggtgtccgggaagtaacccaacacgccgaaagataaacagcatgaacacgat

SEQ ID NO: 19022 - DNA, 378 bp, Homo Sapiens
  misc_feature (54)..(62): n is a, c, g, or t
  misc_feature (138)..(197): n is a, c, g, or t
  misc_feature (217)..(231): n is a, c, g, or t
  misc_feature (277)..(302): n is a, c, g, or t
cccctagggaaaccaagtttttatacggggggcggggaactcttaccccgcccnnnnnnnnnaaaacccgggggtttcccaatttttttcctttgggagaaaccccctttttcccggggggggtaaaaagaaaaaggnnnnnnnnnnnnnnnnnnnnnnnnnnnnnnnnnnnnnnnnnnnnnnnnnnnnnnnnnnnntttagggcccattaagcgcnnnnnnnnnnnnnnnttacccccgggggacccctatttttggcgggcccccaacccccccnnnnnnnnnnnnnnnnnnnnnnnnnncccccacttttcgcggttttcccccgagagctaaaaagggggggccccttttgggtcccaaatttggggttttcgg

SEQ ID NO: 19023 - DNA, 779 bp, Homo Sapiens
gggggggccgctacaaaggatcccttcttaagtgccccggcattccaattcattggccttcttttttgcaccctatgtctgggaaaacgccggcctttctaaaactaatcgccgggaaacacctcgccctttcccacacttggccgcctagcaaaaaatcccccttcgatcggcgtgtctcttgtacccgcccataatggctagtgtgagtggctgtttacccgcaccatgaccgctagcggtgtggtgggtttacgcccggtgacttctatttttgtccattctcttatcgcccggtcttctggcttcttcgctacgttctaaaccaggtgctccgtctatgctcctgattctactgatttgggggatctcttcccggtaacaattgatgagtttgagggtctcgaaccgagacaactccctgaggagagtttcacgccctggacctcggacctgatgatcgttattcggactcttgctctggagctgcaacatctctaaacgcgatcttggttcatctttgaataattaaggaacttgccgatcctgtcttttgattaaaaagaagctgcactatcacgacctattgtctaatgtagaacagatttaacactatttaatgcgaggtcactacagagtacggctacggatcccgtaggtgctttcgtgaatgggctcgaactctatctgcttatgtcatataccctcaatatgttcgctcatgaacaaggacaggatgagtgtcaatatattgagaacggaaagtgcttttgcagttt

SEQ ID NO: 19024 - DNA, 915 bp, Homo Sapiens
cccaacgccgccatgcaactggtgcgtgcacccaagcaattccacgtgatcgtcaccgacaacctgtttggcgacatcctgtccgaccaggcctcgatgctcaccggttccatcggcatgctgccgtcggcgtccctggatgccaacaacaagggcatgtacgagccgtgccacggttctgcgccggacatcgcagggcagggcattgccaacccgttggcgaccattttgtcggtgtcgatgatgctgcgttacagcttcaacctgaccgacgcggcggatgccatcgaaaaggctgtgagcctggtgctggaccaaggcctgcgcaccggcgacatctggtcccagggttgcaccaaggtcggtacgcaagaaatgggcgacgcagtagtcgccgcgctgcggaatctgtaatctctcgggcccgcttgcagatgttgctgcaaggcggcccacttttgaacaaggtgtagttgcgatgaaacgtgtaggtctgatcggttggcgcggtatggtcggttccgtgctcatgcagcggatgctggaagagcaggattttgatcttattgagccggtgtttttcactacctccaatgtaggtggtcaagggccgtccgtgggcaaggacattgctccgctcaaggacgcctacaacattgaagaactgaagaccctcgacgtcattctgacctgccagggcggcgactacaccagcgaagtcttccccaagctgcgcgaagccggctggcagggttactggatcgacgccgcctccagcctgcgcatgcaggatgacgcggtcatcgtcctggacccggtcaaccgctgggtgatcgaccagcaactggacgcaggcaccaagaactacatcggcggcaactgcaccgtcagcctgatgctgatgggcctgggcgg

SEQ ID NO: 19025 - DNA, 968 bp, Homo Sapiens
cactgaacccaactgtccggcggcgccgccgtcaacgatgcgttgctctccggctccatcgacatcgccggcgctggcgtcggcccgctgctgaccatctgggaccgcacccacggcaagcagaacgtgaaagccgtcgcttccctgggcaacttcccttactacctggtgagcaacaatcccaaggtcaagaccattgccgacttcaccgaaaaagaccgcatcgccgtacccgcagtgggcgtctccgtgcagtcgcgcttcctgcaatacgccgcggccaagcagtggggcgacaaggaattcaatcgcctcgacaagtacaccgtcgccgtcccgcacccggacgccacggctgcgttgatcgccggtggtaccgagctgaccgggcacttctccaacccgccgttccaggagcaggccctgaccaacccgaacgtgcacgtggtgctcaattcctacgacatcctcggccccaactcgccgacggtgctgttcgccaccgagaaattccgcaacgacaacccgaaaacctacaaggcgttcgtcgaggcgctgaccgaagcggcccaattcgcccagaacgataaaggcgccgccgccgatacctacattcgcgtgacgaaggccaagatcgaccgcgccgaactgctgaaaatcatcgaaaacccgcaattcgaattcagcgtcacaccgaaaaatacctacccgctggcggaattcctctaccgcgtcggcgcgatcaaaaacaaacccgaatcgtggaaggattacttcttccaggacaccaagcccgctgcaagggagctgacatgaacgcgcccttgcaaggccacacggccagcaacccgacgaccaccgaagcactgctttctgtggataaagtcagcccttgaataccgcacaccagaacgggtcgtgcgggccacccaccaggtcagtttcaagatcgaccggcggaccgcttt

SEQ ID NO: 19026 - DNA, 378 bp, Homo Sapiens
gggggggccctccaaaaggatccaactttatttcccgtggatagcgacgtctaaactctcttatgttgtcaccaaatttcatttccgggccttgtgtttcccacggttttggacggggaaaacccgtggtgtatcacaacttaattcgcctagcagcccatctcctctatcccgccgtgagaaattggccaccccgtagtgtcttaggtaaccggtttatgcgaacgggaccgcctacacgtgctaccctctaaggcccgcctcttttgccttcttccttgttttcccgataagttgtcaggcttggcgtgtcaagctagaatccgggggctcctgaggggtccgtaatacggcatagcggcactccgacccgaaaaa

SEQ ID NO: 19027 - DNA, 336 bp, Homo Sapiens
tgttccaactggaccacaactcacacttatctcggtctatcttttgatttaaagggattttgccatttcggctattggtaaaaaaagactgatttaacaaaatatacgcgaatttacaatatataacgcctaacataatgggccactttcgggaaatgtgcgcgaaccctatattgtaattttctaaatcatccatatgtatcgtccatgaaacaaaacttgataaatgctccaaatatgaaaaaggaagtagaagattcaacattccggttcgcctaatccctttttcgcgcatttgccttctgtttgtctacccaaaacgctgggttaatgaaa

SEQ ID NO: 19028 - DNA, 640 bp, Homo Sapiens
caccatcacgatgaagctggcctcttcgccgtcgaggaattcttcgatcactacgcgcgaaccggcttcaccgaaagcgttgccggcgagcatgtcgcgcacggcgtcttcggcttcggccagggtcatcgcgacgatcacgcctttgccggcggccaggccgtcggccttgatcacgatcggtgcaccgacctcacgcaggtaagtcagggctggctcgatctcggtgaagttctggtagtcggcggtcgggatcttgtggcgtgccaggaaatccttggtgaaggctttcgaaccttccagctgggcagcaccggcggttgggccgaagcagtccaggccacggctgcggaacaggtccacaacaccggctaccaaaggcacttccggaccgacgatggtcagggaaacgtttttctcggcaaagtccgccagttgctcaagggccaacacgtcgatggcgacgttttcgcatttggcttcaatggcggtaccggcgttgccgggcgcaacgaaaactttctggacgcgcgggtcctgggcaactttccaggctagggcgtgttcacggccaccgctgccaatgatcaaaacattcatttcaaaaacctcggatgacgctgaattctgatcgttccca

SEQ ID NO: 19029 - DNA, 605 bp, Homo Sapiens
cacccacgcgtccggttaattccaatttctaggtgccattgaatataaaggcttatttgtgtctcttttctagaagtctcagcgcaaacggaaatctgtgacattcagcaagactggaagccttcattcctcagtaatgaagaattcacccagctgatgttggaggtgaaatgcactttcaaaatagcttaaacagttgccagttaaaatgtagctacttgttgcagataagtccctgtacccaaaggaaactactgttcttgatcctgggaagacttgactttgaaacagatacctccctgaggctctctgcctgctgttgcctatgggccatgtcaagaagaatcccaaaattgaatgtggtcacgtgttttcactacagtgaccacaggatgagccccttgatggtgtcacaaccagaggacaccttgctggggagccaggaagggtgggttcgaggtacgtagagagaggagaaggacagagggaagatgaatcagcttgcactgtcatttgactcagagagtcttctcttagactgctatgattatacattttttcccttagtagaaacacgttttgaaattaaaaattgtctttttaag

SEQ ID NO: 19030 - DNA, 776 bp, Homo Sapiens
ccggaattcccgggtccactaaagatgaagtaccaggacttgccgcccgccttgaccgtggccttggcgccgccggcggactgcgaataggtgtcgaacatccagtggaagccaactggcgagcattccttgttggtcagcgccgtggtggccgggcccgagaacatcacgaccttgttcttttcgcgcgcgatgccctgcaccgccagcgccaccgcggaattggtcaggtcggcgatggcggtgacgccgtcgcggtcgaaccattcgcgcgccttggccgcgcccacgtcggccttgttctggttgtcggccgacaccagctcgatcttcatgcccttgcactcggccgccaggcaatcgtcgatggccaattgcgccgccgccaccgaaccgggtccgcccatgccggcataggtgcccgacatgtccgtcaggatgccgatcttcactggcggtttatccgccgcgtacgcctgacccaacagtgctgcgcccagacacaagcctgcggccagcccgcgtgcgtgcaattccatggatttgtctcctgagtgttatgcgttatggcgccgtctttcgcggccccgcggctcccggagcattccccccagggctgccgaccccagtgtagatgtgtgaaaaatcaacaagcaacaccagaaatgcacatttccttgtgcatcaatgcacaagcctgtcaggagcgaaaacgtgcttggattgggacatctgcggtattcctggaggtcgcgcggacccagcgggtcagcgcc

SEQ ID NO: 19031 - DNA, 475 bp, Homo Sapiens
ggccagcacctggcgggcgaccccaccggccttgatcttcaggccgcgcaggtcgtccagcgtcttgacctcgccgcggaaccagccgcccatctgcgcgccggtgaacccgcagggaaaattcaggatgccgtatttgtcgaacaacacccgcgtcagcgccagtccctcgccctggagcatccaggcgttcatctgccgggtgttcaggccgaacggcacgccggcatcgaaacacagcgctggatcggtatcgaagaaccgcgtcgatgcggtgtgcccgcaatcgacgatgcgatgctggaccgcgtccagcacctggtcagcgtccaccaggtcgccggccgagaagatctcgatgcggaacttgccgtcggtgacgtccgctgacgtagcgcgccacgtcctcggcgccggcgaacagggtcggcgactcattccgaaagcttgaagccagccgccacgacacggcggg

SEQ ID NO: 19032 - DNA, 514 bp, Homo Sapiens
cacgaaacaggagaacccgctgtcgatctacaccggatccaagctctacaccgtcggccagaagtacctgacgctgtggaactacgtggccgatccgctgatcttcgtggtcaaccgcgaagtctggaattcatggtcggaaaaggaccgcgacattgtgcgccaggccgcgctggacgccggcaagcagcagatcgtgatcgcgcgcaagggcgtcacgccggaagatccgtccttgctcaaggagatcgagggccacggcgtcaccgtgacctcgctgagcccggccgagcatgacgccttcgccaaggtcacccagcccgtctacgacaagtggaagaagcagatcggcgaagacctggtcaacctggccgagaagtccatcgcggcgcgcaagaagtaattccgccgacaacgacggcaagccaaccgaacaagcagcaagccccaggggaacggcggcgcaagccgccaaccgaggcagggacgtcagatcccgcccaccaaagacggg

SEQ ID NO: 19033 - DNA, 843 bp, Homo Sapiens
cactcaaagcttcctgcgccgcggccagcaggtgcagcacggtgttggtcgagccgcccatggccacgtccagcgccatggcgttctggaacgcgctcttggtggcgatgctgcgcggcaggaccgattcgtcttcctcgacgtagtagcggcggcacaggtccaccaccaggcggccggcctgctcgaacaggcccttgcgccaggcgtgcgtggcgacgatggtgccgttgcccggcagcgccaggccgatggcctcggtcaggcagttcatcgagttggcggtgaacatgccggaacaggagccgcaggtcggacacgcgctgcgttcgacttcggccacttcggcgtccgacactttcgggtcggcggccttgatcatggcgtcgatcaggtcgatcttggcgatcaccttgccgtcggtcggcgacttgaccttgccggcttccatcgggccgccggacacgaacaccacgggaatgttcaggcgcatcgcggccatcagcatccccggggtgatcttgtcacagttcgagatgcagaccatggcgtcggcacagtgcgcgttgaccatgtattcgaccgagtcggcgatcagttcgcgcgacggcagcgaatacagcatgccgccgtggcccatggcgatgccgtcatcgacggcgatcgtgttgaattcccttggcgacgccgccggcggccctcgatctccttggcgaccagcgcgcccaggtcgcgcaggtgcacgtggcccggcacgaactgcgtgaacgagttgaccaccgcgatgatcggcttgccgaagtctccgtccttcatgccgggtggcgcgccacagggcgcggg

SEQ ID NO: 19034 - DNA, 325 bp, Homo Sapiens
  misc_feature (108)..(116): n is a, c, g, or t
  misc_feature (166)..(251): n is a, c, g, or t
  misc_feature (271)..(284): n is a, c, g, or t
ggggggcccccccaaggaaaccccgccttatttccccggggggggacccttaaacccttttaaaggggcccccaaattttttttccggggcggcttttttaaacgccnnnnnnnnnaaaaacctggggtttcccaaatttaaccccttgggaccaatccccctttnnnnnnnnnnnnnnnnnnnnnnnnnnnnnnnnnnnnnnnnnnnnnnnnnnnnnnnnnnnnnnnnnnnnnnnnnnnnnnnnnnnnnnggaaggggccctttaacccnnnnnnnnnnnnnntttaccccacgggggccccttaatttggcgcgcccccaggc

SEQ ID NO: 19035 - DNA, 904 bp, Homo Sapiens
catatcaagaacgcggacgtagtactgatcatgggcggcaatgccgccgaggcccacccgtgcgggttcaaatgggtcacggaggcgaaagcccataacaaggcgaagctgatcgtcgtggatccgcgcttcacgcgctcggcatccgtggcggacttctacgcgcccatacgcaccggcaccgacatcatcttcctgggtggcgtcatcaagtacctgttggatcacgacaagatccagcacgagtacgtgcgcaactacaccgacttttcctacatcgtgcgcgaggacttcgcgttcgacgcgggcctgtactccggctacaacgccgacaagcggacctactacaaggccagctgggactacgagcgcggcgacgacggctacgtcaagaccgacccgacgctggagcatccgcgttcggtctaccagctgctcaagaagcactactcgcgctataccgaggagatggtcgaacgcgtctgcggcacgccgcgcgacaagttcctgaaggtctgcgagatgctggcgtccaccgccaccaccaatcgcgccgcgaccatcctgtacgcgctgggctggacgcagcactcgatcggttcgcagatcatccgcaccggcgccatggtgcagctgctgctgggcaacatcggcatcgccggcggcggcatgaacgcgctgcgcgggcactcgaacatccagggcctgaccgacctgggcctgatgtccaacctgctgccccggctacatgacgctgcccaacgagcccgagcaggactacggcaagtacatcgccacgcgcgcgctctagccgctgcggcccaaccagctcagctactggcagaactacagcaagttcccacgtgagcctgatgaaagcctggtggggcaaggccgcctaccc

SEQ ID NO: 19036 - DNA, 724 bp, Homo Sapiens
cacccacgcgtccgcaaatttcacttcacttccccaaacacactctatcctcatctctgcttagattctcctctctgtgctatagtctagaaagtgtctctagtggagcatacattacttgtgtcccttctcttggggatcacagcctgttcaatgtctgagagttgcttcatatgtcatttatccagttttctggctgtttatggcaggaggaccagtctggtaccagttatactatcataactggaaaaataagtcccaccacattcatattcaaactttgtttctgtttcttttctccccgcaaggcagtgagacccttcaatgcagtgacagggactcattcatctctgcattctcagtatctaacatatgaagcatagcatatatcaggcataataaatattattgaataaaagaataattgaccattgttaaaccaatccataatacttatggtatctatatttaagtaatttacatgaatatctaagtgcttctgtaacatgtggggtttttttaagcaactgagaataatctattaaattactgaatatatgtaagctagagatcaatgctagagtcaggttagttctatgctaaccttacataacattccttgtagctgtaagatgccagtgtccagaagcaaatatcatatgtgttcagtatctctaggacataatgacacgttattctagaataaaaagtagcaggctgtttt

SEQ ID NO: 19037 - DNA, 208 bp, Homo Sapiens
cactggaagccacgacgcgtccacctcgtactggatcgaccgctaccgcggccacgcccaggcgccacagccgcgccatgcctggctgcctggcgtggcggcgcatctttgacggggagccgggcatgagcgagatgcgcgtgctggtcacgggcggcgccggctacatcggcgcccataccctggtggcgatgctggccgccggcca

SEQ ID NO: 19038 - DNA, 369 bp, Homo Sapiens
ctgtcccctaggggggggtccccggccgtcgttttgcaacgtcctggctgggacacccctgacgttccccacattgggccccttgttgctcatccccctttcgcccgctggggtactagccaagaggccccccccggtctcccttcccaagaatggcgcacgcagaccggctattgggacgcgcgctgaaacggcggaataggctcttcggccgtggtggttacgctcagcgggacggggtgaggttgtcagcgcccccccgttcgctcccttcgctttcggcgcgtgcgtggtgcccacccccccgggctttccctgtcaggctccgattcggggcctccctttacggtttctatttcgtgcttttcc

SEQ ID NO: 19039 - DNA, 235 bp, Homo Sapiens
cacataaaaaggtgtcgcccggattcgccgccaccgggcgggtaaacgagccgccgaggatgatctggccgggttgcaaggtcacgtcgtacggcgccagtttgttcgccaaccacgccacgcccttggccgggtggttgagcacggcagccgacaccccggactcctcgatcaccccgttgcggtacaacaccgccggcaccttgcgcaggtcgatctcggtggggcgtacggc

SEQ ID NO: 19040 - DNA, 585 bp, Homo Sapiens
  misc_feature (52)..(69): n is a, c, g, or t
  misc_feature (100)..(123): n is a, c, g, or t
  misc_feature (200)..(211): n is a, c, g, or t
  misc_feature (505)..(513): n is a, c, g, or t
tttggccgccccggaggggaaaggggaccccccccttacggccccctaaacnnnnnnnnnnnnnnnnnnttacggcccgggggccctttattttggtccnnnnnnnnnnnnnnnnnnnnnnnnccccagggtccgggggtttcccccgaatgttaaaatgggggggccctttaaggggctccaattttggtttttagggnnnnnnnnnnnnaaaaaattgtttaggggggagggttccccctgggcggatcccgcaatgagggggttcgccccttttgggcttgagaccccgttttcaaaaaatgaaactgtgtgtccaaatgtgaaaaatcccgcaccctttctgggtgttttttcttttgtatatagagatttttcgccaattcccgcccagggggaaaaaatagagcgtgatttaccaaatattttgcccattttttaaaaaaatttaacccttaaattttagggggctttttggggagaaggcgcgcgaaccccctattgnnnnnnnnncaaaaacatcaaaagtgacccgccccggaaacataaccccgggagagggtttctaattttgtaaaaggagaa

SEQ ID NO: 19041 - DNA, 784 bp, Homo Sapiens
cacccaagcgtccgaatttgacagaaggtagaaccctgactgccagccgggaaagtgttgccaaaaagagtcaacctctgtaaaaatatttgaagagatttattctgagccaagtgtgagtgactgatggcctgtgatacaactcttaggagatcctgagaacatgtgtccagggtcgtctggctacaacttagttttatacatttaatacattttagggagacataagataccagtcagtacatgtaagatgtacagtggtttggtctggagaggcaggacagctcaagacctggggatgttgtcataggcagaatcaaagattttctgattggcaattggttgaaagagttattatctaaagacctggaatcaatagaaaggaatgtctgggttacagtaaggggttgtggagaccaaggttttatgcagatgaagcctccagccagcaggcttcagagaaaatagattgtaaatgcttctcatcagacttaaggagcctgttttaacagtaattccaaaagggaggggagtataatgaggaatggctggctccctcttcccaccatggcccgaactagcgtttcggttaactttggaatacccttgactgagacgaggggtccatacagatggttggggggcttagatgttttttgttttgtttccataaagcatcatagtctcttagtgcccaccttccttgagcctgtcaagccatactctagaataaaggatttggggtcacatctttgtgaagccctttcaaaaacagtaaacttgc

SEQ ID NO: 19042 - DNA, 556 bp, Homo Sapiens
ccatttaagcgtccggggcgctgagaaggaaggagctctccccccgtggcctcagatttaatcaaaacactgccttccaccagaagacagaacaagtattattttatgggggaagggagggcttcacaggagtgtgaagggggaggaggggacctagtctggctgtaattaactcgtctgcttcaaagggaggaatctaggtggcctaatgcgttaggaagggggctgtcacaaagtccccccgtgttcctgggaccttatggggtaggggtgaggtcaggaaggaagcaggtgaggataggaggggtggggtctccttccagccgggcctgataggctgaccccctcccgcgcgcagcgggaggaactgacgggttcgatgaggagcgctcttgcaggcagcgcatttcaaccggaaaagcacgcgtggaggttcccggagcagctccggtaccaggcagcccggatttggaaacctagagctgggggtggggcagggcagggccgggcagggcagccgcgagagatttacatatacacgctggagacagccggt

SEQ ID NO: 19043 - DNA, 649 bp, Homo Sapiens
  misc_feature (63)..(366): n is a, c, g, or t
ccacgcgtccgatgaggtgctcttactctctctgctttctcttttattatagtttagtctgannnnnnnnnnnnnnnnnnnnnnnnnnnnnnnnnnnnnnnnnnnnnnnnnnnnnnnnnnnnnnnnnnnnnnnnnnnnnnnnnnnnnnnnnnnnnnnnnnnnnnnnnnnnnnnnnnnnnnnnnnnnnnnnnnnnnnnnnnnnnnnnnnnnnnnnnnnnnnnnnnnnnnnnnnnnnnnnnnnnnnnnnnnnnnnnnnnnnnnnnnnnnnnnnnnnnnnnnnnnnnnnnnnnnnnnnnnnnnnnnnnnnnnnnnnnnnnnnnnnnnnnnnnnnnnnnnnnnnnnnnnnnnnnnnnnnnnnnnnnnnnngaaagattttgcatagtattaatgcttaatctttaatatttaagaatatgatacagtgctttctgtatgcattctatggacttaaataagtcaatctttggcctccaaagtataagtgtaacagataatcccacaacttggtagacaactggcaactgaagattttgaaagaatcttattgaagttgaatgcaatgacgatgtaccattattctgatcaatattgacggataactgcctgccactcttctcttggggttaaaaagagttgttgtaaaattcaa

SEQ ID NO: 19044 - DNA, 230 bp, Homo Sapiens
cattaagaacgacatgcccaccaccatgggcgcggcgcacttcctcgagccaccggcccgaggccgacgccgagtgcgtggccttgttgcgcgcggccggcgccatcgtcatcggcaagaccctgacgcatgaattcgcctacggtcccaccggcgaccgcagcgtgcagggcgcctcgcgcaacccctggcgcaccagccagatcacgggcggctccagcgccggcagc

SEQ ID NO: 19045 - DNA, 496 bp, Homo Sapiens
caaaaaaaagcgatggtcagcgcgttggggattgatcaggccttcggtgggcgagctgggcgcgccgctgtagagctttttcggcatgcggccggccaggaaggcctcgcggccggactcgacgccctttttcatggcgctggccatcagcaccgggtcgcgcgcggcggcgatggcggtgttcatcagcacggcgtcgcagcccagttccatggcgatggcggcgtccgaggcggtgcccacgccggcgtccaccaccaccggcacgcgcgcctggtcgatgatcttgcgtaaattccaggggttcaggatgcccatgccggagccgatcagcgaggccagcggcatcacggccacggcgcccatgtcttcgagcatgcggcactggatgggatcgtcggtgcaatagaccatgacctggaagccctcatccaccagcgtcttggtggccttgatggtttcgggcatgttggggaacagcgtgtgcggatcgccc

SEQ ID NO: 19046 - DNA, 751 bp, Homo Sapiens
cattcacgaagaagaagccgcacgagatggccgcgctgggcctggcccgcaccttccagaacctggaactgttcagcgcgctgacggtgcgcgagaacgcgctgctgggcacctatgcgcacggcgccaacacggcctcgcgcctgctgcgcccggccaatgccgaggcgcgcgaacgcgtcgagcacctgctggaacgcgtcggcctggccgatttcctcgacacgcccgcgtgcagcctggacttcggccgccagaagatgctggaactggcgcgcgcgctggccatctcgcccaagctgctgttgctggacgagcccgccgccggcctgcgcaaccgctagatcgagacactcgaccacatcctcaccgaactgtgcgaacgcgacggtatcacggtgctgctggtcgagcacgtgatgcagctggtgatgtcgatctccgatcgcatcaccgtcatgtcgttcggcgagaagatcgccgaaggcacgcccgcggaggtgcgcagcaacccccgcgtcatcgaagcctatctgggcaagggagccgccggtggctgagaacctgcttgaagtcgaatcggtcagcgccgcctacggcaatatccgcgccctgcaggacgtgtctctgaaggtgccgcaaggcgccatcgtcgcgctgctgggcgccaacggcgccggcaagtccacccacgctcaacgtgatctcgcggctggtgacgcccaccgcgggcagcgtgcgctttgccggc

SEQ ID NO: 19047 - DNA, 901 bp, Homo Sapiens
cactagaaggtttcggccaggtcttcggagctggcttcttccagtgagtcattcaggcggaagcggtaatccgggtaacgatcaaacgccgcgagcgttgggctcagggacatttttgccgtgacgcgacggcccgccgccggagcgccgaacaagtgcatcgcggtgactttggccaccacttggtccggcgggatccagcccagcaccggggtgtcgtgcaggctcaggctgactttcatccggtccggttcaaaatcgcgaaccttgaagctgacgctgcccaggtcggtacggcgctgcttctcgccgatcagttgcagggtcgcggtgtaatcgccggatggcgcgacttcgctgcttgggaaatcaaaagtctcaaagccgctggccgacagtttcaatggctggcgaatcacctcaagaccacgtgggtcggtgatctgcagctcaaccggcaggccttgcagggcgcctttccagtcgccgctgcgcacgatcatggccaagtgcgcggtctcgccgggccggtacaggccacggtcggtaaacaggtaggcgctgaggcgattgatcgcaccgtcttcttccaggccgcctacatcaaagcgcgacaaatccagctgctgggactgacgggcaatcggcaggaacgattggtcgttgccgcgactgaccacatacatcaacggcgttttctcacggcgcagttcatccagcttggcgaagtgcgcgtggccttcggcgtctgtatggccgctggcgaccggcaagccgttgcggcccgatgatatcgacctgggcgtcggacaccgggcgagcccgttgccgatggactgcacgtaccacgttcgtggctgccatcgctgggagcgcttggcgatgatgcccaagtccgtga

SEQ ID NO: 19048 - DNA, 822 bp, Homo Sapiens
cattaaaaaagtaactcggcgccagcgtgtgcggcattgccggatatggccgcgtgttcggaaagcgagcgctcgccgctggagagcgtcagcaggcgccagctcaatttggcgcggccttcgcgctcacgggtcatggtgcctttaccctggccgttggcgagggagtaggccatttcctgtactcgcttgggatcagcacgcttgatctcatccagggggaggatggtgtcattgcggctcgacgcttcgatctccaggccgcccttggtcatgtcccaactggcggcgaacacgcccgggtcgccccatacagacgacccgatcagttgcgccagcgacttgccgctcgagctatcgcccaccaggtgaacaccaccgcccagcacgcccaccaaactcagcagtgggccggccagtgagcagccgatcgctagtgtcagcaccgggttacccgcgcacttggcggctacctccgattgccacagcgccagctcgccgcgccggctgaaaagtacctgagccttgttgctggcctggtaccgcacattggcgctgccgatggttcgcccaggcagcacgaacgcgcccgactcatgccagccaggccggctggtggtggcaaatacttctccaggatgctggtcgagcaggtactccatgaaacgtgccgcgtttcttgagggcgataatgacgcccatcccgaacaaggcgcgccggggcgtcctcgccgctgccgccgaacacctccatggcgatgatccattccttgatgccgccctccgtgaccagcgcacaaccggccctcgctgccgtcgttc

SEQ ID NO: 19049 - DNA, 679 bp, Homo Sapiens
gcattaaagcacccacacggcagacgccaaccatggctgaagccatcttgaccgaggtgcccgcggacaaaccgcgcgacgcctcgctgacggactggatcgcggtcgccgccggctcgctgggggcgttgctggcgaccctggacatctcgatcaccaactcggcgctcccgcaaatacagggccagatcggcgcaacgggcacggaaggcacgtggatcgccacgggttacctgatgtcggagatcgtcatgatccccctcgccgcctggctgacgcgggtattcggcctgcgccgattcctgatcggcaccgcgttgatgttcacgttcttctcgatgttctgcgggctgtcgtcgagcctcggcgcgatgattgccgggcgcatcggccaaggctttgccggcggtgcaatgatcccgaccgcgcagaccatcgtgcgcacccgcctccccgcccaccagttggcaatcggcaccacaatgtttggcatgaccgtgatcctcggcccactgttgggcccggtgattggcggatggctcacggaaaacatcaactggcgctggtgcttcttcatcaacctgcctgtcagcatcacctttgatcaccctgctgatcaccggcctgcccagcgagcgcatgaacccttcagcaattcatcaaggccgactggctgggc

SEQ ID NO: 19050 - DNA, 451 bp, Homo Sapiens
acataaaaaaattcagtatctaagcggtattcatcgagcaaggcccttgataaatcggcgggcttgccaggtatcaaggtctgtctctccacggccccccatcagatactctcccgttcgccacccaactggagcccatgatgctcggtttatgtccagggtgagcccgtagtagtccggagcattcacctcgctttcatcaaagtaagcccagtaaacacggcctaaagctgggtgctctgcgccaatgacaacgtaccctgttgggtccctcaaaacttcatccatcggcacgtcctaatttgtagtggttctctaatgaggtcgggggaaacgatgagctgtttcccccaacaccgacagctacacgaatgggccgaaaaattaagcccctgttttcagaattgcggtggatcggtatctggatattcatccgggcctggagctggct

SEQ ID NO: 19051 - DNA, 966 bp, Homo Sapiens
  misc_feature (587)..(595): n is a, c, g, or t
acagaaaaacctccggaaattaacatgtatttactaatggctaccccatgacaaataagcttaaccatgtgtataagcagacctcagtttaaatacttgatttcctctgaaccagattcttaattcacatcacccaatacgtttgttagtcatagtgttagatttccatgtgctatactgtcctggttatatcacgtttttcacttcaaatccaaaggtagccacgtttttttaaagtttttatttatactttatcttattccattaaaaatgtatggcaattgataggaaatccactcaataaaatagaaaaataagagaaaaatatttaggataatataaattagaataggtggtattttgggggagggaatagtgtcaatgtcatatagatgagcaggctatgctgtgcagagttgttatattcagatagtttggttttgagcttcctgggtgctaaagtaaaacataacattattttttatgtactgttcattattcatgagtttgattagtgataataatagagtgtcatagtctttaactggagtagattacatttaaaaccaccacaccatatttggttnnnnnnnnntatcaaactagaaatttgttaacttgttaaaagtttatctctagtaatcatcatatacaagggtaaaatgctagaagaattcttttctggatcaaacaaggataccctctacaacttctcttcaacagtattcttgggtgtcctagccagtgcagtaagacaagtaaaagtaaatgagataaattggaaagtaggagcaaatctcattatttgtaagaaatatttacctagaagatgaaaggtagacaactgaccagctatcagaacccaatagagtttgaaaaaggtaacagtaccaagatttattacactaacatataccatattttatgggaaaaatggatatttaatttataataacaattaaaaat

SEQ ID NO: 19052 - DNA, 817 bp, Homo Sapiens
acaaataaaaggccggcctgatcaaggccaacatcccgacccgcctcgccttccaggtgtcgtccaagatcgactcgcgcaccattctcgaccagatgggcgcggagaccctgctgggccagggcgacatgctctacatgccgccgggcaccggcctgccggtgcgcgtgcacggcgccttcgtcagcgatgacgaagtgcaccgcgtggtcgaaagcctgaaggcgcagggcgagccgaactatgtcgagggcctgctggaaggcgggctggacggcgacggcggcgaaggcgccagcagcgtcaccggcatcggcggcgacgccgagtcggacccgatgtacgaccaggcctgcgaggtggtgctcaagcatcgccgcgcctcgatctcgctggtgcagcgccacctgcgcattggttacaaccgtgcggcgcggttactggaacagatggagcaatcgggtatcgtgtcggcgatgcagtccaatggcaaccgggagatcctggtgcccgccgccgctcgagaggaagcatgatgaagacgtttcgtggcctggccgccggcctggccttctgcctggtcccggcgttgacgccggccgcggcgatggccgccagcgcgcaggaacagttgcgcgcgttcgtggggtcggtgacggcggcgacgggcgcgttttctcaatacaccgtcaatacgcaggggcgcacgcagccggcgcagacgggcgtgttctcgttccagcggccgggcaagttcaagtggggcggtgcagaaaccctactagcactggtgatctccgacggcaagcaagtgttc

SEQ ID NO: 19053 - DNA, 208 bp, Homo Sapiens
actatcaaccgcgatagcgcgcctcggacagctgcatggcctgcgcgctggactgcgtcaacgccagccgcgaagcctcctcgcgccgcagcgtgtcggtggcggcaagcgcgtcggccacctcgcggaaggccgactgcacggtcttctcgtactgcgccacggcaatgtccttgcgcgcgttggccaggtccaggttggcggtatt

SEQ ID NO: 19054 - DNA, 250 bp, Homo Sapiens
caatcaagcgtccggaaaaaagcactgcagtgagaacctgatgggggaacggaaatggacaggtgttctggacctggtcagatcttttaaaaacccacagggcagttgcactttaaaacttacaagtgtgtctcatgaattctttcagaatcaaatgtgacatattaaaataaaaacactttaaagagaacttacaggctagaaaacagaaaaacataaggttccttagaaaaattattgaacggaaagc

SEQ ID NO: 19055 - DNA, 422 bp, Homo Sapiens
  misc_feature (46)..(54): n is a, c, g, or t
  misc_feature (97)..(105): n is a, c, g, or t
cataaaagcgtccgagccttccgctgaaagcgccggcagcacctcnnnnnnnnntgtgctcaatgtaaacatcagaacaatccacgtactccagcgnnnnnnnnntgaggggcccggctcgtgctgcttaagctcaccggcagctcggcaccaaggcggcggatctcccaaggaatcttgcgctcgcaggccctgtcccggctttttaaaggacttgatctcggaaaaggccaggccttcccgcattaaactgctttggcgctttcccctattttcaaacagtggatcaaaaggtaaaaaagcgcgtggcgcgcaccctgctggcaataccgccaccggccgctgcaattggagcgtacctcaaaccttccaaaaactgctcgaagtgggggcggttattgccgccgaaaaccgtgtggttg

SEQ ID NO: 19056 - DNA, 589 bp, Homo Sapiens
  misc_feature (85)..(119): n is a, c, g, or t
tccttataaatcccccgggctgcaggcttttctattcctcccagtaccatttaaaggttagtgaaagcaacctttagtatcatcnnnnnnnnnnnnnnnnnnnnnnnnnnnnnnnnnnnagctgtttatgggtaggagaatgcgtgctcttttagggacatctcttcaaataagaacaggttgtaacctacactcaaaagagatgctcttggcaaggtatggcccctaaggtttgaaagcgttttccaggcctgctgtcaggccaggctggactgtccacaatttcttgtcctgcctcccgtgatgctagccatggatgcaccccagaagcatttagaatttggtataaaaaggagcaaggcatactgcccaaatccaaaacaactttggctccctttggcctccattctaacatgctgagtggatgcatcatggatagtcttttaaaaacaagttctcatctattcaatgtcagagccctaaatggtattagaaataggcaacttgggtcatgccactacagatcgacacccactaaatccttttaatttagtctagtgcaacaagtatttgtgtaagtgtcctctgc

SEQ ID NO: 19057 - DNA, 289 bp, Homo Sapiens
tttcagctgaaagcttgcactatatttttttggaggtttaaattttgttcatgtgccggtattttttgcttgagaaaatgcgtctggtcttgttctcatctttgttgatgaattggggatctggttaccattatcttctaacatgctttcattttgtttatccgtctgtgacggtacgattaaaaaaattaattaatatttgccatactcacaacatgtgattcattttccgataaaatatgtgtataatacaacaaaaggtaaataatttgaactaaacattttaaca

SEQ ID NO: 19058 - DNA, 383 bp, Homo Sapiens
gcacgaggtgcaaatggagattcagttcaaaataaaatcatttaaaaacctacataaaaagaactctaaacccacccctgcaacaaaagtcactacataaactgttcagcagtattcacctatcagagtatttgttgtgagtatagattatcaattgaaaacactactcttgttttcttaattgtacagttttcaatgtccctttcttaaagagacggtatatttctcttcacccctagcccatcttccctcaccctcctgaatgacatcaggaggtatatccagggtgtctccttccttcctactctcttgaccagaagttaacagactatactgtctctttaaaaataaaatttaaaaagctttgttgtcttttcagacat

SEQ ID NO: 19059 - DNA, 760 bp, Homo Sapiens
gcacgagggagagaggagctacctccgtgccgccctgcttcccgacccgattcccaggcttgcttgaggccgagaaaggcgaggggcaggcaaggtagcctgctccagctgtcggaagggagaggaatgggaaatggtcctgatttccttgctctccctcatctgctcccgaccaccttaaatctggaccgcgagtgtggacgcgcgcgccagtgccagacagcagcgcgatccacaattaactctgcacgggccatggggtgcccgttgcgtgcagctggctggagggagttctccggctagcccgaggcgcccatcctctcgtcaccctcactccccgcggaggaggggccttgccagggtccctcggaacccgagaggagggaggcactgcggagagagcggcgggggcgtggatacccgaggtcccagagccagagtgggtcagcttctgccctgctctgcgggaggccaataccgcagaaggggtcctgggctcgcacaccttcccagggcttgggccttgcagccctgctgcaaagctgcaagcgcacagagccgcgcagcgaggcagacgcctgcagccccacttactcccgggttatcgatcccccgcggctagggtttcagtgcgcgaggggctgggctggagccgccgggctctgctgctccacgcgcgggagcgcaggcaccgcaggagctaacagcagcgccgggctcgctgtagtgtccccggcggcgggggcgcggagatgggggc

SEQ ID NO: 19060 - DNA, 544 bp, Homo Sapiens
  misc_feature (48)..(103): n is a, c, g, or t
gtactggtggataccttacaaaaccaaaaggaattacattatcttggnnnnnnnnnnnnnnnnnnnnnnnnnnnnnnnnnnnnnnnnnnnnnnnnnnnnnnnntttaaattcaggaaactggttgaaacattaaggttgcttttttctaaaagaaaacccttttggggggcggggctttccccctggagggggggacaacactgttgaaaaacccacacaaaaaacccctggctgaacatgggggaaaaccggggggatcttggaacaacctggaaatttttcatccctaaaataaaaatttggactttgtactaagggtttctttttaagttttttcttttccccttccaagggcggaaggaataaatttctaaccaaaggggtggttatccccttggaaactcaaccctaccaaaactcccaacccccaaagctaaaaagggggcgcgggacccaatttcccctataaggaggccaaattacccgcgtccctggccgcccttttacaacggcctgactggaatcccccttttccccgcttgg

SEQ ID NO: 19061 - DNA, 742 bp, Homo Sapiens
  misc_feature (63)..(89): n is a, c, g, or t
gcacgagggtcttttcaagttaacttatcccaaccatttccaatgatcagagcaccttgttgnnnnnnnnnnnnnnnnnnnnnnnnnnnaaactaggactatgactttaggggcctaaacaagtgtttttgttaagtgaataagccatatgaaaataaaggctcctgaaaaaacaaagttactctatttttcatgtacaaaatgactttgatctaggaattttggtttaaactagttgtaaaaatcacagtgaagggatacgggaaatgtaaaaaacagatttttacaatgtcaagaagccctttaaacttgactttaaaagcccaccttttaatttatgtctaaacaaataataattagtaaatttgcatgtgttcacttggaatgtatttcctctcctgcaccattatattttcaaaattaaaaaagtcacctttgtagttcagtttaaagcaaataaataccgtcattcaagtttaaaaagtattgattcaaacagtgttgttttaaattctttgatttttaaaattaaaactaaaataattaataaaacactaaaccaaactattagtataatcatgaagtctttaaattgcattaaaacataactttcaaaattaccaatgtcttcttttacacattctcagtcttttttgcttcttactgtttactacactgagataattcacacgtttcaaccatctgggaaacatttaataattattttgcttattgaaagaaa

SEQ ID NO: 19062 - DNA, 822 bp, Homo Sapiens
  misc_feature (141)..(180): n is a, c, g, or t
gcacgaggtaactactcccatgctgcagggaaatatatcacctaattgttattttgccttgttcaaaattcaaatttgaaagaaggcagctctctcatgaagctgtcttaagcacattttagttaagggccctcccaaacnnnnnnnnnnnnnnnnnnnnnnnnnnnnnnnnnnnnnnnngcgagttccaagttgcatgtgcttgaaatagatttaattcttattccccacagtttaggtatttttcattaatacatcaatttgacacactgaatgcaagactattaaggaagaacgattaaatattattttattttgtgaagagttggcagcagattacatctcaagaacttgcagagagaggaaggtagatggacaatcctaaattgtaagatgttacaaaaaacagtgaagtaagagtactcctgaagactaaaatagagaggctggggtttgagccattttactgagtagcttaactggaacctgatatcagaagtagcctttaacaaaaagcctcttggcaattgtatggtactaacaactagagtactgaagtgtaagttgaaaccaagttgcagtgggaaatcaaaggtgaggtagcttatttgaaaccagcaaatgagacaggttggacagttttaaaatctcttctaacaaagaaactgcacggtagcaaggactagcggttctcaaagcccttctttttcagtgttctcattcaccttggcacccaagtatgtttaacaggccatgcattaaaaataaatacaaaatataaaagccgcttaaagggaacttacaaactgacaatctctcctc

SEQ ID NO: 19063 - DNA, 673 bp, Homo Sapiens
gtgtgagccaaccacgcctggcccattttgctatactcttattgtatatctctctatcaatcattttgtgaattcattaattcatcttaattttagatacattttaaaataagtttcctacagctgtagacttccccctaaacatttagcacgtataccattaactggagttcaacagtttttgtctttttgtgtaaaattaacatacggtgtgtattagttaccaatttataaccaattaccctaacatatagcaccctaaaacaaaccaaaaccctatgcgttatcttacacagtttctgggggtcaggcatttgggagtagcttagcaggatggctgtagttcagggactctcaggaggttgcattaagcttttgacgagagctgcggtcctctgaaggcctggggctggaggacacatctcctgggtagttcactcacatccgtgtgtgaagaggcctcagttcctcactagctgacagcaggaagcctcagttcttcaccactgccacctctcctaggctgcttgagtctcctcatgaaatggctgccagcttcctccaaaagagtggtcctagagagaaaagcagcagccacatgtctcttaagatccagcctcaggagtcaaactccatcatttctccagtagccttggttacatagataagctct

SEQ ID NO: 19064 - DNA, 459 bp, Homo Sapiens
  misc_feature (61)..(70): n is a, c, g, or t
attgtttttaacactttaagcccatagattctcaggaaacaaatgacacttgacagattgnnnnnnnnnncttgcattgtatctctccctccccctctactccgtacccttactgtggctcgaatgttttgaaatcgcaattttgcacataaaaaatgtcgatcacagccatgtatccatatacactcttcattcaacgaatttatgacctaattgcttctacactttcttgaaacttaacattctataccttttagggaaactctgcaaactatgagagttggatttttaaatttcctctaatataataatgaattgtttctgtttccctgatgtcctgcgtatcacattcatttgcatccagggcttgttgatgtaagtctgccacctagatccgatttatggaaaaaaaagtaaatcttaattcgggttttgccacctgtttctgtatttaaattt

SEQ ID NO: 19065 - DNA, 975 bp, Homo Sapiens
  misc_feature (101)..(468): n is a, c, g, or t
gcacgaggtgtcaatgaaaacaggaagacatttctcaagattagaatggtcctggaacaaaaaattgccttaccaagtaatcagtgcctactattggatgnnnnnnnnnnnnnnnnnnnnnnnnnnnnnnnnnnnnnnnnnnnnnnnnnnnnnnnnnnnnnnnnnnnnnnnnnnnnnnnnnnnnnnnnnnnnnnnnnnnnnnnnnnnnnnnnnnnnnnnnnnnnnnnnnnnnnnnnnnnnnnnnnnnnnnnnnnnnnnnnnnnnnnnnnnnnnnnnnnnnnnnnnnnnnnnnnnnnnnnnnnnnnnnnnnnnnnnnnnnnnnnnnnnnnnnnnnnnnnnnnnnnnnnnnnnnnnnnnnnnnnnnnnnnnnnnnnnnnnnnnnnnnnnnnnnnnnnnnnnnnnnnnnnnnnnnnnnnnnnnnnnnnnnnnnnnnnnnnnnnnnnnnnnnnnnnnnnnnnnnnnnnnnnnaaacacaaaactctttttaagataaaacacaaaaaagtatctacatttatttgaaagataaatttcagatttgacgattttttattttacttctatgaactgccatactactttcacatgaggtataagataaatgaattttgacaattttctgagttaagaattgattctgtaaaattgtagccaaatccagctgatttaatactatgaccctaattcctctttcagaacttacgttagtagagtttgaatagttaagacttgaaattaagatccttgctttagtacataatctcacaaatgactttcagaaaatggtgcatccagtatgtttatttggagcttcaaatttttaatagtgtcagagtctttcacagcacgctacaaatttcatgagtatcagatgtcaagatcaaacaaaacacagttgccagtaaaataaccaactatcaatttacttctgctttacagttatgtgtgtgcacccacatcaatgaaaaaaataaa

SEQ ID NO: 19066 - DNA, 671 bp, Homo Sapiens
gcacgaggctgcctcagccacctgagtagctgggatagccaccatgtccacttaatttttgtatttttagtagagacagggttccaccatattggccagggtggtcttgaactcctgatgtcaagtgatctgcctgctcagcctcccaaagtattggaattgcaggtgtgagccaccgtgcctggccagggcttagcaaataatttcaatggtgttacacctataagtctcttgctgtatggtatcttttaaaataacatttcttttttgaaacagttgatattgggtaatttggccatcatcatatactgtagaaaaaaattgtcaagtgaaagggagaataggtaagaaggaagaaaggggaggaatttagtgaatatgaattattttcctttagatatattagtcttgtagatcgcaatgaattttttaaattactatttaagatattgttgagattccattacctccaatcagtcttgggacattagaacagtggtataattaagactgtatgtttaaattgagaaattttgcacaactttaacaagtagcagaactaattgttcactgatggctttaaagatgaaataattctgtgaatacatgaaactgtgagggactcttcgtggttgtctaggtttatttatatgcatactcattaataaaag

SEQ ID NO: 19067 - DNA, 704 bp, Homo Sapiens
gcacgagggctgcacccatcatcccgtcatctaccttaggtatttctcctaatgctatccctcccccagccccccaaccactgacaggccccagtgtgtgatgttccctgccctgtgtccaagtgttttctttgttcaattcccacctatgagtgagaacatgcgatgtttgataaactgtgctaaaacttctgtatctctataggccaatccaaatggcctgataacataaaccctagcccctaatctgtaaaaaggtaaataccttactcttatctaccattccttccagtattatctgctttatctgggccagcttgctgtgatgtcttgaaaagcccatacattggttcttattttggcaaatggtctcctgcttttcatcactgaggctaataaaataaatttgactttggctaagaacatttagatgaaccaaaaagaacattttagacttggtaagcagaggctgagtcacattgtatggagcaaagttggccaagaccccgtaaatgcacagccctactctctgtgttccttctatgcctgaagattcatctggtgtctcctacgagtaattgctcctggttcatcaaatagcacaggaactttaaatctaattgccattgctgcctgttggaaaacagcacactgactttcaaactcaattgcattttgcttatttgtgcttaacaaaaaatatg

SEQ ID NO: 19068 - DNA, 892 bp, Homo Sapiens
gcacgaggggagggaacgctggcaaaaatttaaatgccattaggatatttagcaagttattactgtttggtaaaaatgcatcatcaccctgtgtgcaaaatgcttgcaaagtagtctaaatgtctttggagatgggtgttttactgcttttttccaaaaacaaattgtttattatggttgcagaaatgcagccattacggtcacataaatttctaaaaagcctaccaaaggttgcaagcagtcttctgccactgggcaggccagcagttcagacccagcgaggttgccaggaacaaatccaggaaatactgggaagaacaagacaagagaattacctaaaagagcaaacaattcaagtaaatcctgtagctattaccacttaaaatccgtagctcaagattcctgtttcaccaccttatacacttaagcaattatacttaagcctttttttagtcctaagtgaagaactacatcagaatcaggataagtattttgcctgggaaatttggctgcatatgaatggagaagacatttacatcctatgttctggcactttctgaaagatctaattaaacatgttgatgtgccaatttaatcaagatgagagatccctgctggtgtcaccctctagaacctgcacttggtgttttgactttccagaagaaaaaaatgcaactttggttagggggcagtggttggatcacacagttgtctttcgtttcctaccacagtaattcatatttaaatatgcttttagattagtgtggatactattgctgctgtgttgctacctgacctttttctggggggggtacctcagaaatgagcatttgagggcaagcgaaaaagccctcttcatcctccagaggcaacaagaggcagcagaaatggg

SEQ ID NO: 19069 - DNA, 341 bp, Homo Sapiens
  misc_feature (107)..(115): n is a, c, g, or t
  misc_feature (185)..(215): n is a, c, g, or t
gtgtcttacttgatttattctttaaaaatttagttccctgaatagttgatgcttttcttctggaaaaaaatgatttgggagatatctgagtgtaccttttatatttnnnnnnnnntgattttaaagaatgtttaccattgcccttaaatggcctgcataggcacccatgtaaggtttataactgnnnnnnnnnnnnnnnnnnnnnnnnnnnnnnngcacaatgatttgaatatttttccacttaggatttcctttctccttgtcatccggttcggttttctttgaaacacaattctttgatctccctttgccttttgaattttagggatcatctaatgttg

SEQ ID NO: 19070 - DNA, 935 bp, Homo Sapiens
gcacgaggctcatgtggattttatgtcttgatcatctttttaaaatcaataaccatcctgttgatttctttttcctttttaagtcacctccttctgtggcaacattagctaaacacatccccgattccatttcgctcattagtattaatgtcgtaataatcattcccttccttggctcctcagacttgcttcaatatttacacatcggccgaagctgattgagcaggaataatgagactttgacactctgcactgcacaaggtggaggaaaacttgtttgcactgggtggactttatagtgaaacaaattgtatgccttataattattaactaaaatgacaagcagtgtccctactatttgttacacttgcccagcactgtggtggtggtggtggcatcaccctagctggactaattccctgcctttcaaatgaccatgagaaatggaattgccctttagccttctccagactctacccaaattattgtttcattctttttaaaggaaaggtccctcttcggtcagaaggcttttatacaggcttgtcagattgggagggcttgtacaattttatatgtatagagcttcttttttcttttctatttattttctggtaagttaaacaagtcaactttcctgctttcatcaaacacctaattgaactggcattttgaagcgcttgccagacgttgtgttaggaggtgaagcaccttccgacatattctctcattccaggataaagttaaaataaaaataatatgtactgaagatagagtttttaaaacatggagacattctagaaaagcatgcatctaagaatttacttgacctaatttcagagaaagagaaaataaaatatcttttcatctccaacaccatccttgtcttctaaacaaaatcaccaacattttctagaacctgggatttgttttaa

SEQ ID NO: 19071 - DNA, 230 bp, Homo Sapiens
  misc_feature (158)..(180): n is a, c, g, or t
ggcccccaaggggttttaaaatttccccccactggggggtgaaggacctgaaggggggaaaaaacgccaaaacccaaaaacttcaccttttccttagggcggggaattatttaaaaaatccccggatccaaggggaaaaccccaggaaaaaaattgtnnnnnnnnnnnnnnnnnnnnnnnggcaggttgagggaaaaacctcttagggggcccccctaaattcccttcct

SEQ ID NO: 19072 - DNA, 696 bp, Homo Sapiens
gcacgaggagtaactgttacttgagttaatgtactagttaattgacccttagaaaattatatttttctgcttgcaagtcttcattaaagaaggaaattttaaaatattttatagtataatgctatccaaactcatttttaaaaacattttattatggaaattttcacaaatgcacaaaaagaatagcagaatgaagctctgtgtacccatcctccaacagctgtcctgtggtcagtcttgtttacctgcatccccacctatcccctgccccaacccacagggatcagtttgagtcccattaacaggcatagtattttcatgtttgtgtgatcagagacattcaaatataactccaaagatagggtacttttttgaacataaccacaataccattgtgtaagactgctaaaacattttttgatgccaagtaccagtcaatattcaaacttcctgattgtctcgtaagttttttttaacagttggtttattcgagtcaagatccaggcaagatctagatcttgcattttgttaatataatctatagatttaactttcctgtttttaatttttgaagaaactaagttgtttgtcctatagaattgtccttcagtggattttactgaatgtatcctaatgggatcatgtacaccttttctgtcccctatatgttctataaactgacagatctagagggaa

SEQ ID NO: 19073 - DNA, 589 bp, Homo Sapiens
gcacgaggtccaatatggccattcttctgtcacatgccaattcagttgtcaatcccattgtctatgcttaccggaaccgagacttccgctacacttttcacaaaattatctccaggtatcttctctgccaagcagatgtcaagagtgggaatggtcaggctggggtacagcctgctctcggtgtgggcctatgatctaggctctcgcctcttccaggagaagatacaaatccacaagaaacaaagaggacacggctggttttcattgtgaaagatagctacacctcacaaggaaatggactgcctctcttgagcacttccctggagctaccacgtatctagctaatatgtatgtgtcagtagtaggctccaaggattgacaaatatatttatgatctattcagctgcttttactgtgtggattatgccaacagcttgaatggattctaacagactcttttgtttttaaaagtctgccttgtttatggtggaaaattactgaaactattttactgtgaaacagtgtgaactattataatgcaaatactttttaacttagaggcaatggaaaaataaaagttgactgtact

SEQ ID NO: 19074 - DNA, 918 bp, Homo Sapiens
cttacctgagatgtcgcaggtgggctccagattggcataatgtacaggttctctgtgagacacaagcagtttctggcatttaaccaaaagatgccacacctatcctcttaccagctcctttcaaattccttctggtccacaggcttcttgcagtatggaaatgtgagatttgggctaaagaaaaaatagttgcttacctaaagggttaagtcctaggaaggaagtagaagtttgggaaatgagggattcaagggccactccttccactggaactctaaaactatataaaccatctaaaactggaaatctagaactatgtcaactgtgtagaaccttgtcagcatggcagatttattacacatttctgcaatataaatgataaatgatactgaactaattgcaaatgttagcataaagagtgttttgatttttataacaattagaaatgctacaagaatatttaaaaatattcctgatcatgaaagcattaatcaaattagaaaatccaagtcattttaagaagataaaaatagaaattcaggcaagtttgggtgatgggcggtattcatcacaaccttcattttattcttacaattgagctttgactcagggggaaaagaagtaaatgattgtcaaggttccctctgccttgattgatagtttctgatgggagtgggaaggaaggaattggagtaatgggtagaatgggaatgagagattacgggagagagagatgagatgggttgaacagaagaggatgggaactgatggtagctaggaaggaaagcgtcaagaaagacctgaatgtaccccgcttttctcgccaaaactcagtaccacctcatgaaaaggcccactgtgtccaggggcgtcagtccagctcaatagtgtctagcttttcagaatcttctgattgtt

SEQ ID NO: 19075 - DNA, 893 bp, Homo Sapiens
  misc_feature (56)..(79): n is a, c, g, or t
  misc_feature (607)..(637): n is a, c, g, or t
gcacgaggctctatttgtccagttggctgaaaatgttgtaatctttattagacaannnnnnnnnnnnnnnnnnnnnnnnttaaatattggctttttccagtgagctattatgtttagtgtacagtgaaaagttttaatattataggttaaaattttcttaatcgttcttttctattcgcttgccaagggtgaatgaaagaacatggctgcttctcccagactgactgaccttggcatccgcataaagcatcattgttttcaaaaatgaagggtgcttaattgttcccttttttctatattctgtaggtctcataacaacaaactgcagtctacagcttcttaaagttcagcgtgttaacctaacataaaacacagcaagaatctggttgtctgaactattttaaattaaggagccagatgtttttagtcaggctatcctgacaagacttgacctaaacttcgtttttattggtcataacagtccaattatattcttggccaattttgtccaacggacaagaaaaaagcaaagtcaacgacaccattatcttgtcaagatcagatggttttactattgtggcagaagcgagaaaactttgtttattgnnnnnnnnnnnnnnnnnnnnnnnnnnnnnnngatactatggggtcaagtgtaactccatggaaatgccacgtctgctcttcagtgaagaagctggtttagagtctcacagaaaacttttgactgtatttatttattgttgcaaaaaagacgcttttttattgctgccctcatttgtcagctaagtattttttcttataaaatccagccccggttacatataatcatctgtatcttatcatgattcctgtaggtaaaagtaccagacgacctctagatgtcttttctt

SEQ ID NO: 19076 - DNA, 638 bp, Homo Sapiens
gtagttgtaaaacagatttcattgtgttatacatcacttcataaagtaagcataattcccattcttccacatgatgctttttgcagcattgtaccacaaaataatgactccctaataactcagctgaaaaatatttagatctacttgctctaaaaataaggtcaacattaaacattctcaaatgaaaagcttgctggatgaaatagtgcaccatcagaataaagcatgcaatatatttacagtcaaatgaaacaagtgtgtccataaatcaaccaaaagaccatctcctcctttaggaaatacatgtattgcttaaccagtaccaataagttaacgtcgtgtgaataattttgggtattctggccttcctgaatctcatacagccaaaccaaccaaaaggcttcccctctgggttgatggtggcttatcatttggcatctggaaacttctcttattttgctggatatggctgtctagtgggtggcttactgacttgcctaagaaaaaataagtcaatcattcagattaatctgggaggctaattctaaaatcggattttatgagatttgctaaatttggggctaggttaacctcatttccaaaagaaaaactcttactggagagaaaccatcatgttt

SEQ ID NO: 19077 - DNA, 903 bp, Homo Sapiens
  misc_feature (250)..(295): n is a, c, g, or t
  misc_feature (500)..(850): n is a, c, g, or t
gcacgaggctgaaataaaaggatgttaatgagcaataagaaatcatctgcaggtgaaaagttcactggtaatggtgcagagaaaaacacagactgttaaaacactataattgcaatgtgtatatttctgatatcttaagtacaaagatgaaaagataaaccaatcaaaaataataacttttcaagacagtacagcaagatgtaaatagaaacaacaaaaagttaaaaagtggggagatgaagttatagannnnnnnnnnnnnnnnnnnnnnnnnnnnnnnnnnnnnnnnnnnnnntgtaatcagtgttaatttgtcatcagtttaaaataatgtgttataaaatattatttgcaaatctcatggcaacctcaagtctaaaaacatacaatggatatgaaaaagtaaaaagcatgaaaataaaacataacaccagagaaaatcacctttactaaaagggaagaccagaaaacagctagaaaacaaataacaaaatggcagnnnnnnnnnnnnnnnnnnnnnnnnnnnnnnnnnnnnnnnnnnnnnnnnnnnnnnnnnnnnnnnnnnnnnnnnnnnnnnnnnnnnnnnnnnnnnnnnnnnnnnnnnnnnnnnnnnnnnnnnnnnnnnnnnnnnnnnnnnnnnnnnnnnnnnnnnnnnnnnnnnnnnnnnnnnnnnnnnnnnnnnnnnnnnnnnnnnnnnnnnnnnnnnnnnnnnnnnnnnnnnnnnnnnnnnnnnnnnnnnnnnnnnnnnnnnnnnnnnnnnnnnnnnnnnnnnnnnnnnnnnnnnnnnnnnnnnnnnnnnnnnnnnnnnnnnnnnnnnnnnnnnnnnnnnnnnnnnnnnnnnnnnnnnnnnatataaagcaatattatcagagtgaaagatggagatagaccccaatacaatga

SEQ ID NO: 19078 - DNA, 933 bp, Homo Sapiens
  misc_feature (397)..(488): n is a, c, g, or t
aaagccaaaaaataacaaatctcactttctggaaagtcatcttattaaaaatacaaaaagtgcacttaatacaaggaaataagtttctcggtgccaccagtgagggggacatacactcacatcagtctctcaaacaaaggtttcgccaaattctcctccaaacttctgaaatgatctgaattcaggaaggtctgagtgaacttcttccaaaaattacagtgaacaagctgaccttaacttttgggtcctcccgaaaaatactaatgaaaaaactatttttttccagtgggccctgtgtttgctggcttctcggaatctgcagctcttcaccgggggggcgcggagcctcacagcagcagtgtacaagcgcgaggtagcacttgcagcctcatcagannnnnnnnnnnnnnnnnnnnnnnnnnnnnnnnnnnnnnnnnnnnnnnnnnnnnnnnnnnnnnnnnnnnnnnnnnnnnnnnnnnnnnnnnnnnttcgcagctggggtaataacaaagaggagcgacctgatctcccttccaacaatgcccaacttgaatgctgaatggaacgcctctgtaaccgccatataacgcgcgggtgtggtgtgtatgcccagcgtagaccgatacattgccagcgccctacggccgcctctttcacttttcttcgtcctttctcgccagtcgcgggttttcccgtaagtcataatgcgggcgtctttaggtttcgatatatgtttagggatctcagcccaaaaaatttgatgaggtatggatcacgagtgggcctcccctagtaaaacgtttttctcttttaactttgaattcccttcctatatagggacttcttggtctaaactggaacaactccccccttatccgggcctttcccttttgatttaaggaaattccgcaattcccggcctttgttaaaaaa

SEQ ID NO: 19079 - DNA, 775 bp, Homo Sapiens
gcacgaggctttgaattaacctggatttttttggtcaattaaatagtttattcaatcagacgggggaaaaaacctgtttggaagtatctataaagaattttttttaacaatattgtcgtttttcttataaaaacacttaattgaaatgcctaagagctgcccagcacaaaagtcaataaaaaccctagaatagagtttataggggttgtctatgtacataattaaatccttcaggcactttaaaactctgcaaaataaatggttatgcaagaatagcctgctgagagaagaaatgcttgtatcagctttaaccagctgccctgtgttccatgtttctgggttggaatgagaaagctattagaacactggaagactgcaagccacatacaaatcatctttgttactgacacttgggggagtactttatagtggctgtcaagaccaatacaaaacatggtttgtgcctgaaaaagtcaagtgccattattcaaaaagaagatgttagtaatccaaataactgaacaacatccaggatcttcattgagtttagctgctatagacgcagatttattattgagtctgacttaagtaaattagcatgtaggtttgcattctagatttgatggaataacaaaggttaattacttgcaatgatctatgctggaataggagtaaaaggggagagctatattttagatttattttcaccattcttaagggaatactatgtgaggggacgggattattatagggggcaaaggaaggagtgctaagg

SEQ ID NO: 19080 - DNA, 244 bp, Homo Sapiens
gggagttttaaaattatgaattcaattttctctagagttctagagctattctaataatatatttcatattgaatttcttgtgagagtttctattttttaataaacagtttattttacctaagttgtcagatgtctgtgtgaagagctcatcatagtattaccatattattcttttcatgtgtgcaggttttatagtcacatcccgtttcattcttggtactaataaattgtgttttttaccttt

SEQ ID NO: 19081 - DNA, 885 bp, Homo Sapiens
  misc_feature (71)..(153): n is a, c, g, or t
  misc_feature (240)..(326): n is a, c, g, or t
  misc_feature (635)..(643): n is a, c, g, or t
gcacgagggatctgcccgcctcagcatcccaaagtggtgggattacaggtgtgagccaccactctgggccnnnnnnnnnnnnnnnnnnnnnnnnnnnnnnnnnnnnnnnnnnnnnnnnnnnnnnnnnnnnnnnnnnnnnnnnnnnnnnnnnnngtgtgtgtgtgtagggtgtgggcattggcaagaaagggcgcaagggagcttccaggggggatgccaatgctctgtatcctgctttgnnnnnnnnnnnnnnnnnnnnnnnnnnnnnnnnnnnnnnnnnnnnnnnnnnnnnnnnnnnnnnnnnnnnnnnnnnnnnnnnnnnnnnnagaataacataatcttatgtttttgtaacttggctgctcaaaaaagacagtttcaagaatcaagtccaatgaatcattttattttctttctagcttccttcacttctcctggatcatactcaaagctcatgtatgttattaatgagagaggttatcacacatgcctctctataggactcttattttacatgttattttatgatctcacatatttcattttcaagcctacatcaaattagaagtagctgaaaagtacaatgcggcacactggtaatagtgagtagggtgataccttgacagcgaaggtgnnnnnnnnncactaaaagtatgacctaagaattaaaaaagagtgtgggcctagaataattgagccatgaatcagacatggctatatatttttctagacaaaggggcatcacactttataataggactcatccagaaatgttaaattaaatgtaatatactctattttaaatgtgaggaggataaatacatgaaaattccacagagaacagtttagaaaatatttttgttttggtgctcaaagggctaaaac

SEQ ID NO: 19082 - DNA, 515 bp, Homo Sapiens
  misc_feature (408)..(437): n is a, c, g, or t
cggtgggatggaatttatccttaagaaaagctgtttaaaccatttagtagtattagtaagttgcaggaatactttaatccacttacgaaaaagtagttcaagttttctaaaatggtttcagcatactatcggtatctcacaatgtgttaattttaagttaattatatattctttaaagcagattaaataatacttgtcctaagcataatttatttgttgaaattagtatatgtgaatttatgaaaaaatgttcttgtagattattctagaatccgaaattttaattatataagaacaaccttttgttctagtgctttgaactaatgaggaagttttttaaaatattaagtattttatttaaggggatatagattcaggaaaagtttaacaaaaatgtacttcagtagnnnnnnnnnnnnnnnnnnnnnnnnnnnnnnaaagtttaggtaagggaaagtttttaagctgtcttaaagatttaataaaagcaggtgttaaaagtagatgttctaatg

SEQ ID NO: 19083 - DNA, 275 bp, Homo Sapiens
gcacgagggaaagatgaaaaggaaactttagactgtggtcaaaagttagaaaaaatagaatgtatatcttgcttttagcccatttgaaattattttctgtttttgtttgtttctattcagttggatgttattgtaatttattgattatgttactgaaatattacctgatcctgatcaggttgtcttttaaaatgtctcagtgttctcaaattgccatttattgacatttgaattctgtttgcaatgaataaaaacttgtaaatgatctttaatgt

SEQ ID NO: 19084 - DNA, 902 bp, Homo Sapiens
  misc_feature (497)..(505): n is a, c, g, or t
gcacgaggctcaagggctctaaatctctatgcacaattttgtgttttcattttggtgtggaaaatctttgtaaattttatcctattgtcagagtagtcatagaaccataaaaggataaagaagcctgatctagatctttgctgctgcttcagagaatcttttcagagagaaataaatgagttgaatatttttcaagactaacattttctgaaactttaagaagaaaaaattttctaacattgtgaacagattaagtagctattttattaaatgctttgattttaattgaggtagtttttttgaaaacacgggaattttagtttggaattaggcaaagattgtttaacagttggtgagtttaagttaagtgaccttcagattttagcaatttcatgatttacaaatcgtgggttatatttttttctcttaaatatatttctgtgtcatatttttagtctgtagattttcttatggtcccatgattattggtgtatacnnnnnnnnncttggtaagacctttaagttttatgattttcaattgagataatgtataatgtttgagttttaggctatataaggaattagctttcctgcatttaaaggaatcatttggcagtcagtagcatattttcctgattttttgttgttgttaaaggagataagttgataactgtatgttgaagggttctcatgatattctctaaaaagtgcaaatatcagtgcttgatttatagatgtgtaataaacagtggtctgtaaaagcatgtagtataaaaaatatggtattttcccttatatacagcctataaactcttcctattccttgagtttagggtagactaacaaattacaggcgtagaagagagtcagctaccagattaaatgcatgcgtaccatacaga

SEQ ID NO: 19085 - DNA, 771 bp, Homo Sapiens
gcacgagggcaggttctacctcagctggaggcctttatgaaggacaaggagttgtttgcttgtgaatctgctgtcaaggactttcagtctattttagataccttaggaggacctggggagagagagagggccactgtgttaattaagcgaattaatgtggtaccagaccagccttctgagcgtgccttgagactagtggccagttcaaaaattaatagccgctcattaacaatttttgggacgggagacaccctaaaagccatcacaatgactgctaatagtggttttgtcagagctgcaaacaaccagggtgttaaatttagtgtgtttatccatcagcccagagcacttactgagagtaaagaggctctagccacccccttaccaaaagactacacaactgacagtgaacactaaagataccctttaaatatttttgtggaagtaagttatttataccaaaggctgggtcttcccatctaaactggtgggaaaaaaggtctatagtaaaagtaaaactgagaactcttaaaccagtagagtttctttgtctctcatctaaagtatataacctcccaaagtagaaaaagcacaagagagaagcttatctatcaaactgtctgcattagtgcaattaagaaccgaaatacgtctatataaagctttcagctgtattgtaatactttgattcgataggggctacaactcccctactgctaaccacatttcatggaatatggctacattgcatcttgcattaaatatctggag

SEQ ID NO: 19086 - DNA, 687 bp, Homo Sapiens
gcacgaggcagcctcgggggaacatcgtgggctgcagaattcagcacggatggaaagatggagatgaacctctaacacagtggaaaggaaccgttctggatcagctcctttgaataaacctgcccgccaccaagaacccatacatgactttcttttcattgtatcaaagtaatgtgtccaccggtgtgagcaccagcaactcacttcttcctcagacatctctaaagctggaaagattttgagggacaatatggtttccttcaccccacaccaatgttatgaatgagaccagcagaccaacagcaaacacctagaagcctctcaggatcttctgctccagtcttgtgacggtagcatgttcctgcttctggtggtgctaaaccctgggcaatcatctctcctaggaacagctgttcttcatgggtgactgctgtgaaaccaacaggatggcctcttttctatttaatcctaagagtgggcataagggaaaatattgggtaggtcctttggagttctagactcagtttgagattacagaagatatgctcaacatcctcctttgacctggtcgcagtttcaccatatttgctagatgctttatagtctctggtaaggaggtgtacaattctctgattttatttcagtttttagggaattttattttgttcatttcaacaagaaagatta

SEQ ID NO: 19087 - DNA, 752 bp, Homo Sapiens
gcacgagggcgacggccggtgtcgtggtcgcggtacctgttccaacacggctcgcgggcccgtgccggctccggtccccggcgcggctgtccgagcccctatgaaggaggatggaagggcaggacgaggtgtcggcgcgggagcagcacttccacagccaagtgcgggagtccacgatatgtttccttctttttgccattctctacgttgtttcctacttcatcatcacaagatacaagagaaaatcagatgaacaagaagatgaagatgccatcgtcaacaggatttcgttgtttttgagcacgttcactctcgcagtgtcagctggggctgttttgcttttacccttctcaatcatcagcaatgaaatcctgctttcttttcctcagaactactatattcagtggctaaatggctccctgattcatggtttgtggaatcttgcttcccttttttccaacctttgtttatttgtattgatgccctttgcctttttctttctggaatcagaaggctttgctggcctgaaaaagggaatccgagcccgcattttagagactttggtcatgcttcttcttcttgcgttactcattcttgggatagtgtgggtagcttcagcactcattgacaacgatgccgcaagcatggaatctttatatgatctctgggagttctatctaccctatttatattcctgtatatcatttgatgggatgttttgtacttctcttgtgtacaccaatttggccttt

SEQ ID NO: 19088 - DNA, 872 bp, Homo Sapiens
  misc_feature (459)..(471): n is a, c, g, or t
gcacgaggctgtcctttactctttgatagtatccctctattttcttcccaattctctaaatgctttatcattttttcctgagatgcttctgagggatgctgacctcccactatggggaaaagggttgcttggaggacctggggtggcagccccccgaccagaagcaccctattttatagatagcagtctgaatggtagagagtcctgtgtgtgggttgttagaaggttggttcttcctgttattctctctggctttcctttcagcccacttattttcagaggcctctccccttagcatcctttaaaaggttttctgatgaatgtgtgaaagagttgattatttcaacagtattggttaagtcacaacgacgaagtgctgagaaggttatgggtaccaggaagaaacaaacagaagtcttaagattagaatgagaaccaaagagaatttaaccctgccannnnnnnnnnnnnaacaccaagatcctaagtaattccaaatgccttagatatcaatgaaagctacacaccattgagatgggcaaaattctttctctacaaagggagtaatcaagtaaatacctgttctctttcaatggactgttgcctattgagcattgtggatgatgtgttttcagatttccaggtgaagttctgaccctacctgtttggccaaagacgtaaattgagaggaaaggccttggtcttcctgatcaaccagcatttaacgaacagtggcttaatgcagatcactcaagaggcagcatagcaatgtaaaaggatataagtaggtgttggatgcccttttcctagaccaggaatggggaatatataacacctgtgccaccgctcttttaaggaggcattatgaatga

SEQ ID NO: 19089 - DNA, 896 bp, Homo Sapiens
gcacgaggtattttaaaatagaatttattgaataccatagtatattaaatacataaaaaattgtttttcttgtcagtattggcacataatgataaagtactgctaaattaacacttcaaaaatttcaaattttaaaacattccataaaaatataaagcctagtagtgttataaaagtattaatttacactaacttacatatcaaagtgttaaaaaagaaattccacactcaaaccaattatctgagaagtaaaaattcaatcatgttttaaaaaatgttttcatttgaacaaaatgcaacagaaggtataaaacaggcaaaaattacctaatttacattgacttgtcctactagaaaatgttgcaggttaactttagacattaaaaagattcatattccaaaggaatagaaaagctgtttgcaatactttttatgcctaatcaaagaaccacataatgacattttgtgggttgctccttaattgccagtaatggaggactactataaaaatttagttttaaaaataatttttctcccaatgaacatttttatatgcagaggctgtcctcaatatggaaagattaaacgaggacatttatacttatgatcttcactataatatggcctatatattaccctgtcaattttttttcactctgaaaattcagtaatctagcatatgagtattacagtagaggatcaaattccaaaaggttgagtaatttgattcagatctcttgaatttacagagtacttttcctccaggaaatgtataaagttatttattttatgttatatatctatatttctttgagatggcatcttgctatgtcacccaggctggagtgcagtcactattcacagacacaatcacagctcactacagcctcaactcc

SEQ ID NO: 19090 - DNA, 879 bp, Homo Sapiens
atatccatatctttatttaaacaagtttccataatagctaggagaatacagcattaatgacacacatttactaagcacaacaatggacaactacaaatttagagcataaatgtaattctgatattgttttggtttttatcttagcactaggtgatatctagtgaaaacccatgtttcaaaggcttttgttgatatgagatgaattattaacttatttttaaaaattgcacgtgagatatgctagaatgggttctagagtctagagttagttgataatgcctttcatgtctcagtatttctgcttcctttttaatgggtaaatgtttcacctaagaactttcaaaaaattgtatcaaaattttctatgcagatcaaagtagaattccttttccagacccaacaaggaaaaatatttgaaaactgcaatgttcaattccattttagttaaaaggatgtccatttcatagtaaattaatacagttaataattaaaatacaatatgttaaatggcatgaactcatttttgcgcaacactgttagcgcaatttaaatctcccaaagacacaaaaaagtcaattttactgcaggatcccacaaaaatacataaccaggaatcataaattacaacatatatatccacatttaaagaaaaaattcaccatttgttgggaaaaataatggctcaaatgatttacggagcctgaaatgtgggctaaaattttataacatgataacaataagatttgaaactgctgactctgaaaaatgcataaaaatatactaacctggcaagcactgaattatatataccaagtttcactaaaaaacaacatttttttctttcaattatttcaggcattacaatactggaggaaacgt

SEQ ID NO: 19091 - DNA, 313 bp, Homo Sapiens
ttgtttgatttcttttccaagcatcctggacatgagggtccccgctcccctcctggggctcctgctactctggctccaagaggggggttgtgacatccatatgacccagtctccatcctccatatctgtccctctaggaaacagggtcacaatcacttgtcgggcgggggtcaggctggaacctttttcactgggggagttctattagggcaagcccccctcctgctgatctatgctacgtccaacttggaaagtgggggctcgacatcgttcggtgacagtggatgttggacagatttcgctcttaccatca

SEQ ID NO: 19092 - DNA, 756 bp, Homo Sapiens
gcacgaggctggtttaaaaacttagaattgcacacatttcagtatgtttatttgtacttacataattttagaatagtggttgccaatagcctgtatgtttcacattaattggttttttgttatctaaataaatcattttagtatgttgtatgtcagttactgggatagctgggacatagagtgtaatttaaaatttgtcaataagtattcattggaatatatgtaaatgtgccttgccggttattgaaacttatctacaaaatgagtatggggtgacaaaaattagttcctggtgcttaatgaaactttctgccactgattttatatattaccccgtgcttttttaaagtacatctctctcaaaacttagtgtaagtttgagggctacacaaaacatttacatttcattctaacataatgaatataataggttgtggaaagtgggtaaactaaatgtagccttcagtaaaattgaatctcagtgtaatccttggtgctggcatttctcagttccgaggagttaaatgatcccatctaagaggtcattgccatgcctattggcactttactgtcatagcatttttaagggacactgtcaaggtgtttaagttctcagaattacttgttgggattttaggacaggtttgtttacttaaagtaagaactgcattgtcaaagttgaaagaggaacacttttgtgagttcacaaatgtgttcttaagaaaacattaaaatatggagctctgggttttcaac

SEQ ID NO: 19093 - DNA, 230 bp, Homo Sapiens
  misc_feature (150)..(159): n is a, c, g, or t
gcacgaggaaccatctaatgtgaaatccacacttggaactttttagatctgtctgttgcttgtttaatatatttcttttatgacattacttaaagtttaaaagggttttctatccactgtcaatttcaattggataacattttgtcaagnnnnnnnnnncctgattatttgatgctagctggaattcaagaaatggcattgaccttattcaaataaagaaatattttagt

SEQ ID NO: 19094 - DNA, 847 bp, Homo Sapiens
  misc_feature (385)..(455): n is a, c, g, or t
  misc_feature (503)..(556): n is a, c, g, or t
gcacgaggtacaatccttacttagttgagagatagaagaaaaatacaggaataaagaaatgttgctttacaaaagccatttccatggtgtttagtttctaatggcagaagtcatgaaagggagacttttaaacaaatattgtactgctaattaggccagaatagtctcagaagcttgacttcagcctaccctgatgcagtatttgtgatgctgaacagaattttaatatttgtccatctctcatggtaaaaatgtaccctcacatagcattagataatcctccagtattaaatatatctaactgaaaaccctggaaatattacatgcgcaagcattttagctgtggatatctctatgtggtgtgatttataatgccttctttttnnnnnnnnnnnnnnnnnnnnnnnnnnnnnnnnnnnnnnnnnnnnnnnnnnnnnnnnnnnnnnnnnnnnnnncaaattaaattttttaagaaaacaattccttagtcaaactaccacacnnnnnnnnnnnnnnnnnnnnnnnnnnnnnnnnnnnnnnnnnnnnnnnnnnnnnnactcagaacattccatcattgcagtaagttctattagatctgggctacagccccacacccaggcaggtcagagaaatgcaatcagggtaatcacctccctctgccctgcatcaaacttttcactggcatttgctttctcttccttaatgaggacttaacttttttttctgacacattacaactatcaaagtgtgacaaagcatggattaccttatttgcaatggtttctaaacagtgattagctctcccagtgatcctattaaaactagatccctctgaattaataaactc

SEQ ID NO: 19095 - DNA, 387 bp, Homo Sapiens
  misc_feature (108)..(148): n is a, c, g, or t
  misc_feature (302)..(314): n is a, c, g, or t
gcacgaggatccattattatctttatttcagtgctcaaattgttcctgatttagttagtagcagccctttcaaggtagcttttgtattcttttgacatgtcactatcnnnnnnnnnnnnnnnnnnnnnnnnnnnnnnnnnnnnnnnnngggacggggtctcactctgtcacccaggctggagtagtacagtggtgtgatcacggctcactgcagccttgacttcctggacccaagcaatcctcccgccttagcctcccgagtagctggactacaggtgcatgccaccatgcctggctaatannnnnnnnnnnnngtaaagacagggttacatcatgttgcccaaggctggtcttgatcgaactcctgggctcaagtaattcaccctc

SEQ ID NO: 19096 - DNA, 877 bp, Homo Sapiens
  misc_feature (572)..(582): n is a, c, g, or t
gcacgaggaactctttgtctgggtcagtcaagaaccatttccaaacaaggacatggagggaaggcttcctaagggaagacttcctgtcccaaaggaagtgaaccgcaagaagaacgatgagacaaacgctgcctccctgactccactgggcagcagtgaactccgctccccaagaatcagttacctccactttttttaatcgtaacacctccatttgtattacatatggtgtatgggtattgatgaggtcatggtatcatatatgggatttttttctgtgtaaatcatcaagtataagaagaaactatgggactctgagccttgctttagagaatttacagtggacaaataggtgtcatcaaaccagtttttaatcattctgactcaagtgaaaacgctcagaatttcacactgtgaatccacgtttacaacccttacaggtgggccttcaggcctggttcgctacaacaatgtcttccacaactcaaactcccaccgcgctcacacaaccggtccactcctgccttttcactcacacagctcccgactgcttcttgcagaggctgagagtnnnnnnnnnnnacccatttagatgtaacaaacctagtagtttatgttcatcaattgtctgtatatctctatattttatccatgtactcttttgatgtatagaagtagtttgaaactcattgtttccttgtggtaagtgaccgagatgctgccacaggacctgagacactgatgaatggtgctattttggacttttcaacatgctccttggcgaggtagctctgatggagttattttttatttccatgttctaagaagtgttggtactctgtttcctgaatgttgttctctagactggattgacttg

SEQ ID NO: 19097 - DNA, 771 bp, Homo Sapiens
gcacgaggggctgttcttgaactccaccccctccagtgatccctctcatccctccctctgacctccggcctattacaggtgtgacccttccactccataacgcacctcctcttttttttactaagagtttcactaaacatatatgaatgatggcgccttttccatcttaatatacataccaaggccacaataatttactgttcaaataggccttataaagtagataatcctatttattaccttataaatattatgcttctcagaatgtttctaagccttcttaccctcacacctactccctaccacaaacttatgatggcaatggctctttggaagggacttcccataaactcgcacatatatcacatctcaacacattacaatattacttgttgagttaatattcatcatgtgatctcgtaaattgctaatataaaacatttgaataaatataattcagttttagatggtgggatttttaatgtttcgtacttttacactccaaaaatcctttaattagaactagtctctcttggcttcttacgaaggaatctctcacttatttggggtctagttttcgcttgacggacttcacgtcattactgcttcgtcattccttataaatctgactgtatcaccacttaatatctgccttaacatacattcatcactataaggttaaactgaactcccagatgcggtatatgaaatatgtagtatgactattatcagtaagtctccgtctttggatgacgtcttttctgttaaatc

SEQ ID NO: 19098 - DNA, 1002 bp, Homo Sapiens
  misc_feature (53)..(622): n is a, c, g, or t
gcacgagggaaacacttatacacttactgagaatgtatgttggtataaccttnnnnnnnnnnnnnnnnnnnnnnnnnnnnnnnnnnnnnnnnnnnnnnnnnnnnnnnnnnnnnnnnnnnnnnnnnnnnnnnnnnnnnnnnnnnnnnnnnnnnnnnnnnnnnnnnnnnnnnnnnnnnnnnnnnnnnnnnnnnnnnnnnnnnnnnnnnnnnnnnnnnnnnnnnnnnnnnnnnnnnnnnnnnnnnnnnnnnnnnnnnnnnnnnnnnnnnnnnnnnnnnnnnnnnnnnnnnnnnnnnnnnnnnnnnnnnnnnnnnnnnnnnnnnnnnnnnnnnnnnnnnnnnnnnnnnnnnnnnnnnnnnnnnnnnnnnnnnnnnnnnnnnnnnnnnnnnnnnnnnnnnnnnnnnnnnnnnnnnnnnnnnnnnnnnnnnnnnnnnnnnnnnnnnnnnnnnnnnnnnnnnnnnnnnnnnnnnnnnnnnnnnnnnnnnnnnnnnnnnnnnnnnnnnnnnnnnnnnnnnnnnnnnnnnnnnnnnnnnnnnnnnnnnnnnnnnnnnnnnnnnnnnnnnnnnnnnnnnnnnnnnnnnnnnnnnnnnnnnnnnnnnnnnnnnnnnnnnnnnnnnnnnnnnnngataaattataggaaaaggaaaaaaattacaaaatacaggtaaacaaggacaaactccctataatcttgccgcctcccagaagaattcaacagagccacaattataaagggagtcactgttgggtatgcaagtaaagcaagaaagcagaagagagaagttaagagagccctgtttatatgtccttaattgtagacctaagacattaaggtggtgatttagggagcctttgtcatggtataatcacatttcagacatggaaaacctaatcaagcagtaaagttctatgtatatttattgtggttatgtgcagatttgagttagttgaattattgtttataatctataccaatacctttaaaagcccttaaattttattttt

SEQ ID NO: 19099 - DNA, 217 bp, Homo Sapiens
  misc_feature (43)..(52): n is a, c, g, or t
aaatttaaaacgtgtttattaatcctttatccctctaaaaaannnnnnnnnnaaccgaagaaattttttggaggggggcccaacctagggcctggactctgaaatctaaccccccacttccctcattttgtgatgtaggggggggcatggtttgtaccaaagcggggtccccgattggagtgtgggaaaggaggaccttggcccccacatatggggg

SEQ ID NO: 19100 - DNA, 889 bp, Homo Sapiens
gcacgaggatttttaagagatcaaggtgtaaattatgatgatttattattttggtctacagtgtatgtaaggttagtatgttaagcattgtttaaaaatactagtaagtcataattatgcagaattttcacaaagtttaatgcacagagaaagcatatcatttcagttactgatacatcttaacactactttcttttaaaacagacatttaacatacacaagttatagtagcagtatgggcttctcctcccattggcaattaaatgcttttattttcttctgaaaagatgatgtggaccaacaggtatcagacttgccaacaaggtcggtagactcttcccagcatacatctgagcactgaaggaagaagaaagtttaaattgtttaaaggactataattatcacacaaaatttattaagaaaaaaagaatggatctagtataactaattctgagtaaaccaaaatgataataattaattgttgctatttaatcccacatttttggcaggtgtaattgagccatggtcttatttgattttgttatgattgcatccaaattcactttaactcagagttctgtttaatggtggtaggatgtaagaattgaattttgaaaagactactcactgtcaaaatctctccttcctataggaaatttagctgagttttcttcatccccaatttctctcttttcttgtgttgattcagtattctgaactccattctcagctggggaaagctacagatccctttagttgcaagataaggttttatagccagattcagtggcagaccatgatttaagaaattatgttttggagcctgtgttctgtaaaagaaggttgatttggttttaacctatcgtatccggagtggaactataataca

SEQ ID NO: 19101 - DNA, 775 bp, Homo Sapiens
  misc_feature (80)..(88): n is a, c, g, or t
cattcataaaaaaataacatattcactttgtgataacataaatatgtttttaatgaaaaataactgtatttcccaaagcnnnnnnnnnttagaagaatgacattattttacattttgtaaatctgtttaatgtctagcttaatagaatacagctagattcttttttctttttctatattcatcttttatgacacaatacagcatagagcatctggacagtgccactatatactaatgagacaatgagactgaaaaaacaaataacttagcatcattatgaaagtagatttgaagaagctgtgtgctccagaaagtcttggggaaccccatggatccctgaactaaacttcgagaatattgccctagggttaaacctacaatagtacccaaatgaccagatttggtaatgaccatgggtctactcatgggggtttgagtgatctaagaaaacaatggatcaaggatggatgatgaatttggatatgaaaaaccaggaatagactgaaaaccctaacacaatgaaggggagtctgaacagtgaaattataagggaaaagcttgtattaatagaagaaaatgcaaataagattatgaactctgattccaatgtggaggctgtcttcctcatgctgtatatttacattctcacctctgtctggataatttctgatttatactagagtcagagccagtcattggtggtaacagtgaggctttaagactatctcataatttagattaatttctaattttctgagaatgctcttctgtctat

SEQ ID NO: 19102 - DNA, 805 bp, Homo Sapiens
gcacgaggattcgttgctatactttgctgtttgtcattaaaacatctctacccatattcttgcaaaataatatttatattttaatggataggaaaatgatttgcaattagatgtttccattcttgaaagaaaaaagctgcaaataacattttcaagaatataaaaaaatgagtaaacaaagggaaggttgtttggtcatttatagacaattaagcacagactgtagatgtccttccaattcttgggaggctaaactgagtctaccatttcttacatttcttttacctattttttgagaattgccagttgtacagtgtttagcatgtggaatgtaccaaatatatctatgttgtgacttaagatattctaaatgtggataacttctgacctaggaaacatgaagtttgtagtgaagtaagtgaaaagaatgttcaggaaattttttttctccatctcttcagttggcatttattgagagttttatttgaatgcttattaaaagtatatgatttataatatttagaaaatagaagaaaaaagaaaactgtagatgttttatcttgttttaatactgtatgtttagtacgtatacatttatgttctagtgtatcaaaatttttcattttcattaaagtgaatccaattttccatattctaggtccattttaaaccatgaaaactttaatcacatattttgtaaagggctgaaagtatgatttaaactacagattgatatattttaatttctaaatgaaaggtaatgtaaataagcatggatctgattgaataaagattttaaaatagt

SEQ ID NO: 19103 - DNA, 919 bp, Homo Sapiens
gcacgaggataagcttatagatattttagatttatggaaaaaatttacaaaatatagtttggagacaactgtgagggacaatgaagtagcaacttgggaaaaatcctgagtatactaactattgcttgataggggttgaatcataaaattataaaacaaaatgcagtatgtgttcctgtatatagaaaaataatatatgtttatataaacaatatgtttttttcccttaaatatttaatggactgtcaatgttttggacattttaatgaacattgggtattgtgtaaatattagttcttgaagccaaagtaagttcccattcacaattaacttaaaaaaataaattattggtcttctccttagagaaatgacattgtgctaagcaactatgatattaccaagttcctactgtgttaaaagatagatctaagcagggaagtggttttcaaaacatgagtcactaaacaaaggaaagttttatactgctttctcatgcttttcacttgttttcatcagaagatctgacaagcataaaagtgttaacatcttttattttacagatgttcttagttttccctcaaactgtaaaagatgctatatcagagtagcttggtaggaaataatttcaacacctcctttcacttacgtgataacttattgtttgtctaagcttgtggatacttttggagagagtgaattgaggcaagaaaagatagcatattgagatctaattgttctcattttgacatatataccagtcagtctatctgctatattatatagtctctctaaaataggtcttaatgggcattgttatttttacttctgtgttatggtcattgaaaagtccctaattagtgcaatgggagtgccagttgaccaaaaggagttgttgatgggcactctgtgggtttgcaaa

SEQ ID NO: 19104 - DNA, 555 bp, Homo Sapiens
  misc_feature (235)..(294): n is a, c, g, or t
  misc_feature (349)..(392): n is a, c, g, or t
ccagttaaaaaaaaggccacattttttgctacaaaaggggcagggacatgacttcatcaaaaaactacaaaggggaaacggggaagggccttgaccaagcggggtttgtttttgtcttgaaggaactccagcacacaaccggttgggacacttctacaaatcaaaaatacaccaaaaacatgaaaaaatcgaggcactcacccccacattgaaaacagggtgtaactgtttatcnnnnnnnnnnnnnnnnnnnnnnnnnnnnnnnnnnnnnnnnnnnnnnnnnnnnnnnnnnnnaaggcggccgctatggtaaaagcccaaaaaaatttccccgcggcgacctccactnnnnnnnnnnnnnnnnnnnnnnnnnnnnnnnnnnnnnnnnnnnngctccccatacggtttcatcgtggaaacagtggtaaaataacatcttttaattgaaaaataggtgccactttttactcataatgattcaaaaatctacaaagaaaaatattcaaaatctgacaatttttttgtaatattcgggaataaaaggattgctctcgc

SEQ ID NO: 19105 - DNA, 864 bp, Homo Sapiens
  misc_feature (162)..(170): n is a, c, g, or t
gcacgaggaaacccttccccttggggcaaagccagttcttagagaaagcttgatacactggggcaaagccagttcttagagaaagcttgatacactacttaatctgtttttcccttaaagaggctggctacaaaataataatgcttctttttatgtttcttnnnnnnnnngctgatgaacttttaggagcatcagtaggttatctggtcaaaacaaatgacttgcaagcatattttttttggcacccctaagactactgaaagttaggctcctgcaggaatctgctgaaatcattagtaatgactttgcaattcaggcttcatttaatctctctgaggacgatttttcttagcttgataaagtttgtagatttagtctttaatgctaatgacaaaaagagcttaaatgcccaagagcagaaatgaaacaaacaaataagagaaacaataaaatggagtggagataagtaaaatgaaagacaatttttgaaaatcagttgtatatcaggcatgttacgtacattattttatgcagttctttcaataaatgtaataggtaggtagtgtatcaccctcattttacagatgagacacatgctcagcagggagcccaaggtcacgccccttgtcttgggttgggcagaccaggattctaatcaaatccatcttgcccccaaattcaggttcctttcaccacacataagtagagacccttgcttttattgaacaatggttgttaacacatcacttaaagtagagtcttctagaaatttagtcaattaatatctattaaatttcactcaaaataaggcacacttaagatcatcaacaaattattgagactgaaaggatatgggttaatggc

SEQ ID NO: 19106 - DNA, 391 bp, Homo Sapiens
  misc_feature (152)..(246): n is a, c, g, or t
  misc_feature (276)..(304): n is a, c, g, or t
ttaaaatttaaacctgatcttttttttggtataatgtgggatgtaaaaagaatactaaaatgctgggaaacaattaattgattggctgactttgtttcctaagaaataatatctttcactttacagttggaagaaataaaactgtttgtctnnnnnnnnnnnnnnnnnnnnnnnnnnnnnnnnnnnnnnnnnnnnnnnnnnnnnnnnnnnnnnnnnnnnnnnnnnnnnnnnnnnnnnnnnnnnnnnggggggggccgggaaccaattcccccaatnnnnnnnnnnnnnnnnnnnnnnnnnnnnncggcttttttaaacccctggggggggaaaaacccggggtttcccaatctaaaactttttgaaaaattccccctttcccccagtgggg

SEQ ID NO: 19107 - DNA, 947 bp, Homo Sapiens
gcacgagggctttgactagtaaggaagagaaagagagaaatgggttggcaaaaattaaccaaagactttttcagtaattattttaaaaagaaaaatgttatatttagaatggtattttctttaatggtctccaatccaagattttttgttaaatggtgagttttttttgcatgttggaaaccaaacagctattgctgttgtagtttagatatttttagggtgcctgagtgaactagaagagcagttagtcatgtccatttcctgggcacccagacatgtgaatctacctgtaaagggtcagtttgcagaggcttactaccattccctcagtgtggccatttaatggactaatgtgtcccatatgggctcactgtaattttattttttactctaacacttaaaaaaagaagaagaaatgtttatcatagtagtaaaatgtttatttcagagtaagaactattaggataaacaagttagaaccagttgtacatcttttagcagcactaaaatagctccccaaacagcttgtggttaaaaagaaagctaggctgtaacaaaattagattagtaatagctaagataatttttatttagaaaaagttttattaacgaaaaaaagtaagtgctagatttaattaacgtttgatgaatgaatgctgtgggtcaattcagaaatcattctaaaagaagcatgtatttggaagatgtggttttaatctgctggatgtgttctaataagtttttatttagtgaaaaaaatccaatagtaatgtattttcgttagagtgagtccatgacgccaaagagacacagataggaattttatagcagtgattttttgaaaatttgctaatatatttgtttgtttctaaaggattttgcaaataccatttctggacatggtggataatggacagatttgattgtcagtattgatggcacttttg

SEQ ID NO: 19108 - DNA, 505 bp, Homo Sapiens
  misc_feature (46)..(95): n is a, c, g, or t
ctgaagtccttagttggatattaaactttatcattttatcctctannnnnnnnnnnnnnnnnnnnnnnnnnnnnnnnnnnnnnnnnnnnnnnnnnctgggtgatactctcagctgtatcttctaaatctcttattacattttccatttgagggatcctatttttcttttaaatgtaaaagctcttgaattgttttcggggctgccatttattccctcccttacctccctcctttccgtccctttttatttctttttaaaacacagtatctggttcctgattgatgcatgtagggttttatcttactgaggatatatattaaaatttttcgtttgttttcttctctttctgtgtttcttcagcacaatctttcacttctgcctctttgtttctttttgctggtaattctctattttcatgttaggcacttttctcaaatgtctaatgatccttcgtttctcattcttatttaagggatggatactaaaaagctgttaggaaattcc

SEQ ID NO: 19109 - DNA, 873 bp, Homo Sapiens
  misc_feature (285)..(309): n is a, c, g, or t
agtttgaaaggggtttatttctggtgcacacaattgcttcattgtgaatatacatgtgattctctgtacacaggaaatggaattatgttcaaaataatagacacagcaaacaagtttctttgaagttactaaaaattaatgactacataaaataaacattctaaaactaagtaagtattattaatttgaatagttagtaggtgtaagggaaaaggcatcacactacaataaacaaacaaaaacaacatgcattcctcgcattaggttaaagacaccttcaaatannnnnnnnnnnnnnnnnnnnnnnnnaattgtgggtattacaactcccacaaaaatgaggtgctgaattcagatatagtaagcaggcaccatgcaaaagctgcccagttttgccaatcaaccttgatcacaatctacaacacagtccctcggatggcaggccccatctcaagtgtgaagaaactgccaagtgaacaaaatggtcttctcaacagtatttccatgtaaacaattaggacacaacattagttcaattagacaagttactaacacactgtgaaggaagaatgcattttcttaatagtagtagtcttattagttgaataaacaatttatgcaatgcaaatttcgaatgtatatgcacacatgtgtacatgtaggtataatatatttagaaagcagacatagacatttttttcatgctttgtgacctgatggtgtccacaggtccactcaagttacctggctgtctatcctctgcctgacccctgaagcgaaccctgcggctacgattgcgtcgctggggttttttttccctaatcatctggtaatggcaaagtttaccttgaactatttctgacaacaacaaac

SEQ ID NO: 19110 - DNA, 844 bp, Homo Sapiens
  misc_feature (106)..(136): n is a, c, g, or t
catggataattttaattttcaactttaggcttccattttcaaattccactatggacacataagctaaagtttggtttcaatacacacgtgtgcacgtgcgcacctnnnnnnnnnnnnnnnnnnnnnnnnnnnnnnncctggcttgctaagggcaagaatccttgattgcaaaaaacctcctgccagttgcttctgaagcacacacaggccttggggagcccacaaaaggcctcctgctttttgtgcgctaggcctctgcagcctcaccctgctctcctggggcagccttcatgcaggggtggcctgacaactttctagggctgccaaatttaacgcccccattgagtttcatgggattttaatggtcattgttttggaggaagggaaaaattgtgatgaactgtgggcccccttgagctacaaaccttttccacaagtagtcaggccctgggaacctgagtgcttcacccaaagaacttgagtctacggaagcttttatttgacaaccaagccaggctcactacaccagctgatggtgctgcttggagccgacttccccactcaaggactgtgaaactttagtttctttaggaaactaagcactcatcttttcataatttaatagggcggattccaagccctagcttcatactgcctgactttcttttcagaatttcaactgttttttcacccctgggccatgaagttagagagtgcaggtatgatgcccttgaaaagcagacttgtgctccaatcccacctccatatgctcatctgcgaaatagagacaccagctggggcagtgcagtgttgcccggccctgcttacaggggccctccctggg

SEQ ID NO: 19111 - DNA, 401 bp, Homo Sapiens
gcacgaggtgaatttcaacacctgcaaataagcagtgtgtgcacagaagcataatgtgaacacagagaaatgaatttattccccatatgggtatgtttgccccctggcaatgcatttccatactctttaacttggggactgaaatgttataaattgacagttctactcagaagacctttcaagcatcttgtgtttatgagaatacaggggcatctgcggaatgaattcgaacacatggatgaattaaatttgaaaacacacagaccgagaggcagacagttcctaggctgtggtcgttgcatggattttacaaaactgttaacctacacctttggctttgctgtgttcattgtcctgggaagaattgtgggtttaagaattactctttgattaaactactt

SEQ ID NO: 19112 - DNA, 303 bp, Homo Sapiens
gttagtatttttcgttacttacttataataatctgatatctagcatgaattggtgtgccttaggtcactctaatcggtccccaatcataatgacctatcccatgcctcctagctatgctagacatggaagccccaatccccccattctcctgtggcatgttttatatcagacatttaaaatctgtttaccgaaaaagaccagtattttacttatttgtacgtttctgcttacgtttgcatcctatcagaagcctgtctatatgatacaagcccgtataaacctgagatttataagaccagggc

SEQ ID NO: 19113 - DNA, 840 bp, Homo Sapiens
  misc_feature (168)..(195): n is a, c, g, or t
cacaaattgcttactttatttctttaacaatgaaatagtaataacacaataattcagttgtaacaaagccaccaacagagcaaaacaaaaacaaagctaattaagaagcattgcttcagctcaaattagttatctcctttaaacaggaaaaacgaccattagtctacnnnnnnnnnnnnnnnnnnnnnnnnnnnnggaatggagggaaacaggacaggtgtttaaaaaaatagttatatccaagacccacctcaaaactattaaatgaaaatctctcaagagtgaggcccaggcaaagatttttaaagtgctgtcagtgttgaaaactacaggtctaaagtaataaggaataaaaccatgcctcgaagcaattcaaaaccaagaagctgattatacaataaattttttcctctaatcctgggaaaacagggggaagcaggcaccgattcagttttcatttttctttatccatcttcagttgcccatagtaaagcttaaccaacatcaaatatgggaagctttgcaaacacgctacccaaattgaaattatcactactttacatttagaaagctcttttaaaacaatagcttttacaacaatcccgcccatcttaagtttgcatagatgttcaagtcagctatttgttcaactaacagagtcaatagaatgtattagaaagtactttattaacaagttattataaaacaatattcattttatataccacaaataaactttttggtgcagataggaggaatatttgagtttttcccacctatttctaaaactgctaagaatttctttttataagatcagtaccttcaattctagaatttaaa

SEQ ID NO: 19114 - DNA, 564 bp, Homo Sapiens
gcacgaggagtgtggattttattccattgcacaatttgctagtgtatttcctgggtagtgtggtgctgaataaataggagtagggtggtggggtggggtgggtaagggattcagataagccagaagcagggtgatttttagttggaattgtaaactttagtcagcccccacacgctgctggggaatgtggaatgttctagctctgagatgttaactgagaaaagagaagtcaaacaaagccgatacgtgcagccctgtctacagaatccttcattatccagtttaatcaggagtttcttggtcttttattaacttggtcccaaagaaggaattcaagtcctagataagtaaatcctcaatttgctgttccctgaagtatggaaatgaagttgggccagtttttaatctctgctgccagagaggccctttctgctaatagataaaaactcttttgctcaacttagtaatgacttgtggtcttttggatatggctgacctgaattggactgaactccccatattcctgctgagtgggtcattactggaatgagacatttgctcttc

SEQ ID NO: 19115 - DNA, 396 bp, Homo Sapiens
caagctttccttggggggatctaattattaccagctaaaggtgatgggcttccattattcctgtaggcagaaagggctctctcctgaaaaccatctaccccgaaaaccgaaaaggtatgaacccttgctgagtgtttgtgcatgtttgtaaaatgtcttttaaaacaatgtgtatttagggttttattttctcttcttgattcatgaacctcaaatatgcaacatttaaaaattattgatacataatatttgtgtgtatttatgaggtacatgtgttattttgttacatgcctcaaattacaatgattgtgccacggtatttggggtgtctgtcgcctaagcatttatcatttctatgtgtacagaacatttcaagtcttctcttatacctatttt

SEQ ID NO: 19116 - DNA, 470 bp, Homo Sapiens
tcagttgtaatgttatgcttttctctgaagccaatttttaagaagttcagtcctcagctgtctgacccctccacagttggctttatattcagaaagtaaaaattacttaaggcagcttggaagtgaggcctgggaactactgggggcaactagtatgaacagcactatttacaggtctctttctcttgcctttgattcagagctgtcattctcagtaaatattgatagttttattgaaacaaaaggggtctttagcatgggaatagtaacagcagtgcataatcaagataattctgtatccttcactctttttctctgcctttttttacttaaaagtaaattcagactcttaaaatggtatagaattattagcttgaacattgaattatctcgtcttaactagaatgttttttaaaaaacagtttttaaatgtttttaaataaacatcttgctagtatggtggaaaaaaa

SEQ ID NO: 19117 - DNA, 626 bp, Homo Sapiens
  misc_feature (115)..(319): n is a, c, g, or t
  misc_feature (381)..(410): n is a, c, g, or t
  misc_feature (438)..(446): n is a, c, g, or t
agctgcaggcctcttttctctgcctacggcaacgcgttgaacaacacagaaagacctggtttgaggctaattcctccaggtgtgaacaaacatcttatgggggccagcccctttnnnnnnnnnnnnnnnnnnnnnnnnnnnnnnnnnnnnnnnnnnnnnnnnnnnnnnnnnnnnnnnnnnnnnnnnnnnnnnnnnnnnnnnnnnnnnnnnnnnnnnnnnnnnnnnnnnnnnnnnnnnnnnnnnnnnnnnnnnnnnnnnnnnnnnnnnnnnnnnnnnnnnnnnnnnnnnnnnnnnnnnnnnnnnnnnnnnnnnnnnnnnntatgattaggtggacctgactagactacagccttttcaacagatggatactcatgtcccacnnnnnnnnnnnnnnnnnnnnnnnnnnnnnngacttttcccttcatggttttaattacnnnnnnnnnatccttgaaaaaatctttctcgagatatgatttatactgaataaaaattaatcatttgttccacaattctttttttaaacttttatttcagttcctattggtaaataccaataaaatgccatgcaattttcaagatctgctttagtgcattacattgaaatgaacctcattctcactata

SEQ ID NO: 19118 - DNA, 752 bp, Homo Sapiens
  misc_feature (76)..(220): n is a, c, g, or t
  misc_feature (232)..(250): n is a, c, g, or t
  misc_feature (273)..(284): n is a, c, g, or t
  misc_feature (321)..(615): n is a, c, g, or t
  misc_feature (663)..(671): n is a, c, g, or t
gcacgaggaaataacctactaaccaagtcaaactaagccatagcattgtttcactcccagtggattaaagggtttnnnnnnnnnnnnnnnnnnnnnnnnnnnnnnnnnnnnnnnnnnnnnnnnnnnnnnnnnnnnnnnnnnnnnnnnnnnnnnnnnnnnnnnnnnnnnnnnnnnnnnnnnnnnnnnnnnnnnnnnnnnnnnnnnnnnnnnnnnnnnnnnnagcctgtctctnnnnnnnnnnnnnnnnnnnttatcagtagcaatctcatcttnnnnnnnnnnnncaaatttggatgctttagaaagttctccattactgcnnnnnnnnnnnnnnnnnnnnnnnnnnnnnnnnnnnnnnnnnnnnnnnnnnnnnnnnnnnnnnnnnnnnnnnnnnnnnnnnnnnnnnnnnnnnnnnnnnnnnnnnnnnnnnnnnnnnnnnnnnnnnnnnnnnnnnnnnnnnnnnnnnnnnnnnnnnnnnnnnnnnnnnnnnnnnnnnnnnnnnnnnnnnnnnnnnnnnnnnnnnnnnnnnnnnnnnnnnnnnnnnnnnnnnnnnnnnnnnnnnnnnnnnnnnnnnnnnnnnnnnnnnnnnnnnnnnnnnnnnnnnnnnnnnnnnnngttctctattaccattaatgggtaggtaatggcaaaccattgtttccnnnnnnnnncaattttgaagtcaggttattgaataagtacaatttaaagacctgcatatcttccccccaaccccccttgaaatttagact

SEQ ID NO: 19119 - DNA, 412 bp, Homo Sapiens
gcacgagggctgcctgtgccctctgcaactacaaggacttttatagtttttccccacgttggctcctttagctctgttagcacaactcatttaacacctcccactcattcccttgtattgctatatatcttgtttattcgtgtaatatttaatattaaaaattatttttataacctgagaagtaacatctgagcaggaaaaaaattataaccaaagtaatttctattgtaaaagatccaaacaatacaaaaatatacagagcaacatgtgggacattccccttactcttctctctcccatgcccaaacgtaaccatcctcagctatttgatgtgcatccttctagttccttttttaaatgtatgtgctgacacatgtttgtggaggggttaaaatataaatgggctcatatc

SEQ ID NO: 19120 - DNA, 654 bp, Homo Sapiens
gcacgagggtgaacagagttcttattgatagtcccatcacctccaaagcagtgggcccaccctccctcctaccagcccctccccagcacccagcccctcagtgcagcgccacctcgcaggggtggaggtgggcagcacgggcagcctcgtaggcacggcggaactcctggaatcgtggggcacagcccagccgggcctccccaaagcggctccagcccatgaagaggaaggtgcctgggcccgggtggacgccacagcgcagtggggtacgaatggaggtcagcccctggtccccggatcgccccgcctggaacagcggcggtgtctggcggaggacacgggcggccaccacagtgatgacagactcctgcagctccacgtcatgggtgaccccatggatgatcccgtgaattactgtggggaggcatgtggctgcggtaggcattcaggggaaggcaggctccaggctccccccatggcggggacactcaccgaagtcgctggtgcatgcggccaggagcagctcagcgtcgctgcagggcctgcaggcaccgtctacgccgagaccgtgggcctgcgggggcagctcggggcgcccgtcctcgcgcagctcaaagcggaaggcggccacgcggcggctgatgtcctggtgcg

SEQ ID NO: 19121 - DNA, 794 bp, Homo Sapiens
gcacgagggcagcatcatggaggtaagtttttgaccttgagaaaatgtttttgtttcactgtcctgaggactatttatagacagctctaacatgataaccctcactatgtggagaacattgacagagtaacattttagcagggaaagaagaatcctacagggtcatgttcccttctcctgtggagtggcatgaagaaggtgtatggccccaggtatggccatattactgaccctctacagagagggcaaaggaactgccagtatggtattgcaggataaaggcaggtggttacccacattacctgcaaggctttgatctttcttctgccatttccacattggacatctctgctgaggagagaaaatgaaccactcttttcctttgtataatgttgttttattcttcagacagaagagaggagttatacagctctgcagacatcccattcctgtatggggactgtgtttgcctcttagaggttcccaggccactagaggagataaagggaaacagattgttataacttgatataatgatactataatagatgtaactacaaggagctccagaagcaagagagagggaggaacttggacttctctgcatctttagttggagtccaaaggcttttcaatgaaattctactgcccagggtacattgatgctgaaaccccattcaaatctcctgttatattctagaacagggaattgatttgggagagcatcatgaaggtggatgatctgcccagtcacactgttagtaaattgtagagccaggacctgaactctatat

SEQ ID NO: 19122 - DNA, 692 bp, Homo Sapiens
  misc_feature (210)..(265): n is a, c, g, or t
gcacgaggcccctttgccttttaagttctgcatattattattgattgccaactaagattcttttcatgttatgtagctttttaacaccatgtagtaagaggaatagttaagaatcttagtaggcatcgagggactggcactaccggcctaacacctgggagctttttagtaatgtaaaaatgtgggtccccactcctctatcaatcactnnnnnnnnnnnnnnnnnnnnnnnnnnnnnnnnnnnnnnnnnnnnnnnnnnnnnnnntctgctttgtaaagctattattacagtaatgccaacaaagagcttgcattacttcaaccttaaagcctaatgtgccaccttctaaagatcctgatattgtcacaataggctagtcagcatagaactgttagaagaaagtacatactttgtgcatttttcactgatccaagaatgtttttagtcatttccttttcagtgtgtgaacagcctaacaattcactggagttgaaaagctttgttaaaacaaatttgaaatggcttaaaaaccatttagtggatggtatccactaaaactaggtatccactaaaactatgccttaaaagttaccttttaaaaaagacatgttcatcttcacaaggtcaattttcatgtattaaattgtgtatagtgctttaaagagctatattcctcaaaaataaactatat

SEQ ID NO: 19123 - DNA, 706 bp, Homo Sapiens
gcacgaggatttgctacaacatttactgaatggtggagtgaaaaaactgatgcctactgggaaatatctaccattttttaaagataatgttaattaggaaaagaacacttttaaggaatttatagcagtgatgaaatgaattcagttatatcagatacaccaaactgttgatggtatttaaatgtgacttcaagttagtatttctgtatatattattgattactggtttgtttttagatatgtaagtctgttctaatctacagttcacatatcgacagttactctggtaataatagaatgttagtgatgatcacttggtggatgttgattaagtgcctgtgttttgtttcctcctctggataccaaataggtgtatgctacttttttggtgaacttatttcttggaagatttggctatgctattcagggtttttattcttatgtttttcttctaaatttaagtagcatcctgctgctaccatattaaagctaaaatttaacttttgctgaagaatcagctaattcaggtaatccaaatatttgtggaaaaacatctggataatttattgaacacattagtattgtgttagctttgatcattcccatttcataggtttttattgtggaatagtcaacttaatatagattcactttcaatttgcatgtataaagtaatactcaataaaatttttttcatttatttttc

SEQ ID NO: 19124 - DNA, 947 bp, Homo Sapiens
  misc_feature (879)..(887): n is a, c, g, or t
gcacgagggttggtgccatcagtgatttacaaacaatattttgatattgcagatgacttgcttactgtatttgcattgttagaaaacagtttgtagacaatgattcttttttaataaaatcaaataattctaaaagtgctagagaatttaactaaaagctggttcccaaatgcatagctggcattttaatttaaattcaaatctacatagagaacatccgtgtaaatcatctaactggattttcccattggtcattcccaaacacacctatggtcctagaatccttaagagaagcaccctgtaaccttttatgtggtttgcctttaagaggcccaggtgcttctcctttatgatttgagttggcctcttcataaattagtgctgtttactttcagaggaagcagagaagttgctgttatgtttttgcatccgtttaccctatgcaaagttgctgtatgatgccaactaaactgctctttaggcagccttctgaggagaaaagcaaccctgtttcaaatccactgccaattcagctcctctggagtggagctttctgatttcttggagcaggaattttagagattgaaatgaatgatcatttagtcagatttatcctgtaatttcatgcagctttgtggcctttgcagtactatttataaaatggaccctgatggtgatgaactctttaaaacgcattactgttaagcctgtgttgagacattgatgctgtctatctcattttttagacagtttttgtagcttttctattgagagtcaggtatgtgagcatctctgaaagcagtgttgaatgtaatttttcggaaacatgcaatgtgtattttgacttttattttataaatacacagctccacattgccnnnnnnnnncctcatagtcctgttggaagatgctcactactttctctcctccctctcccggcctccccc

SEQ ID NO: 19125 - DNA, 915 bp, Homo Sapiens
gcacgagggttccttcccctgtgtggtagtattttgttggaagagaatgtttatacgaaaaatgaaattcttccaacagcagagaaactctaaaaagtttgatagtacctatcaaagtgctgtacttctgtgatagagaacatctgatgtaccaatttagatctatttctttatactttttctaaccaattgcttaatagtactttggatgattatcacctttgccacttaaaatatataaatatcctttttacttcatgaggaaggaggaattttttgataattactgagttcagccttttgtgatgacttatattttggacttacattttaactttaaagaatgtcagatcccttctttgtcttactagttaaatcctcacctaatctcttgggtatgaatataaatgtgtgtcatcgttatattgttcagctagatgagcaagtatcttagggtagtaggtagcctggtggttttagaagtgtttggtgatttttacggagagagttttcctaagtggtggtttataggtggtatcagatattattagggcagctttttggggagtaatctcaggtctcccagagcagcagcatttttctcattgatataagtaagattcttaggagcttttcttatcacacaagatgcctgaatcgaatgtgagaattgaaggcatttcttctgcataaacaaagaattctacctgctggacagaaacctggaaagttctttggaattcgctgaattacagtttagtatgtcctgattacagagtgacaatatttatcaagcctttgttatattggatatcttctctcttaaaatacaactgtattataattgaaatgacagcccaaattggatggtttaccaaaccaatgaaagggatttcacacatcaatttttatttc

SEQ ID NO: 19126 - DNA, 911 bp, Homo Sapiens
  misc_feature (830)..(840): n is a, c, g, or t
gcacgaggtgggactttggtgtgggatactgaggtgaagccagtggatctccagcttgtagctgcatcagcccctcctcctttctcaggtgcagcctttgtgaaggagaaccaccggcaactccgagccaggatgggggacctgaaaggggtgctcgatgatctccaagacaatgaggttcttactgagaatgagaaggagctggtggagcaggaaaagacacggcagagcaagaatgaggccttgctgagcatggtggagaagaaaggggacctggccctggacgtgctcttcagaagcattagtgaaagggacccttacctcgtgtcctatcttagacagcagaatttgtaaaatgagtcagttaggtagtctggaagagagaatccagcgttctcattggaaatggataaacagaaatgtgatcattgatttcagtgttcaagacagaagaagactgggtaacatctatcacacaggctttcaggacagacttgtaacctggcatgtacctattgactgtatcctcatgcattttcctcaagaatgtctgaagaaggtagtaatattccttttaaattttttccaaccattgcttgatatatcactattttatccattgacatgattcttgaagacccaggataaaggacatccggataggtgtgtttatgaaggatggggcctggaaaggcaacttttcctgattaatgtgaaaaataattcctatggacactccgtttgaagtatcaccttctcataactaaaagcagaaaagctaacaaaagcttctcagctgaggacactcaaggcatacatgatgacagtcnnnnnnnnnnngtatgttaggactttaacactttatctatggctactgttattagaacaatgtaaatgtatttgctgaaaga

SEQ ID NO: 19127 - DNA, 956 bp, Homo Sapiens
gcacgaggcaccatctttgaaccctgaatcaagcttttgggcatccttcctcggcctttcttgtcatctcttctttccctttgtagccgatctctaggcccttcttgcactgccacctcactttccaccactgtcagcctggaaagagatccaggtctggagctggagagaacaggccctgtgcaggaccagaagtaattatactaaagtatcaagaaagggagttagggcttaaactattctgtctagatgtcccagatagttcccattctacttggagatttggcttttccaagaaaagctagagcagagcagcccttctcccacaagccctcccacccccgtgcagccacatacctgtacagaatggtaactaagggtgctgtgcccaaccctgcgactagcaaggctcgcagcaagagcacagccctcaactacttgtgccagagtttctcttggaccactccaactcccactgagcccttttgctgctgggctggcaggaaactttccccactccctaaggggcatgtctgggttaggtgctaagtgctgaagagaacttggtcagttctctcaactttgctttgggcaagaatctggtcacctgatgggatccatggtacaggctactgctaaacttggcacagtatcaagtatagtacctccaaggaccagggctgggaagtctttagtgctaacatcccctttagagttcacacatcttgcccttccatgaatgacccctcagtctggcctccccagcctcaaggtccactcaggcacaagagccacagtaccctagatagtgtcacatgacaccgttgtcatccaaggataatacagaccaactaggctacatctgtgatgagcagctagcaaagccgctggtcttcttctaggactagtccagtgccttcacaatctcatggtctttcaagttccctggttacttt

SEQ ID NO: 19128 - DNA, 280 bp, Homo Sapiens
gcacgaggccagccaacccagccctctgcctcccgtcagcatcagcacacaggccccgggcaccagtgacctgccagccccagccgacctgactgtgtactcgtgtcctgtgtacatgggagggccccttggcaccgctaagctgcagagcaggaacatcgtgatgcatctgcctttacccaccaagctcacccccaacacctgtgtccaaaggagggtccatgtgtgcagcccacccctgtcttgagcccgtctaccaaaataaagttgtagtgattcc

SEQ ID NO: 19129 - DNA, 942 bp, Homo Sapiens
gcacgagggttgattggacattgaagacataagtgagttttcttttcacctgagttgttacttttgtgctgttattgagtttgattaattactagggataaaaggagaaaatggattattgttcacggttctgcacattcatttctaagaagcaataactgtcatgtggggagaagttaaagctattgagaggatagcaggcaaactacaaagatcttcatggaaaattagccatgtggaacacatcagaggcctctaaaaatcacccattaattcaggaaggccaaggagaaaggccttatagagacgttgatatgttggatgtgcctaggctttcagagccaccctttccacaacacccctccctgcaaagtatttatttcacatctgcactgtctggcacagatggtagatagtgctggtttgttcattttatttttttacttaaaaggctattttgagccctgtttctttcactgtccagtctagtcctctttgattatatcagtagttgctgagtaagaaagaagccagggtgaccaacgggcctttaaaagtgtgtctcctctacttatgctgaaagagaaggcaattaaataagactagtacctcccaggaggattggactgggatatttttaaccctttaaaaagaatagctgtttctatgttaaaataccaaagaacatggataaacccaacattccaaagtagtgagtccactaatgagaaaaataatagaatgactttggtcacctctcggagacttctgtgtctataagaatcccaggctggagacattcctagccctctgtattgattcaaaaatacttaataaattaaagctgttgagacttattttttcttctgtcactcagtaaccatgatccttcctcatttaataaacatttggtgactgaatgagtaataaatgctggttacc

SEQ ID NO: 19130 - DNA, 901 bp, Homo Sapiens
gcacgaggggaaaacgggcaagcaggcttttatgggagagcaagagaagttggatgtcagattcttctgtatcctcagaaaaaggaggccggcttcctactcccaagctgagagaacttggtggaatccagaggactcatcatgatctcactactccagctgttggtggtgctgttttagtgtctccatctaagatgaagcctccagccccagaacagaggaaaagaatgacctctcaggattgtttagaaacttcaaagaatgattttactaagaaagaaagtcgtgctgtatccctactgacttctccagctgctggtataaaaacagttgatcctctgcctttgcgggaagattctgaagacaatatccacaaatttgctgaggcaactcttccagtttcaaaaattccaaaatacccaacaaatccccctggacagttgccttctccaccacatgttccatcctactggcatccctctcgacgaattcagggctctcttagagatccagagtttcagcacaatgtgggaaaagcaaggatgaacaatttgcagttacctcaacatgaagcctttaatgatgaagatgaggacagattgtctgagatttctgctcgctctgcagcttctagtctccgggcttttcaaactctggcacgagctaagaaaaggaaggagaatttctggggtaaaacataaacctagctgagttgcctttatctaagaaacattggcataatttttctttattgcttactgtgttaaaattttttgagtgaagtttttcctaacgttttctactttgaaatatttaatttccaatagaacagtttacttggaaattgttaacataggcttatacaaatttaacttttaaagattctttttacatctatccc

SEQ ID NO: 19131 - DNA, 948 bp, Homo Sapiens
ggctttggtccacctgggaatgggaagacaatgctggctaaagcagtagctgcagaatcgaatgcaaccttctttaatataagtgctgcaagtttaacttcaaaatacgtgggagaaggagagaaattggtgagggctctttttgctgtggctcgagaacttcaaccttctataatttttatagatgaagttgatagccttttgtgtgaaagaagagaaggggagcacgatgctagtagacgcctaaaaactgaatttctaatagaatttgatggtgtacagtctgctggagatgacagagtacttgtaatgggtgcaactaataggccacaagagcttgatgaggctgttctcaggcgtttcatcaaacgggtatatgtgtctttaccaaatgaggagacaagactacttttgcttaaaaatctgttatgtaaacaaggaagtccattgacccaaaaagaactagcacaacttgctagaatgactgatggatactcaggaagtgacctaacagctttggcaaaagatgcagcactgggtcctatccgagaactaaaaccagaacaggtgaagaatatgtctgccagtgagatgagaaatattcgattatctgacttcactgaatccttgaaaaaaataaaacgcagcgtcagctctcaaactttagaagcgtacatacgttggaacaaggactttggagataccactgtttaaggaaatacctttgtaaacctgcagaacattttacttaaaagaggaaacacaagatcttcaatgaacgtcatcggctacagaaacagcctaagtttacaggactttttagagtcttacatatttgtgcaccaaacttgaagatgaccagaaaacagacttaaacaaatatacaatgcaaatgtaattttttgttgtttaaggccttgccttgatggtcacagttatcccaatgga

SEQ ID NO: 19132 - DNA, 913 bp, Homo Sapiens
cgcacgaggcaaagatggcggcggctgcgggtagctgcgcgcgggtggcggcctggggcggaaaactgcgacgggggctcgctgtcagccgacaggctgtgcggagtcccggccccttggcagcggcagtggccggcgcggccctggcaggagcaggagcggcctggcaccacagccgcgtcagtgttgcggcgcgggatggcagttttacagtctccgcacagaaaaatgttgaacatggaataatatatattgggaaaccgtctcttcgtaagcagcgcttcatgcagttttcttcactcgaacatgaaggagaatattatatgacaccacgagacttcctcttctcagtgatgtttgagcaaatggaacgtaaaacttcagtcaagaagctgacaaaaaaggacatcgaggatacactgtcagggatccaaacagctggctgtggatcaacttttttcagagaccttggcgataaagggctaatttcatataccgagtatcttttcttgcttacaatcctcactaaaccccattctggatttcatgttgcttttaaaatgctggatacagatggtaatgagatgattgaaaaaagggaattttttaagctgcagaagatcataagtaaacaagatgacttgatgacagtgaaaactaatgaaactggatatcaggaagcaatagtgaaagaacctgaaattaacacaactcttcagatgcgtttctttggaaaaagaggacaaagaaaacttcattataaagaatttcgaagatttatggaaaatttacaaacagagattcagaaatggaattccttcagttttctaaaggtttgagtttcatgagaaaagaagactttgcagagtggctactttttttcactaacactgaaaataaagatatttattgg

SEQ ID NO: 19133 - DNA, 736 bp, Homo Sapiens
gcacgaggcttaagacaacaaagtgatttctgtaagtttgagccctatgtggaaagcattgtggaatcttaacctttttgtacacactcttgtgggacgtatcatataaatgtcagcactaagtaatgtcttgtttgtggctgaatatttttcgtagatgtttttgaagttgacatgacttacgtgcatttaaatatatattgccatccttagtttgtaattaagatttggaatatggttgtggatttctgagcatgtgcagactggtctagctagttcaggaactggtgcatgtatttttcaaagataaagaaagtgtactgcgaaaatatgcaggaagattaattttgtggcagttttctaaaactgacaaccaggtgggaccaaagtttatgtgcctttagtcttaatttaccttgcattgtaatattcagttttaataaatcttcaaaatattttgtatttaggaatagatctgactttaataaaaacatggctcagaatctacaggtcaaattaatttgaacagttcttgtcaatccgaattgttgattctgtttaaatgaccaatactttttgaaattgatgtacttagtttcaagattcatagattctgttatctatgtagacagaatggtcatgtatattttctattagttgagtttttacatctttagaaatgtaaaattcagtatagtttgaaagcggcacaattaaaaattaattttctaacaaa

SEQ ID NO: 19134 - DNA, 875 bp, Homo Sapiens
ccccgggctgcaggaattcggcacgaggatcacgtacacatgtaatctggaaaatcatacctttgtcaattttaaacataacttttggcatttcccagatttatactatgaacattggggtaatacattttattttttcattgctatatgacagctaaggggcaaatgattcaagtatattttaaatcagaagtattcaaattatttttgtataatactgttcagtacttccaagaataagctctgacaacagccattgtttctgcttccactcatattctctacacattttaatacagaaatttttgagagggggttactttattgcttgtgggttagtatgtctcttacttcaattaaggttacttatttggtttgccttaagcattacttttttaactttgtgccatttggtctttactttttatggatgttttcaaagaaactattttatattcaatctagtttatttagtctactgtatttctatttcgtggaagccttttcccctcaaataatatattatatcatttttggacttatataaatgataattaaataaatttttttcttaatactgttggactttgtatatacaagttcaaataactttttcgaagatagtttcttatataaatgtaatttaatttttttactcttctatacagttctttagatgtaaaagaattagcacaatctctggcagttttataaaagctgttgaagctcttgtcctgcactgtctttaggtatcataggtatcagtttgctttgtgttaatgccacttcaagtcattatttggtttctgctatttttttacctgaggataaaaagaatgaatattaaatttgaatattaaataaatgttactttc

SEQ ID NO: 19135 - DNA, 571 bp, Homo Sapiens
cggttgaagatatgaaatatggctatttttaatggtgacaattatgacttttagtcactattaaattggggttacctatatcagtacaatttgtagttgtttccaggtttggctaataatcattccttaacctagaattcagatgatcctggaattaaggcaggtcagaggactgtaatgatagaattaaattagtgtcactaaaaactgtcccaaagtgctgcttcctaataggaattcattaacctaaaacaagatgttactattatatcgatagactatgaatgctatttctagaaaaagtctagtgccaaatttgtcttattaaataaaaacaatgtaggagcagcttttcttctagtttgatgtcatttaagaattactaacacagtggcagtgttagatgaagatgctgtctacaaggtagataatatactgtttgatactcaaaacatttttcattttgtttaaagtagaagttacataattctatattttaagtcttgggtaaaaaagtagttttacattttataaagtaaagatgtaaatgattcaggtttaaagctctatt

SEQ ID NO: 19136 - DNA, 861 bp, Homo Sapiens
gcacgagggtacatctccaggataattataacctgggaagcttcacattccaggcaaccctgctcatggatggacgaatcatctttggatacaaagaaattcctgtcttggtcacacagataagttcaaccaatcatccagtgaaagtcggactgtccgatgcatttgtcgttgtccacaggatccaacaaattcccaatgttcgaagaagaacaatttatgaataccaccgagtagagctacaaatgtcaaaaattaccaacatttcggctgtggagatgaccccattacccacatgcctccagtttaacagatgtggcccctgtgtatcttctcagattggcttcaactgcagttggtgtagtaaacttcaaagatgttccagtggatttgatcgtcatcggcaggactgggtggacagtggatgccctgaagagtcaaaagagaagatgtgtgagaatacagaaccagtggaaacttcttctcgaaccaccacaaccataggagcgacaaccacccagttcagggtcctaactaccaccagaagagcagtgacttctcagtttcccaccagcctccctacagaagatgataccaagatagcactacatctaaaagataatggagcttctacagatgacagtgcagctgagaaagaaaggggggaaccctccacgctggcctcatcgttggaatcctcatcctggtcctcattgtagccacagccattcttgtgacagtctatatgtatcaccacccaacatcagcagccagcatcttctttattgagagacgcccaagcagatggcctgcgatgaagtttaaaagaggctctggacatcctgcctatgctgaggttga

SEQ ID NO: 19137 - DNA, 757 bp, Homo Sapiens
gcacgaggcctgcgggcagaccggagaggaacctcaactcagtccatttcatagccctgataggggaagtgggagttgacaggatggtttaaaataagacgtgaaggtttcagttacctgctctagactttgcctgagaacttgtaaattaatcagtgagacctaatttgtgacatgtcagtagcatcatcttttgacacacaggaggtcatggtcatttcattcctactcttcaggagacactgctgaacagaggaatgattctgttccttgtgtgcttacttccttaacatttatacattgttttaagaaaaaacttttaaaaatatttcttatagtctcctaacatttgtctctagcctttgcctttgtacaatcacagatatcctatggagatttaaggatgaaagccctgagttgttcttgggttcttggatctggactacttgttatcttatgcttctcacttctggctaaaacttgcacctcttcttctcttagctaagccccaaaatgaagatttccttcagaagtcttgttagcagaattatttatcagtcacagagagaaaaatctgctatttttctaagtaagagtctcgagaagcagagtttttgtcttgtcattgagaggagtcagcagtcttgttctgtaaaggactagagatggtaaatactgtcccactcagctctgctggcgcagtacagcagcagcagcccccagcacagctgtgttcctgcggattcccctttacaaa

SEQ ID NO: 19138 - DNA, 866 bp, Homo Sapiens
gcacgaggaacagtattgccaggttcctaaaattgtctaaaaacatgatttggcttccatttttgcagctgcactgtaccatgcacctggtttctatatagtaacagtgtgcaattctaattattggactgtgccctgtttttagttttcaaatcaatttctaattctggtgattgtgtgatgtaaagaggtgctatgatggtcatgcaattaatactaaatattgaatcaatgcccagagctttattggattcactttgtgtgtgttagtgctctaaagtagcagtattattattaaactgtccccagagtaaccctgtaggcctaaagtactcagttttaagacaaacactacttcccatgcggggtactttccttatggtaaatgtaaacatgtagactgcattcgaggtgacctaaagtagagaggtcatgaactttgagaatgggcttcctttttggttcagtattagtgagagggagagggagatggatggtggggtaggttttctagtctatcattttacatttttcatggagtccctgcttagtgcagtttccattggaatgggtggaagatgataaagctctcttttttatctactaataatgtgattgcaacttaaaatagcaaaacccaactctccctgtccctccaatccctctcctaaaaaagttcagtttggaatctcattctggaaaagatggaatcgcatggagattctctagctgttaggtagacctaaataaaaagttctcaatagattcctctttttgagtaaatataagacctcttgtagctacaatgttttaaagcatgtttcatcttcatttttaatatcctgaactgaatgatagtgtttttt

SEQ ID NO: 19139 - DNA, 834 bp, Homo Sapiens
catgaattcggcacgaggctcagtgctcagagcggaggcagcggctgcggcagcagcagctggtgcctacatccttgtctccaccgtgctaaccctcatggtgccctggcacagcctggaccccgactcagcgcttgcagatgccttctaccagcggggctacaggtgggctggcttcatcgtggcagctggctccatctgcgccatgaacaccgtcctgctcagcctcctcttctccctgccacgcattgtctatgccatggccgccgatgggctcttcttccaggtgtttgcccatgtgcacccccggacacaggtgcctgtggcgggcaccctggcgttcgggctcctcacggccttcctggcactgctgctggacctggagtcgctggttcagttcctgtcccttggcacactcctggcctacacattcgtggccaccagtatcattgtgctgcgcttccagaagtcttccccgcccagctccccaggcccagccagccctggccccctgaccaagcagcagagctccttctcagaccacctacagctggtgggcactgtacacgcctccgtccctgagccaggggagctgaagccagccctgaggccctacctgggcttcttggatgggtacagccctggagcagtggtgacttgggcgcttggcgttatgttggcctcagccatcaccataggctgcgtgcttgtctttgggaactcgaccctgcacctcccacactggggttacatcctgctgctcctgctcaccagtgtcatgtttctgctcagccctcttttgtcctgggggctcacagcaacagtatcgggaaa

SEQ ID NO: 19140 - DNA, 1058 bp, Homo Sapiens
tagcagtgaagctgatgtggaagctgccacagatctgttcctttgtccgtttttgggatccacaggccctatgtatttgaagggaaatgtgtatggctcagatccttttgaaacatatcatacaggttgcagtcctgacccaagaacagttttaatggaccactatgagcccagttacataaagaaaaaggagtgctacccatgttctcatccttcagaagaatcctgcgaacggagcttcagtaatatatcgtggccttcacatgtgaggaagctacttaacactagttactctcacaatgaaggacctggaatgaaaaatctgtgtctaaacaagtcctctttagattttagtgcaaatccagagccagcgtcggttgcctcgagtaattctttcatgggtacctttggaaaagctctcaggagacctcacctagatgcctattcaagctttggacagccatcagattgtcagccaagagccttttatttgaaagctcattcttccccagacttggactctgggtcagaggaagatgggaaagaaaggacagattttcaggaagaaaatcacatttgtacctttaaacagactttagaaaactacaggactccaaattttcagtcttatgacttggacacatagactgaatgagaccaaaggaaaagcttaacatactacctcaagtgaacttttatttaaaagagagagaatcttatgttttttaaatggagttatgaattttaaaaggataaaaatgctttatttatacagatgaaccaaaattacaaaaagttatgaaaatttttatactgggaatgatgctcatataagaatacctttttaaactattttttaactttgttttatgcaaaaaagtatcttacgtaaataatgatataaatcatgattattttatgtatttttataatgccagatttctttttatggaaatgagttactaaagcattttaaataatacctgccttgtaccattttttaatagaagttacttcattatattttgcacattatatttataaaatgtgtcaatttg

SEQ ID NO: 19141 - DNA, 566 bp, Homo Sapiens
  misc_feature (360)..(368): n is a, c, g, or t
ctgagccaccgtgcccggccatgttgcttttataattgagatatttcatttgttttgggggttaggcaaatttaatttgccattcctcaaactcagtaacttcaaatataaacaatgcctaaaatgaatatggttcctcattatttctatcaaactactacaaatactgaagaatcccaaagtagttttccacagaggcagaaaagcagttcaggggttgaaaatcttcaatattaataagccctgggacattcaaatggcacttcatatttcaaggtaatgcaatatgaatcataattcattatatattgtccccaagagttacttcaattccgtattcaccagttcttacgatttggnnnnnnnnncttgaatgtttccagatgaaatctaatccccaagccttgtgtgtcaacattctagtgaatctctatttaaatgagaggcgctccaaaacacttcctgcaccactcgacactggcacttggtggagcatcaattttctgcaacctttcaagaatctctgaagacagactattgtatgcaattccatattcattgtcaaa

SEQ ID NO: 19142 - DNA, 561 bp, Homo Sapiens
gcacgaggataaaaaaatacagtacttgtcatgcaccagtttggccaatatatagacattatctgtagagcaattactacaattatagaaaatagaaggttacaggaattgtttttccaactaaaaaacctgaattaatattgttaacctaaataacaacctgcttattatgcaaaaacccttattctatatgtctgtgagagctagaaacttgtaagtatcattagtaaaaaaatcattataagaagctagttattggttaaaacaaacaagtcagtgttatctacaatcccttgcagtgtgaggggctttgcccagagtgggaacctcggtccatgacgaagggtgagcttggtgtctccttccctgcccctctctgttgactgatgccacttctccaaggtgtgtttgcagtgaaacgttccagtggaagatgcatgggtgaccacagaggttgggcagggcagggccttgccttctgcaaggtgtgcctgagggtcagttccctgagatgtgacaacagcgaggtgtaaagacacatggctcggctccgcctcgtgc

SEQ ID NO: 19143 - DNA, 1764 bp, Homo Sapiens
  misc_feature (1501)..(1501): n is a, c, g, or t
gcacgaggcttttaaaggagtctctccagtccatttttgcggcatcaaattcaaatctgacatgggctttgcccgattatttaattcacctttgaagcctttagcagatttggatccagtggttgttacattctggtaccgagcccctgaactacttcttggagcaaggcattataccaaagctattgatatttgggctatagggtgtatatttgcagaactactaacgtcagaaccaatatttcactgtcgacaagaggacatcaaaactagtaatccttatcaccatgaccagctggacagaatattcaatgtaatgggatttcctgcagataaagattgggaagatataaaaaagatgcctgaacattcaacattaatgaaagatttcagaagaaatacgtataccaactgcagccttatcaagtatatggaaaaacataaagttaaaccagatagtaaagcattccacttgcttcagaagctgcttaccatggacccaataaagcgaattacctcagaacaggctatgcaggacccctatttcttagaagacccacttcctacatcagacgtttttgccggttgtcaaatcccttacccaaaacgagaatttttaacggaagaagaacctgatgacaaaggagacaaaaagaaccagcagcagcagcagggcaataaccacactaatggaactggccacccagggaatcaagacagcagtcacacacagggacccccgttgaagaaagtgagagttgttcctcctaccactacctcaggtggacttatcatgacctcagactatcagcgttccaatccacatgctgcctatcccaaccctggaccaagcacatcacagccgcagagcagcatgggatactcagctacctcccagcagcctccacagtactcacatcagacacatcggtactgagctgcatcggaatcttgtccatgcactgttgcgaatgctgcagggctgactgtgcagctctctgcgggaacctggtatgggccatgagaatgtactgtacaaccacatcttcaaaatgtccagtagccaagttccaccacttttcacagattggggtagtggcttccaagttgtacctattttggagttagacttgaaaagaaagtgctagcacagtttgtgttgtggatttgctacttccatagtttacttgacatggttcagactgaccaatgcatttttttcagtgacagtctgtagcagttgaagctgtgaatgtgctaggggcaagcatttgtctttgtatgtggtgaattttttcagtgtaacaacattatctgaccaatagtacacacacagacacaaagtttaactggtacttgaaacatacagtatatgttaacgaaataaccaagactcgaaatgagattattttggtacacctttctttttagtgtcttatcagtgggctgattcattttctacattaatcagtgttttctgaccaagaatattgcttggatnttttttgaaagtacaaaaagccacatagtttttccagaaaggtttcaaaactcccaaagataacttccacttataagtttgtttttattttccatctatgacttgactgggtattaaagctgctatttgatagtaattaaatatgttgtctttgatataaaccctgtttggttcaccaaccaactaaatgatttgtcatagacagtgttttatttttcctgttggtgttgctggatttgtgagcatgctttaagatgaaaaaa

SEQ ID NO: 19144 - DNA, 862 bp, Homo Sapiens
  misc_feature (622)..(636): n is a, c, g, or t
gcacgaggattataatttttaaaaggactattgatgatagaagaataggggcaagacgacaaaagtacctttgaataaaacaatttaagaaattggtttaagatattggatgatagaagatatttaagatatctagatggggatattttccttacaagatgggtaccagtatagtaatatctgtatactaactagggctttgtattgtcaataattttttaataattttttaatgaggtatttaccactgaagaaatatgataatataaaaccatcaaattttataattgagatgatactctggaaaaacatgtcatttcattttcagaaaactcttaagctctcttcagtctctgtaatgtttctgattgcatgtttcttcatgaaaagtatgttgttgttttgatagtaataataataaatgtaggctcagctctttcccaggattttcatcaaaaagctttaagtgcctaaccctgcttgtctctgtacatagaagcctgcacagatccaacccttgctaggtatcatagtttaggcccatttaccttcccctgtactggcagttcagccgcttacatgcactcaccctgtttgtggctattttaaattcatattattnnnnnnnnnnnnnnncccacctatttgtggtgtccattcactatacgtaactatgtaactctttggagttgcatagcagcagccattttttcagggctgataggatatcattaagagtgtcttatgagacattagtggatatactcatagtaaccacatttatagttttaagagctagctcttgagcattagtcactactttcagcttgatgcatggtcacttctttactatttaaaatac

SEQ ID NO: 19145 - DNA, 1014 bp, Homo Sapiens
cgctctagactttaaaaagatcccccgggctgcaggccctgctaatagatcaaaaacagctatgtctaaatgtccaatatttccaatggccaggagtattagtacttctggccccttggataaggaagatactggaagacagaagctcatttctacaggcagcctgccagctactttacaaggagctacagattctttaggtttagaatggcaccttccaagtcccgatcctgtcactgttccgtatcttagtcctttagtggtatggaaagaacttgaaagcttattggaaaatgaaggtgatcatgcaataacagtagcagactttgtggaccatcatccaattgttttttggaacctggtatggtatttcagacgtcttgacttgcccagtaacttacctggattgattctttcttctgagcactgtaacaagtattcaaagattccccgccactgtatgtctgaagatagcaaatatgttttaatacaaatgttatgggacaatatgaagttacatcaggatccgggacagcccttgtacattctctggaatgcacacacccaaaaatatccaatggtccatttattgcaaaaaagtgataactcatttaaccaggaactgttgaaaagtatggtaaaaagcattaaaatgaatgatgtctatggaccaatgagtcagattttagagacactgaataagtgtccacattttaaaagacagaggagtttatacagagaaatactatttctctcacttgtggcactgggaaagaaaacattgatatagatgcctttgataaagagtacaagatggcatacgatcgtctcacacctagtcaagtcaagagtacacacaacctgtgaagaccaccaagtacaggggtgatggaatgtcgaaaaccttgggaacccttatctttaagatgtattgtatgtgtaacatccatgtatatttgtatagccctgttaaaataacacttttaaactctaaatattttttcttccattttt

SEQ ID NO: 19146 - DNA, 914 bp, Homo Sapiens
aagaaggtgctttatcacgagtatctgacgaaagcctcagtaaggttcaggaagcagagtccccagtatttaaagagctaccaggtgccaaggctaatgatgacagcaccatcccgctcacgggagcagcaggggagacactggggacctcggaaggcacttctgcgggcagccaccctcgggctgcatacggaagagcactgtccatgacccatggctctgtgaaatcgcccatctccaacggcaccttcggcttcgacggccacaccaggagcgacggtcatgtgtaccacaccgtgcacaaagactcggggctctacaaagatctgctgcacaaaatccacatcgacaggggccccgaggagaagccagcccaggaaagcaactaccggctgctgcgccgaaacaacagttacacctgctacaccgcagccatttgtgggctgccagtgcacgccacctttcgagctgcggactcatcggccccagaggacagtgagaagctggtgggcgacaccgtgtcctactccaagaagaggctgcgctacgacagctactcgagctactgtaacgcggtggcagaggcggagatcgaggcggaggagggcggcgtggagatgaagctggcgtcggagctggccgaccctgaccagccgcgagaggaccctgcagaggaggagaaggaggagaaggacgcacccgagttcacctcctgttccatttcctgcaggtcctcaccgcctgtttcgggtcctttgctcacggcggcaatgacgtgagtaatgccatcggtccctggtagccttgtggctgatttacaaacaaggcggggtaacgcaaggaagcagctacacccgtctggctgctgttttatggaggagttggaatctgcacaggcctctgggtctggggga

SEQ ID NO: 19147 - DNA, 628 bp, Homo Sapiens
cagcctgaaataatattttaccttttactttgtgctttttgtgttttactcaggaagtcctcccctacatctgttttcttctgtatttcttttcatatttaggtctttaatccacctggattttttgtttgggtttttgttgttctttagtcaaagatccaattcttttttctatttaaataaccatcattgactgactagtccatccttaccccacccctactgattatgatgtcactgctgtcacatattgtcatacgtggggggctgttactgggttctccagtctcctccctttatctgtttgtgtatccctgtgctggtgccacactgcctcgttcactgatgtttttaataagcctgcaccatttgtatgtcaattcttcctgctcttcttatccatcaaaaatcactttaacttttcttgttcctttactcttccatataaattgtttattcaaccatcaggttccaggaaaaagcctgttagtattttcattggacttacatggaatttgtagattttgaaaaaaacagatatttttatgagtcttcctattcataaaaatagtatgtctccatttacttatgtctttaagtgtatttcagtaaagctttctatcttttc

SEQ ID NO: 19148 - DNA, 932 bp, Homo Sapiens
gcacgagggcaaagcacatcaagattttaacaagagatggcttttttcacattgcagaaaatagaaaatttaaaagtttaatggaacttgtggagtactacaagcatcattctctcaaggaagggttcagaaccttagatacaactctgcagtttccatacaaggagccagaacattcagctggacagaggggtaatagagcaggcaacagcttgttaagtccaaaagtgctgggcattgccatcgctcggtatgacttctgtgcaagagatatgagagagttgtccttgttgaaaggagatgtggtgaagatttacacaaagatgagtgcaaatggctggtggagaggagaagtaaatggcagggtgggctggtttccatccacatatgtggaagaggatgaataaattcaaatcccgtgttgcaccctgcaccaaaaatttcagagaagggataaatagaagcctgcacagcatcgtgaattaactgaagtgtttaaaaagctgcatttctggctgttcaacatcctccctccttagcccctcctaagtcttaatgctgagatttctaaagatgctggtactgacagattaatggcttgcctagagctgtgcaagaaacagcctgccagtctgtcattgtcagggaccagggcaaaaccaagagctgttcttcccagaagagccctgcaaacacattggttcgtgcttccctttacttcttctggtcagataccatgaatgccagtcatcagtaaatcttaatacacttttgctttattctcacatgccattcaccagattatttgatgggtacaaagaagcaaagtgtaattttccttttcccagcatgacgaaaaattggagttctgccatttgagcagcttactggaaagatccagccttacttgtcttaaattgtccaacaggtga

SEQ ID NO: 19149 - DNA, 794 bp, Homo Sapiens
gcacgagggtgcttgccagcagtggctccgccggcaagctgacattgattccggcctgagtccttccattccaatggcttcgaattcaggtagacggagtgcaccacccttgaacctcactggcctccctggcacagagaagctgaatgaaaaagaaaaggagctctgtcagatggtgaggttggtccctggagcctatttagaatacaaatctgctctattgaacgaatgtaacaagcaaggaggcttaagactggcgcaggcaagagcactcatcaagatagatgtgaacaaaacccggaaaatctatgatttcctcatcagagaaggatacatcactaaaggctaaggctccaagagcttgggatcagaagtcagaagtttggaatgtggtgggtcaaaggacaatatgggtgggcattctggagagttgtttttcagctgaattctcatggtgaaaacaggggaaaggacaaaggaaaccttaagttgtattgtctactttcttctccatcctgctttaaaacactcctgttgttggtattatgctgcagagttgtgtgctacataagctattattaaatgtgagtgggcattcattcctaacacctcttgtaactaaaagaaccatagtacctcacatcacagtgctggtagaaatggaactaaaccacagtctgtactcccaggagtccagctcagatccttatattgcgaggtaagtttgctgattatctgtcttgccttcaaacactgcagacagatttaaaataaagagaaaggttttagagcat

SEQ ID NO: 19150 - DNA, 782 bp, Homo Sapiens
aaaaaaatcagtttattaatgtttaaaagttgataaagctatgtgcaaaatgatccacaaaagtcagaaacctattaaatactattctttttaaaaaaacaagacatctctcggtttaattgcactgaaaaccatactaaagagacagtaatatatttttattctttgtaatatttatacatatcttcaattactatctaatgaatagctggactgaaaagtttctggcgttccctaccagttaaagtaatgcttttaagggcacaagagggtggtattttcttaagaaatacacattcaatggtgttaacacgggttagaaaaatccaataaaatgacttctgctgaaacaaatacattcaaaaatcaagaaaagtacttttaacacaacaaaatacaaccatgttgttgcttgaaatgaatcacacaacattctgaaataaacatcaacaaaagtgccaaagacagatgtcatatttgttagactcatttgctaagaaatctcccttggtttgcaaaagttaatccattcggttttcactttgttttgcttgtctgtttctcctaggacaccaaggatcctggctaatatcatttagataaagtgggcttccttatgcagatttcggcttcaatggatatgaaatggtaacacatttcattgaaaagatgttttttaaagaaatcaaagtgacttcaaccaaattccaaaaaacggatcccgcttacatggaaactttggcctcagcgaaaggacattgttttacacctccaaaaccatc

SEQ ID NO: 19151 - DNA, 1052 bp, Homo Sapiens
  misc_feature (911)..(930): n is a, c, g, or t
caaatggaaagcctgtcgggacttctgggctcagaaccagctggctcacgcactccacttgtcagctggacttctgccttgtgaaatggaagcagcctttgttcctttctggctgagcaagctcctgaggctgggagagactaggaaggcttggtaggaggggaaaaaagtcaggaaaagatatcaaatcagaaacatggaagaagaagggaaccgatttgagttggtgggcaaaactctaaaaatctaaatctgatgcttatgtaagggttgagcgaattagggagattgctagtggaaattggagggaatttgttttgcatcatttgtctaggatctatgcaaatatagctccactaaaggaccatagggaagagccagccttgccttttcttatatgattttgtttacaaaattttactgggacttttaaatctagctatagagttgggaaaaaatatttccacttagatattttacatggttttgtttaaaattaccattacttgttttttaaaaacacatgaccacatatgtatatgtatatctacctaaacattgtatcatggtttcagtatgttattcatgtattactgggagatgctaccaagaaaccaacccaaagaaaattctgaaaaatacatttctatttatagaataaatgtttcatttatataaaagcaaaagaacttagagttctaataaatgggatgtctaataaattatgaagttactgatttgaatatattatatttttataacttccttgccaaagtcctgatttagtacattagagaacctgtgtttcctctctcctctaccattcatctctcttccatacagtcatttgggctttttactcaagagaatcagaaataataagatataacaagcttggcaaagtgttggcnnnnnnnnnnnnnnnnnnnnaatctctagcagtttggtaatttagagcatcatttatttgggatcctttatctgatttcacagtgaaaacatccctatgataaagctaatgacccatttcacaaaagatggaatttgccctt

SEQ ID NO: 19152 - DNA, 762 bp, Homo Sapiens
gcacgaggcaacgtacccaggacaaagaacaaccctgactggccttgacgttcaggacatgctgcccaggaacctccagcactactacacctaccatggctcactcaccacgcctccctgcactgagaacgtccactggtttgtgctggcagattttgtcaagctctccaggacacaggtttggaagctggagaattccttactggatcaccgcaacaagaccatccacaacgattaccgcaggacccagcccctgaaccacagagtggtggaatccaacttcccgaatcaggaatacactctaggctctgaattccagttttacctacataagattgaggaaattcttgactacttaagaagagcattgaactgaggaaagctaagaggaagattcaatattaactagcttgaagcctgacctagccagagagtgcctgtccgctgcagccgcaccctaccttgtctaagaaaccatgtgtgtctggaacacgctgctccccctggggcagctgttgggattctgattaaaagaggggaaacgatcatcctggacaggaagtgagatggcttcagttcatgagacgggatctgagttagacatcaccagtggaaattgattggaatagaaacttaaaggaaatggaaccctaactattctcccatcaaatcatatatgttgacctgtctgaattataaaccagcctgacctttcctttagcattagatgtaataaaataactttggaaatttgcctcgtgc

SEQ ID NO: 19153 - DNA, 889 bp, Homo Sapiens
gcacgagggtttggacggctgcttcccaccagcaaagaccacgactggagagccgagccggaggcagctgggaaacatgaagagcgtcttgctgctgaccacgctcctcgtgcctgcacacctggtggccgcctggagcaataattatgcggtggactgccctcaacactgtgacagcagtgagtgcaaaagcagcccgcgctgcaagaggacagtgctcgacgactgtggctgctgccgagtgtgcgctgcagggcggggagaaacttgctaccgcacagtctcaggcatggatggcatgaagtgtggcccggggctgaggtgtcagccttctaatggggaggatccttttggtgaagagtttggtatctgcaaagactgtccctacggcaccttcgggatggattgcagagagacctgcaactgccagtcaggcatctgtgacagggggacgggaaaatgcctgaaattccccttcttccaatattcagtaaccaagtcttccaacagatttgtttctctcacggagcatgacatggcatctggagatggcaatattgtgagagaagaagttgtgaaagagaatgctgccgggtctcccgtaatgaggaaatggttaaatccacgctgatcccggctgtgatttctgagagaaggctctattttcgtgattgttcaacacacagccaacattttaggaactttctagattatagcataaggacatgtaatttttgaagaccaaatgtgatgcatggtggatccagaaaacaaaaagtaggatacttaccatccataacatccatatgactgaacacttgtatgtgtttgttaaatattcgaatgcatgtagatttgttaaatgtgtgtgtatagtaacactgaagaa

SEQ ID NO: 19154 - DNA, 1224 bp, Homo Sapiens
cccccgggctgcaggaattcggcacgagggaattttataatcgttacatcaccaagggaaatctttttgagccagttataaatgcacttctggataatggaactcggtataatctgttgaattcagctgttattgagttgtttgaatttataagagtggaagatatcaagtctcttactgcccatatagttgaaaacttttataaagcacttgaatcgattgaatatgttcagacattcaaaggattgaagactaaatatgagcaagaaaaagacagacaaaatcagaaactgaacagtgtaccatctatattgcgtagtaacagatttcgcagagatgcaaaagccttggaagaggatgaagaaatgtggtttaatgaagatgaagaagaggaaggaaaagcagttgtggcaccagtggaaaaacctaagccagaagatgattttccagataattatgaaaagtttatggagactaaaaaagcaaaagaaagtgaagacaaggaaaaccttcccaaaaggacatctcctggtggcttcaaatttactttctcccactctgccagtgctgctaatggaacaaacagtaaatctgtagtggctcagataccaccagcaacttctaatggatcctcttccaaaaccacaaacttgcctacgtcagtaacagccaccaagggaagtttggttggcttagtggattatccagatgatgaagaggaagatgaagaagaagaatcgtcccccaggaaaagacctcgtcttggctcataaaatatttattaggggaccctcaacatgtggtcttacaatgctgcaactgttcagtgagctgaaaatctgaatcagaaagctttctcaattgaacttataaaatatacaaggagtagcaaaagacagtatatcagctaagagagtttagttctaataaaaatcaggcttcccaggaacttgattgcttgctagtaattaaggggtttgccttttaggctgtcaaaacaaacattagtaaccagaacctgggagatagcttctcagcaaggaaaagtcacaggtttggggacggtttaggggaggggaaaagttgatataataatgcagggttgctcctcgggtgtcgatctagaaacattttacagaacttcagttgtaactcataacattacttgtataatggggctggcctgttgtgttttatcagttgcctcttttaaaagaaattttt

SEQ ID NO: 19155 - DNA, 376 bp, Homo Sapiens
gcacgagggtatagtgttccattgtatgagttctactgtttatatgctattgatcgacctgtaggggttttgcagtgtttctgtattacagctgtgctgcagtgagcatcccatcacattgtgtggatttgaggaagtattggaattcccccaattgactggacattcccaattaccctccaagtatgtgtctgtttatccttccatccgcaatctgagagttccccaacccaataatacttggtgtcatcagacttttcatcttgtctgattggatgggtgtcatttcctttaggttttataattatcttttcatatgtgtattggctgtacaaggttccttctctgttcattattattaatttttttagacaga

SEQ ID NO: 19156 - DNA, 1401 bp, Homo Sapiens
  misc_feature (413)..(429): n is a, c, g, or t
  misc_feature (757)..(767): n is a, c, g, or t
gcacgaggggggcatgagcgccttcacccgggtgaacctcagtcctaaccgcaaccagagtgccaaagtgatccgtgcagacccacaagggtgccggcggaggcatagctccgagactttctcctcaacacccagtgccacccgggtgggcaacacagtgccctttggagcgggggcagcagtagggggcggtggcggtagcagcagcagcagcgaggatgtgaaacgccacagctctgcttcctttgagaatgtgtggctgaggcctggggagcttgggggagcccccaaggagccagccaaactgtgtggggctgctgggggtttggagaatggtcttaactacatagacctggatttggtcaaggacttcaaacagtgccctcaggagtgcacccctgaaccgcagcctnnnnnnnnnnnnnnnnntcatcaacccctgggcagcggtgagagcagctccacccgccgctcaagtgaggatttaagcgcctatgccagcatcagtttccagaagcagccagaggaccgtcagtagctcaactggacatcacagcagaatgaagacctaaatgacctcagcaaatcctcttctaactcatgggtacccagactctaaatatttcatgattcacaactaggacctcatatcttcctcatcagtagatggtacgatgcatccatttcagtttgtttactttatccaatcctcaggatttcattgactgaactgcacgttctatattgtgccaagcgnnnnnnnnnnntgcactgtgacaccagaataatgagtctgcataaacttcatcttcaaccttaaggacttagctggccacagtgagctgatgtgcccaccaccgtgtcatgagagaatgggtttactctcaatgcattttcaagatacatttcatctgctgctgaaactgtgtacgacaaagcatcattgtaaattatttcatacaaaactgttcacgttgggtggagagagtattaaatatttaacataggttttgatttatatgtgtaattttttaaatgaaaatgtaacttttcttacagcacatcttttttttggatgtgggatggaggtatacaatgttctgttgtaaagagtggagcaaatgcttaaaacaaggcttaaaagagtagaatagggtatgatccttgttttaagattgtaattcagaaaacataatataagaatcatagtgccatagatggttctcaattgtatagttatatttgctgatactatctcttgtcatataaacctgatgttgagctgagttccttataagattaatcttaattttgtattttttcctgtaagacaatagggccatgttaataaactgaagaaggatatatttggctgggtgttttcaaatgtcagcttaaaat

SEQ ID NO: 19157 - DNA, 922 bp, Homo Sapiens
gcacgaggctcaagcaggacttgcaggcccaggacctgctggatacagtacagccagaccgacgattcctcctcgtgctggagttatcagtgccccacagagccacgcgcgggcatctgctggaagactgactcctgaaagccaaagcaaaacatcagaaacgtcgaaaggttcaactttccttcctgaaccactgaagcctcaggctgcttttcctccgcagtcttctttgcccccgcctgctcaaaggttgcaagagcctcttgtccctgtggcagcacctatgcctcagtctggcccccagccaaatttggaaaccccaccacaaccaccacctcgaagcaggtcatcccatagcttgccttcagaagcttcctcacaaccgcaagtaaaaacaaatggaatctctgatggcaaaagagaatcaccattaaagattgacccatttgaagatctgtcatttaatctgcttgctgtatcaaaggctcagctatctgttcaaacgtcacctgttcccaccccagacccaaagaggttgattcagttgccttctgcaacgcaaagtaatgttaatactttgagttctgtaagttgcatgccaacaatgcctccaattccagctcggagtcaatcccaggaaaatatgcgaagttctccaaacccatttattactggcttgaccaggacaaatcctttcagtgacaggactgctgctcctggaaacccatttagagccaagtctgaagaatcagaggcaacttcatggttctccaaagaagagcccgttactatcagtcctttcccttctctgcagcctcttggtcataacaaaagcagggcttcatcttcacttgatggctttaaggacagtttgatctacagggccagtctacattaaaaattagcaacccgaaaggatggg

SEQ ID NO: 19158 - DNA, 847 bp, Homo Sapiens
gcacgaggcatgttgattttgtcttagtctagaaatctctagtttagaaaggatgtttaggggaacatgaggctggctctgcagcaacaaccaggctcccctgcatccctgggcccagggagtttactcagagctctctgaagatgtggcaacccatgcccccttttctgaggaggtgcatggcctgagcattgtttgtctggcccagaggagagagcttgggttcccatagtcctgggagagtgtctgcagggcggcggagggcagagcagggcaggggagggcacagcaggccctgcgaagggcagagcggggcaggggagggcagagcaggccctgcggagagctcactctggtcgactcttcctctcagagaatgttgctctggaggctgctctgcatgaaaaccctaatggtttcttgtttgtttttcaaattatttagaaataagttctccggatgggctgttgtgataccacttaaaatctctagagaactactgaacacctaaagattttctgtagcgtagatatttccccagaggcacgcgaactgtcagtctttcctaaggcccccgggagacgcaggcaatggggcctcgcaggccaggcttgcaccagcatgtcttgagttagaggacttaaaattatccagtttcttctgtgtttctacttgaattgtggaaaagctctattatccaattaacttctccataattattgttgtaatattattattgtttgtaaaacatggttcacataactagcttgtggaaaccagcaaggtaaaatgaattcttaagttgacgcttttggtttctgttgtaaagcaaagatgaataaaaatt

SEQ ID NO: 19159 - DNA, 721 bp, Homo Sapiens
gcacgagggagaattaaacttgactgacttttctgccataaagttatttgaatttgggaacatcaactgcttatctcgtctacattttctccactgaaaactgatcagactcagcccactacccatctgggaaaacactcccaagatcaagttgctctatagttttagtcttttcaaagttattttttacttgaattttgccctatagacaaacatacgaagggtagttttgaaaattgatgccatctattatattattgtttaatgattcctaattttccgattggaagtaattgacttcatatctcgatttctaatctggttctaattgacttattccatcaatcatctagtcactaatacaatttttggagtgttgacaaaaccctttcagcgatcaaataaatcttgattgatatcttgagtgataagatttcctaccctttgttgagttagaaggggagaccaatcctttgttgtcagcaacttgatcagaactgggaatgtcatctaccagtgctagattttggcttgtttatttttgtatattttgcatacgtgcttagctactgtttgttagaatttgctatccgacattacttgacctccactttccagtgccattccttccctcaatttttttaaatcggttttcctgcttgttctatgacctaagaaaatttttttacatcagtaagccttataatcatcatctgtaaaa

SEQ ID NO: 19160 - DNA, 1122 bp, Homo Sapiens
  misc_feature (315)..(331): n is a, c, g, or t
  misc_feature (1036)..(1058): n is a, c, g, or t
gcacgaggattttgaggaaagactctctagatatattttctaatgttcagtacaataaatataaggaagctaaaacaccaatgtggaattcctgtttccagataacatgtatattcttctatagagtgacaggatcaattgcataagcgcaaagccttaaattgctggtttagagaagacccttttttcattcagattctttgttcgtagagcagttatttgaaaaacagttatggaacacaaaacattttatagatttaatatcataacattgcaaatttttcttgtattattgttcacaccactggttatacnnnnnnnnnnnnnnnnnattgattgggcctgaatacaggctttctagagatctttttcattaatacttttaaatacctttcaggtagttacatcatgtttcttcattggatttgtaaaacttgaagccataaaaatattagtttggtgtgtattggggaaaatagctaaaagtctaatttttacccatttagactttgttatttccttgtataaagtgacaaatcggggctcttgtatcagtgccagctgtaatgtttttaaatgcagtggctgccttctattgtcttcctatttttgataatgcagattgttgggaaatctgtaaggaagtaactgattccaggcaaattgttttcttccttctacccaccccaacccctacccatcaccttttaagaacatagtacgccagtgtaacgtgggaaccattgagattgtatttgccctgagtattaaagctagcttagcaaaatacttttaaaaacatattggtaaatgatacccataaaattaaattagttatattttattttaaaatgcaaatacattgatatttattaatcattggatttagggaaagggacagatttttggtgaacctgacttgtggcagatggtaaggaatattataaaacatttggatgagaacaatcagggcgaactgcatttttctgttacactggtaatcatttgaaaattgatttacctcagtgtttacagnnnnnnnnnnnnnnnnnnnnnnnaaataataactaatttgtcgagcactgatagagatgcagattttggtggggggaggtggtgggg

SEQ ID NO: 19161 - DNA, 950 bp, Homo Sapiens
gcacgaggctccacgctaccttctgcactgtgcccttagagcacagcttcctcagttgttctctgcatctcctggggcttaggccagtcttagcctgggttaaggctgctgacattgtgttccaatcagttgtcatgggcattatcccctctacatccacattaaacatgccggcttctcttgggcatcggcagagctgtgcctttttctttcagttacagttacataatcactgacgtccatgacacttacccatggatccatgtgctgacttcatttagaaggccaatctaaaacaactgggtttgtggctacctctttaaagttgtttgtgaaggataatttgttttttaatgcactttagtttgaaagtgagtctcttatgtaaggaccatccttaaaagaccaaaaatgccttgttagagtgttaaggagttttgacatgcagtggttccacaaacacagtggcttactatccttatacactgtcttataccatcattctctccatctctcttggtcactactctctgctgtcactggttaatcactaggtgccaagagcttactgaataaaagcttggcaattataataaatggggagggaaggaccttatgaatagtccatttagcctaagaaatggcagatttagttcttctcttccaaaagataaaggtatatcctggaattgtacttaaaacttacagatgactaacaaatatatactttatatgtagttaatatttagatctgtcttatttaatacttggaggctagaagaagcatctttaggggaactatataatcttttgttacattttctctgcatttaaaaaatcatttcaattcaaacatttatcagtgtcttgaaatccggaatgactctttaacaattcagggttggaactctgcattaaatgctctttattttttaatatttaaaattagt

SEQ ID NO: 19162 - DNA, 626 bp, Homo Sapiens
gcacgaggcgaacgtctagtacaattcttacttatgtgtatgggatttttccctttgaggttgctttgttttgtcttacaaaggtgaaaattgtttgtaagtgaagtgagaagttcatatttctttggcttttttgtgtttttaaaagttactccttttagggagctggtctgatgacttgcttagcttggaaatccttgttttcagtgtgtcgagtcaaaatgtgtttatgtgagctgtcactgtggggaaccaattgctttgtcatatagctggttatgaactagtaacatgtttgggaagtcctactgatgttcctttggaagaaaaaatctgctggttttaacaactgtgcttttgctatgtatggtatccaagttagttgaaatgcagacactgagatctgtttgagtttagggtcatttttagaaaggggcagtttaaagcacaatgtctcacatgggacaaagttccaaaatgccaaattcttattttttaaaaagctagttctataaaatactggtattatgggtggggaggaaatagaattgagtcaattggaaagactatccaacttaacatgaaacttgtcaccatgagatagcattagctgcccaggatgctgc

SEQ ID NO: 19163 - DNA, 884 bp, Homo Sapiens
gcacgagggcgccgtggcctcctatgactacctggtgatcgggggcggctcgggcgggctggccagcgcgcgcagggcggccgagctgggtgccagggccgccgtggtggagagccacaagctgggtggcacttgcgtgaatgttggatgtgtacccaaaaaggtaatgtggaacacagctgtccactctgaattcatgcatgatcatgctgattatggctttccaagttgtgagggtaaattcaattggcgtgttattaaggaaaagcgggatgcctatgtgagccgcctgaatgccatctatcaaaacaatctcaccaagtcccatatagaaatcatccgtggccatgcagccttcacgagtgatcccaagcccacaatagaggtcagtgggaaaaagtacaccgccccacacatcctgatcgccacaggtggtatgccctccacccctcatgagagccagatccccggtgccagcttaggaataaccagcgatggattttttcagctggaagaattgcccggccgcagcgtcattgttggtgcaggttacattgctgtggagatggcagggatcctgtcagccctgggttctaagacatcactgatgatacggcatgataaggtacttagaagttttgattcaatgatcagcaccaactgcacggaggagctggagaacgctggcgtggaggtgctgaagttctcccaggtcaaggaggttaaaaagactttgtcgggcttggaagtcagcatggttactgcagttcccggtaggctaccagtcatgaccatgattccagatgttgactgcctgctctggggccattggcgggtcccgaataccaggacctgagtttaacaaactggggattcaaaccgat

SEQ ID NO: 19164 - DNA, 2475 bp, Homo Sapiens
gcacgaggcacaggcccaatgttgcaggctaaaatggatgagattggcaaccactacacggagatggtaaaaaacttgagaatggagaaagatagagagatctgcagactgaggtcccaattaaaccagtaccataaagatgtttcaaagagagaaggaagttgtagtgacttccaatttaagcttcatgaactgacaagcttgctggaagagaaggattccctcataaagcgtcagtcagaggaactctccaagttgcggcaagaaatatattcctctcataaccaaccctccactggtggaaggactactattaccactaaaaagtacaggacacaatatccaatcctaggcctcctatatgatgactacgaatatataccaccaggtagtgaaacacagactattgtgattgagaaaacagaagacaaatacacttgtccatgaatggatccactttaaagtattacaactcaaagccgttttttttgtgtgtgtgtgtctctgcattagtactttgttatttttccatcactaaaggccaatcagaatttggaaccatgctgctacccaagaaatctaatggaatgaattagttctgtagatgacaatttcttcacccatttatgagacctaaatcttttccataacactcatgtattcagtataacaacatactaactgaaagagggacctgattgtttaaagtttgattgcagacactgtagaacataactcattatgtttcagataaggtaactcctagatatcaaactaatttgttggggtagagattttacaagtcatgccattagaagattttctctgatattatatgtgcagttcagttacaagatgaaatcatgtttttttaacaaaagagataaaatacaattgaagcaaaaaataacagctagtatataatatatacagtctgtatttgcttttcacagtaggcctgatgactaaaagatatgctttattacacgctattttcacctcttgaaagtcaaaggtgatgattaatttcatttagcagggaagtggaataatatcttttgaaataactaagtccactaaattatacagtatgctattctggttctaagtacatattagtcccttggcaaatctgttctttcaaagcataccttccccaaatgagcctacctacttcttaaaaaacatataacacaatgtggtagtagtaggtgtaaggaaggtaagttttttcatagtggtatgcaaacatatcattgaaatattacatagatataaagacttagggaataaaaatagcagcaacaaatacttgatagatttatcctacttgggagaaatattttgtagcagagtatttagtatacttagaagttgatttagcaattaggctttaatgaccttacaaagtgaacataactgaacacaagtattttttcaatgcaagatgaggatgaaaattttacatttcaacccatctggctaaagttaagacttagcaaaaattaaaatgttgcctttgtccaagtatagattaaggcaacaaacatatttgggtgtgtaatttgaagttttggactgaaatatctttgcaagtatccacataaaattctgtaatgccttataattatattctaataattatgcattatactaagacaccattaagaacagttgaggcactacactaaatcaaaccataaatgaggaaaaaacttttaatgttcttttctagaagtgttcaaataggtcttgatatgaagctaaaagccttatttatattatcttaatatttcggctaaaatgttaagctccataacatgaattgatacaattccaattttatcaatattttgtgatagaaaaatgttaatattattcatgagctatacagtccttacattttttcccttggtgtaggaacaacggaggagtttctcctctgctaactattcatatatgtaactgtaacaaaagtgtactatgttatgcacacattacaaataatataaggggaagttttattagcttagtaggaaattgttattattaaggtttaaaaatgagaacaggtgtgagttttccaaaatacttaaaaataatagtgtcaaaaattcaggggcagttaaggagtcatggatggaactagaggtcactatattaagtgacataagccagaaacagacaaacattgcatgttctcaattatttgcgggatctaaaagtcaaaacaattgaactcatggatatagagagtagaaggatggttactagtggctgggaaaaggggtgtgcgaggggaactggggatgcttaatgtgtacaaaaactatgtagttagaaagtataaataagacctagtatttgatagcacaaccgggtgagtatagtcaataatagcttaattgtacaaataactaagagtataattggattgtttgtaacacaaataaatacttgagtggatcctcgtgc

SEQ ID NO: 19165 - DNA, 96 bp, Homo Sapiens
caccttaggtcaattgcctttcattttatttatcaaactgtatttactgtaaatagacattgcagttctcatgtgccctatggatttgtactttct

SEQ ID NO: 19166 - DNA, 932 bp, Homo Sapiens
  misc_feature (377)..(396): n is a, c, g, or t
gcacgaggatcagcacatcttctggtttacaagttgggtaacaatgaaagctggagatgctaaatggaaatccagcattgcatacccttagacctgatcacataccagtaaaagccttaatttagatgttagttgtatgtgttggacagatccttgcaaaagtgtgtctgtctattagttgtaaatttgaaaattataaatctctgaatctgctactatccaagtttcatcccttttgaagatgaggcatgagcctattaaaatatttataatcatttttcgtcccctactgcaagacttttagattcttacaaatgattactacaggaatagtggccacttaatgtcagttactccggtggaagaatttatctagnnnnnnnnnnnnnnnnnnnnggaaggatggtgtgaaaaatagcaagattagagaatgagttgtatagttttttctatcacatttcatctaaaatgatttgaaggacttttgaagatttttaccaacatccttaaatcaactccaggttggatgaacaactgatttaaaacaaactaagagaacattaactagatgtgggctttttaaaatatataggtattgcatttcctaccttgttatttattccactttgaatactttagagggcttaactttcaactctttaaggtagtaatggatagttttatacttgttctcacaaaattgttatggtcagtttatatcattgctccatgcattgattataaaaattcagtattaattttttctgatcttataagctttataggagttttcttttctcttataaagtgtttcaccttatgtaaaacaaatgcctgcttgcatattggaagatgttgaaattagttttagacaaaagtggtccatcaattcagacactctgcttggatgccttacccttttcattagtgca

SEQ ID NO: 19167 - DNA, 1126 bp, Homo Sapiens
  misc_feature (639)..(647): n is a, c, g, or t
gcccgccaaaaggctttaacccatgaacaaatgttggatcctgacattttgtttaagagtgatttgttcaataattgaactgagttaacattcttggtaaaccaggtaattgaatgaagaaaggtcactaaagggagaaatgacatgttttctattttcttttcatgaaaacactgtttttccccctaataaagcatattttactttggtgcttatttttcctccttgcagtctaataaaaaaatctggacaatcaaaccttaaaatagctacactctgccctctgtaatgtagcattcataaaaatttggaagtatttacatcctctttcaagatgagcttatatgacacaattattatttgctgatacatgaaaatactgcactttaagtttctcaagactctgaaatatgtaaaattcaatatttttatattcccagaaattgtttcttacaggttgaaagtcttttaagggcatcacaaattaacatttactcctaatgcacgcctagaatgtattttaatacttactaagaagaatgaaaattctttggttgttttatatataaataaggcatatataatgacactgtgttctgtgagggagcaggccctgtgagaatcaattcaggacagtannnnnnnnngtcctttctccatccttgatcagagataaactattaaaactttaaaaaatactcaaaaatatgtaagttttttggttgaacctttagatttgctcatgatgtttaacataacaacatttatttcaaatcactgaattcatggagatgtggacacgcttggtttgctctatttttgtttatgtgtgatagtggttctgtcatcatcattcatgttttttaaggcctggtcataaaacttttaaattttactagtgttacttaatgtatattctaaaaagagaatgcagtaactaaatgccctaaatgttttgatctctgtttgtcattactttttcaaaattatttttttctgtaaagataatatataaaaacttcctgcttaaattgaatttctatattagtgggtaattgcagtttattaaagggatcattatcagtaatttcataacaactggttctagtgttttgtggttttttaa

SEQ ID NO: 19168 - DNA, 886 bp, Homo Sapiens
atcccccgggctgcaggaattcggcacgaggcataaatgttttaatgaatgaaagtcctgatccagaacccgactgtgatatcttagctgtgaaaactgctcagaagctgtgggcagaccgaatttctctggctggcagcaatattttcacaataggagtacaggactttgtgccatttgtgcagtgcaaagccaagtttcatgccccaagttttcatgttgatgttcctgttcagtttgatatttatctgaaggctgattgtccacatcccattaggttttccaagctctgtgtcagctttaataatcaggaatacaaccagttctgtgtaatagaagaagcatccaaagcaaatgaagttttagaaaatctgactcaaggaaagatgtgcctagttcctggcaaaacaagaaaactgttatttaagtttgttgcaaaaactgaagatgtgggaaagaaaattgagattacttcagtggatcttgctctgggcaatgagacgggaagatgtgtggttttaaattggcagggaggaggaggagatgctgcttcctcccaagaagccttacaggcagctcggtctttcaaaaggcgacctaagctacctgacaatgaagttcactgggacagcattataattcaggcaagcacaatgatcatatccagagtcccaaacatttctgtacatctgctacatgaaccccctgcactgactaatgaaatgtattgtttggttgtgactgttcagtcccatgaaaagacccaaatcagagatgtgaagctcaccgctggcttaaaaccaggacaggatgccaattttactcagaaactcacgtgactcttcatggaacagaactgtgtgatgaatcctaccgggctttactc

SEQ ID NO: 19169 - DNA, 820 bp, Homo Sapiens
gcacgaggcaaagctatcgcaacttcacttttaagaaaaaattagctattttaaaattttggatcattttctgcaatataattttcaataattgtacaatatcttcttttgagaaatattcatctcttaaacagcattgattctaggattttggaggtaccattattacaaaacaattaaatggaagaatctaaagtgtataaaatcattttcagtatagtttaggtaaggtaatcagctagtcagagatctgtgctgtgtcaacaaaccttgtctaaatttctttgcatttctcttttcttttgcttcagaggagtcccaggaaggtgagaaacctacagtctcaaattcttgtagtcttaaactctttagcttcgaggcactctgattcattctcctaacaaatcacttcatgttttaggtgttttccaaactgtttgaagttactagacgtcgaatggttcaccgtgctctttcatcagcacagcgacagagactgtcatccaacaataacaagaagaaaaattagacagtatttttaacctttttctctatctgaagtgttcacacttacacatgtaggacaataagcaggaccgtctgggccggtctgcataaatgctgtatacataccagatttgatgctgcatatagggtatggaattgcacatccatctcataggaattgtaaatggtttgaataagaggaaagtaatttttgttgcattataaaatgtctagtagcatcataagtttttttgagagaagcatctttttatttcccatattcctggttattttcatcattgctttgaattga

SEQ ID NO: 19170 - DNA, 816 bp, Homo Sapiens
gcacgaggagaccctgtttcaaaaaaataagaaataaaaagtgagtcttcatattcaaattagtatatgaggttaggcaacaattcttatatgggaccaggtatatttaatttgcctttctttgcagtcatcctagtaaatccttgtaaagggttattttatatacaattttgtagtatattctaaatcccctttggcaaataaagctgaagttatctagtgtcagcatactgtgatttgtatatttatataagacaagattgcatcattctgattaagttgcagcattttagttttatctgataggcctgtattgagtaatcagtagctatgtgcaaatattaagtcaacttaattaccagacccagaaggccagaggtaatcaaagagtactttcagaagatgaaatatttataatgagttatggaaacaatgttttagaaatgtttttcttggtgtaatttaatgcagatttttacctcaattttgttaaagaacttgataatttgatccctccatctatttaatatttaatattttcagattctagagtatttaaaatttaaacacaattataaaattaattataattcctacttatgttagctatgatttagggccaaaactaccctggttttgtcttgcaacttgaaacattgtgtattttaaactatataatttgggaacattattttatagactgtggataaccaaatataagatttgtgatttttaatgcttcatttgtgtaaaatcatttgtatattctatttatagtatgcattttctagctcattaaaagtacagaaaaacctc

SEQ ID NO: 19171 - DNA, 808 bp, Homo Sapiens
gcacgaggcaaaaaacaacatgcagctactgagttgtatgtagagacatactcttggtgggccagggaaggtaaaaacagggaccagcaatgtcaagtttttgaactagaaaagtgggatgtttttagttttgtctataacctgtagctgggccaacccttgagaggacttgtgcaaagcatgtgtgcccagacccatcagactcctcagatatggcctcaaatacctagagatgtagaagtaccgtggagggcctcaataagagggcaagcacacagatggctagaagcctgtatggcttctggtcaggatgaacccttggccaagttcttgaggaaaccaggtctatattcctgaagggacagttcagtttgggactctattaggtttcagtagtaatataggctgcttgcatcattttaacattcatagggaaaatctctttgagcaggctataaatgaagctgttgcaggtagggaagaacaggacctgaaaatgggaaccaggaagtgagatcctgttggcaaagggaatgtagagcttccagggtgcattgcccactgttctcattgcataccagtcctccaagtcagtctagccttactgtacacttgacaagtgcttactcagcaagtcccagacccacggccttttatctcccaagactggctttggccatgaccttcctcatcagcctctgagcacactctctagaactgctgcagaaattcccctaccttagcctcccttctcccaggactcctctcttgactgcaattgcctctcttctctcttctctccttttgg

SEQ ID NO: 19172 - DNA, 949 bp, Homo Sapiens
gcacgaggttatgctgaggtacatttcttctatacctaatgtgttgagagtttttatcatgaaaggatgttaattttatcagatgtatctattgggatgattacatgttttttatccattctgttaataggatgaatcacattgatttgcatttgttgacaaggtctatccttgcatcccaggaataaatcccatttgatcagggtgactgatccttttcgtgtgctgttgaattcagtttgctagcattttttgtttgagatttttgcatctgtgttcatcaggcatattgacctatagtttccttttcctgtagtgtctttggctttagcatcagggtaatgctggcctcataaaatgaatttggaagtatttactcttcttcagttttttgaagaatttgagaggaattgttctttaaatttttggtagaattcagcaatgaaaccatcaggtcctaggcttttcttttatgggaaagcatttcttattaatgcatctacgtgttattggtctgattagattttatttttcttcatgattccgtattggtagaattatgtgtgtctaggaatttatctgtttcttctaggttattcaatttgttggcatatacttgtttacagtagcctctggtggtcttttgcatttctgtagtatcagttctgatgtttcctctttattttatttgaatcatctcttttttcttagtcttgataaaggtttgtgaattttgtttatcttttcaaaaagccaacttcttagtctcattgacctattgtttttctagtctctatttcattcatttctactctgatctttattattttctttttctaactttagggcttagtttgttctttaggcttagtttggttcttagtttgttctagttctttgacgtgtactctttaggttatttattaaggtcatttttctttttcatggt

SEQ ID NO: 19173 - DNA, 884 bp, Homo Sapiens
gcacgaggcttgtattttctgtgaagaacattttcctgtggctgaacaagacaaacttctgaagcacatgattattgagcataagattgtcatagctgatgtcaagttggttgctgatttccaaaggtacattttatattggaggaaaaggttcactgaacagcccatcacagatttttgtagtgtaataagaattaattccactgctccatttgaagaacaagagaattattttttgttatgtgacgttttaccagaagatagaattcttagagaagagcttcagaaacagagactgagagaaattctggaacaacagcagcaagaacgaaatgataccaattttcatggcgtttgtatgttttgcaatgaagaattccttggaaacagatctgttattttgaaccacatggccagagaacatgctttcaacattggattgccagacaacattgtaaactgcaatgaatttttgtgtacattacagaaaaagcttgacaatttgcagtgcttgtactgtgagaagaccttcagggacaaaaatacacttaaagatcacatgaggaaaaaacagcatcgtaagattaatcctaagaacagagaatatgacagattttatgtcatcaattatttggaacttggaaaatcgtgggaagaagttcagttggaagatgatcgggagttgctggaccatcacgaagatgactggtctgattgggaagaacaccctgcctctgcagtctgcttattttgtgaaaagcaagcagaaccatttgagaagttgtatgtccacatggaggatgcacacgaattttgatcttctcaaattaaagtcagaacctggattaaatttctatcagcaagtgaaactggtcaatttattc

SEQ ID NO: 19174 - DNA, 1273 bp, Homo Sapiens
gtctgagagtagctaagaatttatgtaaaagcaatcagagtttttaatttatgggaaccaaataaaactataacctcatagtgtttataagaactcagaaataatatttatttaactttattatgaggccacacatattttcctgtgtttctatatatagtttggaaaactatccttaatagtctgttttatatgccttatatttaaaagtttgttttagttattttgaaagactattgctgctgcaaatagttgtgtgctttacattctaagcttcagtacatttatttaagagcatcataatctgacctgagcatccacttggagagtgttttttttgtgtgtggtctggggtgacaaaagaccacaaaaatgtgtggtctggattttttcaactatgtcattaactttatgatccaagaccagttataggatgaatctgtatgtaaaaatagagtcttatttatggaaggaattattctaagggaaaaatccagggtcaagctgtatcttttatgtcctttatattgcatgtctatttctgttacacaatttgttatttcttcaaatttcctatggtagcatgataaatcatcaaagaacctgtttgggatataaaactctgatagaaaatatttaatgagtatcttgattataacctagaatatgtatacgttagtaaaataaccagatatactacagaactctctattggctcaaacaggttgacctcaatccaagtttactcttgatatcactctgttggctgaaggaggtaactcaaacctcagggtttgtttttcccgggacagatagtagtgatagtgcattatatttgaataagaaaaacaaaccagtataccttgagaaattttaaaaagcatagttgaggcatattttttcataattatatacttatctgtttattgcccatggaaaatatatgtgtagaagtatttcttctgttatttgttactatcttcttaatttgttccaaagaaaatgctgccatactgcattccctctggaaggaaacaaaacaaaacaaaactcactccaaaccagcagtgctgctatcagataagtagatgtcaatgtatacttacagggaaaactaaaaaatgtaatgtgttaattcagcctttttctatgtaatatttccaagtcagactttcttacattcctggaatttacttttgatataccaagaataataatgataaaatgtttgctttgattactgtggggggaaagatgaaatgttcattgtatt

SEQ ID NO: 19175 - DNA, 928 bp, Homo Sapiens
  misc_feature (301)..(310): n is a, c, g, or t
gcacgaggctggcttccatcagtggtaactgctttggtctcttctttcatctggggatgacaatggacctctcagcagaaacacacagtcacattcgaattcgggtggcatcctccggagagagagagaggaaggagattccacacaggggtggagtttctgacgaaggtcctaagggagtgtttgtgtctgactcaggcgcctggcacatttcagggagaaactccaaagtccacacaaagattttctaaggaatgcacaaattgaaaacacactcaaaagacaaacatgcaagtaaagnnnnnnnnnngaaagacttttgtttaaatttgtaaaatgcaaaactgaatgaaactgttactaccataaatcaggatatgtttcatgaatatgagtctacctcacctatattgcactctggcagaagtatttcccacatttaattattgcctccccaaactcttcccacccctgctgccccttcctccatcccccatactaaatcctagcctcgtagaagtctggtctaatgtgtcagcagtagatataatattttcatggtaatctactagctctgatccataagaaaaaaaagatcattaaatcaggagattccctgtccttgatttttggagacacaatggtatagggttgtttatgaaatatattgaaaagtaagtgtttgttacgctttaaagcagtaaaattattttcctttatataaccggctaatgaaagaggttggattgaattttgatgtacttatttttttatagatatttatattcaaacaatttattccttatatttaccatgtttaatatctgtttgggcagccatattggttctatgtattttaaaatatgtatttctaaatgaaattgaaacatgctttgtttttgcctgtcaaggtaatgactttagaaaa

SEQ ID NO: 19176 - DNA, 865 bp, Homo Sapiens
gcacgaggattacttgtctcaagaagacaaagagagacagaagcgtgagcatgaagaatccaagagggtgctccaagaattaaaatctgtgctgggatttaaagcttcagaggcagaaaggcagaagtggaagcaacttctatttagtgatcatggggtaaagtccgcatggaattagagggggaaagtctgcactggaacctgctgtggccattttttttctgttgttgctgcttctctagtggagttactgcagcttagggatggttcctggaagtggacacattttacaaaaacgttttttaaatacacgccagctcttcgagaagcacttttttccttccgtcatgcttcatactatattgtattgtactaacccctcatgctgggatgagcgactgcctagcaagcaacccactgcctactaacatcaagaggggctaaataaaactgcattttccttgcaaggacaacttctaccgtatgaatatatattatatttatgtattatattttgtacaatagttgatcttgaatgcagacttcatttgtatttttcgtggtactacaaaatgtgtagaagttatggcttttctttcattagggtcttgttaggtggttggcaagtaagttaaattgtatgttgcatttttttccatgctgttttaacttgtaaatatatatgtatacatatggaagatattattattatctagattactttaagccttttatctgatgtattatcagtgaaaaccatgctgcttattccctaatacaatggttctcaaactttagtgtgtatcagaatcaagatgagggcttgtaaaatatagctggtccctactcccaaagtttccatttc

SEQ ID NO: 19177 - DNA, 835 bp, Homo Sapiens
gcacgaggctgctcccgtattatatgaaacggaagtggaagtgtcgttaatgcctccctgcttccataatgattgcagcgagtttgtgaatcagccctacttgttgtactccgttcacatgaaaagcaccaagccatccctgtcccccagcaaaccccagtcctcgctggtgattcccacatcgctattctgcaagacatttccattccatttcatgtttgacaaagatatgacaattctgcaatttggcaatggcatcagaaggctgatgaacaggagagactttcaaggaaagcctaattttgaagaatactttgaaattctgactccaaaaatcaaccagacgtttagcgggatcatgactatgttgaatatgcagtttgttgtacgagtgaggagatgggacaactctgtgaagaaatcttcaagggttatggacctcaaaggccaaatgatctacattgttgaatccagtgcaatcttgtttttggggtcaccctgtgtggacagattagaagattttacaggacgagggctctacctctcagacatcccaattcacaatgcactgagggatgtggtcttaataggggaacaagcccgagctcaagatggcctgaagaagaggctggggaagctgaaggctacccttgagcaagcccaccaagccctggaggaggagaagaaaaagacagtagaccttctgtgctccatatttccctgtgaggttgctcagcagctgtggcaagggcaagttgtgcaagccaagaagttcagtatgtcaccatgctcttctcagacatcgttggggttcactgccatctgctcccagtgc

SEQ ID NO: 19178 - DNA, 1166 bp, Homo Sapiens
  misc_feature (1056)..(1101): n is a, c, g, or t
ccaccgcggtggcggccgctctataatctttaaaaatcccccgggctgcaggaattcggcacgaggaagaactcctgttccctccagtcccgttcctatagcaaccatcgacttggtacagcaacagacagaagatgtcatgccacgcattgagcccagacttccacccaagaaaactaagcaccaggaagaacaggaagatgtgaacaaaccagcctggggagtcagctcttctccctgggtgacctttgtctatgcactctaccaaattaaagagatgatgcaactcacaagagacaaccgtgcttctgagatacagcctttacaggggaccaatgagaatagggaaaattctcctgctggtagagcccagcctgtcccatgtgagactcactctgacccatctagaaaccagccatcccctgacgcagcagcatctcagacgcagaccagccccgctcaccccagtgtggacccgtgcacagaggagagtgaagagcagcaggctcagctggccgcgggaggactctgagggcatcctgctcatctcacaccctgcatggaatcaggctcctcagccaggacacagggtgaggccccccagccaggatatgcctcccctggaggagcacagcactgcatatgcttctaaatatctaaactcattaacatggaaacacacacacaggagctacagtacatattggcaggaaaaggtaaactttcgtaatctcattggaattacaacagggaaatggagttcaatgaggactttcagttctttgcttggttaggttaaggatgataaaatttctctgccagtgcagtaagagttgaaaccggcagttacactaagtaagtggagggaatgaaagtgtttccaggtgaatgtggatataatttccctcttctgattatttattcttatttggttcctaacacaaactgggaagagatagaattcatctatactttcttttttcttggagagaaccgtttaaaaaattacaagatatatttaaaaagtaaccagataaaattagcacatgtgctttnnnnnnnnnnnnnnnnnnnnnnnnnnnnnnnnnnnnnnnnnnnnnngtttcatcagaaactttacatatctttagcaaatatatttttatatgtgtatggcatataatgga

SEQ ID NO: 19179 - DNA, 797 bp, Homo Sapiens
gcacgagggaactgatgttattacaaagaaaatacatgcccatgaccaaatattcaaattgtgcaggacagtaaataatgaaaaccaaatttcctcaagaaataactgaagaaggagcaagtgtgaacagtttcttgtgtatcctttcagaatattttaatgtacatatgacatgtgtatatgcctatggtatatgtgtcaatttatgtgtccccttacatatacatgcacatatctttgtcaaggcaccagtgggaacaatacactgcattactgttctatacatatgaaaacctaataatataagtcttagagatcattttatatcatgacaagtagagctacctcattctttttaatggttatataaaattccattgtatagttatatcattatttaattaaaaacaaccctaatgatggatatttagattcttttaagttttgtttatttcttttaagttttgtttgtggtataaacaataccacatagaatgtttcttgtgcatatatctctttgtttttgagtatatctgtaggataactttcttgagtggaattgtcaggtcaaagggtttgtgcattttactattgatatatatgttaaattgtgtcaaatatatatgtcaaattccctccaacattgtttaaatgtgcctttccctaaatttctattttaataactgtactattcctgcttctacagttgccactttctctttttaatcaaccagattaaatatgatgtgagattataataagaatatactatttaataaaaatggatttatattttt

SEQ ID NO: 19180 - DNA, 780 bp, Homo Sapiens
aatgaactatgtttaacattttacaaatcttcaggttgttacagttttcagcagtaaatatagtagtaacagcaataaatacaccgaaatatgagatttctctgaaagaatagaaaaaatagaaacacctggaaacaagaaggcaaaatgtcaattctagatctgaaatagaaattaatacagctgaattcctttacaatgctcgtacatgggaaaatgagaaactcatgcgccttataaatgaatgtgtgactttgagcttcacctttttaggaagttttgagggacatcatttgacccacagatctctaaaaccctataatacgtattgataccagaggattcaaacacatagtggtctgaaaatgattgccaaagcaaagaagtgctttcattcctcaacatttgtaatctctgtggtatattatgtattataaaagggcataatccctatagaactgaaagggcataatccctatacaactgcataaagtcataaaaattgatttataaagtctcaagatcataatatgtattcaaaaatacatacagctgtgctttagtaaatgaatccatcagttagtcaagagatagttttgcctttaatatatatccaaagtatatacaaaggatcgacaaatgttaacatttgtgaccaaaatcatctaggtttatatttgaaaaaaccttggttttcaatttaaaatttaagaaagttgtgaatattgtttattatccctgggtttaagaaaaataaaagggtttccgcttttaacagga

SEQ ID NO: 19181 - DNA, 859 bp, Homo Sapiens
gcacgaggatgattgataaagaacagaaaagcattgtcatcatggttcatatttatgaggatggcattccagggaccgaagccatgaatggttgcatgatctgccttgccgcagagtacccagctgtcaagttctgcaaggtgaagagctcagttattggcgccagcagtcagttcaccaggaatgcccttcctgccctgctgatctataaggggggtgaattgatcggcaattttgttcgtgttactgaccagctgggggatgatttctttgctgtggaccttgaagcttttctccaggaatttggattactcccagaaaaggaagtcttggtgctgacatctgtgcgtaactctgccacgtgtcacagtgaggatagcgacctggaaatagattgaactgatagtctagttgcatagatttctcattgtttgggttggaatacacgtcattgtttatttttgttcctttgtcttctggcttttcagctgttctttgtagtcccttttattatgcataaaataaagaaattcttagattaaatcagaatgctgaataaccttgtagctagcaataaggtgacttacaattgtataaacaggaagccaggcttttgaactgtttacttaagattctgtggtgtgacatctctgttattgtttccagtcaatatttacaaagcatcctaaagacagggtcttggaaattgtcttcagatgatcttagaggtctctgccaagtctgagagtataattctgtagtattgtgttatttgcaacgtaatagtgcattttcttaatcaaatgattgtaaattatatttacttgtaatcagttccatagcttagacggtggttaga

SEQ ID NO: 19182 - DNA, 1165 bp, Homo Sapiens
  misc_feature (964)..(980): n is a, c, g, or t
ccccgggctgcaggaattcggcacgaggcatacttgttttatatcttcagtttatatatatatcatacttgttttatatcaaagttgagcttcaacccaatgtgccactttgatataaaacaagtatgatcttgcctttgaaatcataaatgtttggggtacctgttctttgccagttaagatacatatcttattatctttgtttttttcaagtctatgctcctgtttgaagcttttcctgtaatttaggttgtctgtgaaatacctataacatataattcctatagagtatgccacattttttttctaactcatttcaaatgaaattctctcagattctagtttttgagcttgtccactagatctgaaaataaagcatcctttcctgagtccacttgaactaattgtgaatttgttacttaatttactggcatcttgggaaacaagttttgctgtggcaggaaggctgttttgagagtgagcgttgagtctactctggtttgtggatgacattgcattagggttatttcctgtattaccagtgcccccttgtggcaatatactttatgacttggaatgcaaacaccacttttaaaagcctgttttcaagtttttgaaaggcatttgttttctgttgtttgccaataatctgaaagtatcatgtgaaaggaattattttaaaagcattttaaacctttcccaaaggtaaaatgtgctcagattataggcacttgtaattctaaccttgtatccatttgatcaaagaaaatttgtagaacatttttacctctcatgatcacaatcattagtgtctccctttataacgacctatgttttgtttactttgaaacaccaaatttgttgtcttggttttttatacatgacagaactcatgcagtttcttttttagttgaaagttcacatcttgccccttgaatagtttgaacatttctttcttaattcnnnnnnnnnnnnnnnnngcactgtaaaactgatgaaaactttaagccaatcttaatgcactaaccctctgtagtgtaaggaagtgtgagaggagtttcttaatgagtttacacgttttaaatcaagcatattataagttatatgccatggtgttgaaggcttttctattaatatatataaagaattttagtatttggtttta

SEQ ID NO: 19183 - DNA, 966 bp, Homo Sapiens
gcacgaggctggcagtccccaaggggcgcagactctgctgtgaggtgtgcgaagccccagccgagcgggtgtgcgcggcctgcacagtcacttattactggtctgggccgaatcgttcaggctgaagaatatctattccaagcccagtggacagtcctcaaatcaactgactgtagtaatgccacccactctttactgcatcggaatctgggacttctctatatagctaagaaaaactatgaagaggcccgttatcatctggccaatgatatttattttgccagttgtgcatttggaacagaggacattaggacttcaggaggctacttccacctggctaatatattctatgaccttaaaaagttggacctggcagacacattgtacaccaaggtctctgagatctggcatgcatatttgaacaatcactatcaagtcctctcacaggctcacatccaacaaatggatttactgggcaaactatttgagaatgacactggcttggatgaagcccaagaagcagaagccattcgcatcctgacttcaatcttgaacattcgagaatctacatctgacaaagccccccaaaaaaccatctttgttctgaagatcctggtcatgctttactacctgatgatgaattcttcaaaggcacaggaatatggcatgagggccctcagtctagccaaagaacaacagcttgatgtccatgagcaaagcaccattcaagagttattaagtctcatttcaactgaagaccatcccattacttagtgacccatgagctctgcatcaagggttattcccaggggctactgaagatctaatatattccagccttgcacaactgctttgaggtactgtagactgctgaagtttcaccctcttcccctgggattgcacacatagctgtatttttttcttacacagcatattaagggaatataaagctttaaggcatagaaa

SEQ ID NO: 19184 - DNA, 927 bp, Homo Sapiens
ctgcggcaagcaggtctaggaattcgcctggttcccacctcgcgtcccttgccttccttcctagtctacccactgtagtgccccctgcgtcccgctccctcctagccgactcagagcacaagaaggattgccacggtttccattgcagcagccgtggcgcctctgaccctttttttatatcgcggcgacggcgggctgtcgtcacgacgacgtgcggacgcagcggcgggggcctttcagcttatgtggagaagtcgctgtgaagccacctataaatccatttactgaatttatggagaaggctgtaaatgatggaagtcattcagaagaactcttttgccatcttaaaactatatcagagaaagaagatttaccacggtgtaccagtgaaagtcatctcagctggcgaatctttctgcattgaatttgaagatttctgaacagaaggaaatattaataaaagaattagacaccttcaaaagtgtaaaactagctttagaacatcttcttagaaagagagactacaaacaaacaggagacaatttatccagcatgttgctagaaaatctaactgataatgaaagtgaaaatactaatcttaagaagaaggtatttgaaaaggaggcccatatccaagaactttcttgtttgtttcagagtgaaaaggcaaatactttgaaagcaaaccgtttttcccaatcagtaaaagtagtacatgaacgactacagatccaaattcataaaagggaagctgagaacgataagttgaaagaatatgtaaagagcttagaaaccaagatagccaagtggaacctgcaatcaagaatgaataagaatgaggctatagtgatgaaagaagcaagtaggcaaaaaactgtagctttaaaaaaggcatctaaagtttacaaacaaaggcttgaccatttt

SEQ ID NO: 19185 - DNA, 827 bp, Homo Sapiens
gcacgaggctggaccgcgagagcgtgtcagcctatgagctggtggtgaccgcgcgagacgggggctcgccttcgctgtgggccacggccagtgtttctgtggaggtggctgatgtgaacgacaacgctccggcgttcgcgcagcccgagtacacagtgttcgtgaaggagaacaacccgccgggctgccacatcttcactgtgtctgcgtgggacgcggacgcgcaggagaacgcgctggtgtcctactcgctggtagagcggcgggtaggggagcgcgcgctgtcgagctacgtttcggtgcatgcggagagcggcaaggtgtacgcgctgcagccgctggaccacgaggagctagagctgctgcagtttcaggtgaccgcgcgcgatgccggcgtgccgcctctgggcagcaacgtgacgctgcaggtgttcgtgctggacgaaaacgacaacgcgccagcactgctagcgcctcgggcgggtggcactggtggcgcagtgagcgagctggtgccatggtcggtgggtgtgggccacgtggtggcaaaggtgcgcgcggtggatgctgactccggctacaacgcgtggctttcgtacgagctgcagccggggactggtggcgcgcgcatcccgttccgcgtggggctgtacactggcgagatcagcacaacgcgtgccctggacgaaacggacgctccgcgccaccgcctactggtactggtgaaggaccacggcgagcccgcgctgacggccacggcccctgtgctggtgtcacttgtggagagtggacaggcgccaaaggcctcctcacgggccgttggtggc

SEQ ID NO: 19186 - DNA, 859 bp, Homo Sapiens
  misc_feature (688)..(713): n is a, c, g, or t
agttatgacaaattttattgtatatattgcaccacattgaaaaaaaatcaacatcatgaatgagattaaaacaaaggtcattttaagagaatatttctcaggccaggaaagacctggttatagcctaattagtagtgatattaacagtaggggactagtcagcatggaaacacacacaaaaaacagagtcacgttgccaggggagatgatcaatctggggactagataattccagtcactttaaaataattttgttacaaagcaggggtggtttatcaacttcaccacggcctaaaagaaatatgctcatgcataaacctctgaacaggtgatttggtgtgcagagtgctttggctttgctgtttagagagaagaacactggaaaacaggtgggtgtaggtgttgtcaatgaaaagaaagattatcctttgtaaattaatgagatggtatcctgatttatgcatatgtcccttctgttctgagtctgtttattaggagtaagtttccctttctctgatcaactcaagattgactttataggtatgaaaaatccaaagcaaaaccctcagcaatcatgacctaccaataaatgaaatgacagtttaggaatccttctgatcccccaaaaccacaacagggcaaagttcattggtaaacagcaaaaaaaattacatgaacactataaacnnnnnnnnnnnnnnnnnnnnnnnnnncaaaggaataatagtaacaaaaaaacaagagagctcataaaaagtattctgagtataaggaacataatcttaatattccatactactcctttttcaaagaatatatcccagactttgaaagtggaatcagaaatggaaaaaggacc

SEQ ID NO: 19187 - DNA, 580 bp, Homo Sapiens
ccttgcccgagcccgaagcgccgacgatggcggtgacggtgccgggcttgagggtcaagctgatattcgacagtaccgggttctgcgggtcgtaggcgtacccgaggttttccacgcgcacctcggcgtccttgggcagccgctcggaacccggttccacctgtgccagcaccggtgtcgccagcagtgcctgtacacgctcggcggcgccaacggcgttgttcaggtcgtgagtgatgtaactcagcagcatcagcggcgcacaaatacccggcgcgacaatggcgaacggcagcacctctacggcgctgatccagcccaggctgataaacaccaggccgaacgtcagcaccgttgccagcaccgtcaccggggcgatcattgcattggcgttggccatcgtccccaccagcggccgggtgaattcaacgaaagctttgctgaaatcatccaccgctttgcggtagcttgcgtgggccttgccgatggcaccgaaggccttgaccaccggaatgccgttgacgaactcgacgactgcgttattgacccgggtcatgcgttcgacaaaggcctgcctggt

SEQ ID NO: 19188 - DNA, 927 bp, Homo Sapiens
gcacgagggctcagcgatggcggctccagaaggcagcggtctaggcgaggacgcccggctggaccaggagaccgcccagtggctgcgctgggacaagaattccttaactttggaggcagtgaaacgactaatagcagaaggtaataaagaagaactacgaaaatgttttggggcccgaatggagtttgggacagctggcctccgagctgctatgggacctggaatttctcgtatgaatgacttgaccatcatccagactacacagggattttgcagatacctggaaaaacaattcagtgacttaaagcagaaaggcatcgtgatcagttttgacgcccgagctcatccatccagtgggggtagcagcagaaggtttgcccgacttgctgcaaccacatttatcagtcaggggattcctgtgtacctcttttctgatataacgccaaccccctttgtgcccttcacagtatcacatttgaaactttgtgctggaatcatgataactgcatctcacaatccaaagcaggataatggttataaggtctattgggataatggagctcagatcatttctcctcacgataaagggatttctcaagctattgaagaaaatctagaaccgtggcctcaagcttgggacgattctttaattgatagcagtccacttctccacaatccgagtgcttccatcaataatgactactttgaagaccttaaaaagtactgtttccacaggagcgtgaacagggagacaaaggtgaagtttgtgcacacctctgtccatggggtgggtcatagctttgtgcagtcagctttcaaggcttttgaccttgttctcctgaggctgttcctgaacagaaagatccggatcctgagtttccaacagtgaatacccgaatcccgaagagggaaaggtgtctgactttg

SEQ ID NO: 19189 - DNA, 847 bp, Homo Sapiens
cccccgggctgcaggaattcggcacgaggctttccattacacaaggtggtttatttaagtctgtacatcttggttaatatctggacaatttccattcatgacggtgattttcgtgtcccccaaatcttacagccatttattaatggctcagctcatcatacagaccaccatatgttctttgactataattatggacaatatttcactttgtgggataggattggcggctcattcaaaaatccttcatcctttgaggggaagggaccgctcagttatgtgaaggagatgacagagggaaagcgcagcagccattcaggaaatggctgtaagaatgaaaaattattcaatggagagtttacaaagactgaatagattattgcccagttattcttaagtaaggacaaagaaggaaatatcatcgtatttcttttttttaataaggaaaaaataatctccatacagtcaagatacatagtaaatggtatcatttggaaatcagcatcgtgggcactgctgaggaatgatcctagtggtaggtcagaagaagatgctgtgaacaccaggactttaatcttatgcttaaaatgccagatgttgttcgggggacaacttgtatctttctagcagcagatctgtagtttgtatagcctcaacaacaattttaaataagatggagaataaattattgaggggactaggctatatgcatttgccttcatccacccatgtttattaagaatcattgtgcttaataataacaagactaagcaccataaccaagaaatactaatgtaagattgtttcttgttccaggaaggttaattcctcaacgttggtatgataatga

SEQ ID NO: 19190 - DNA, 955 bp, Homo Sapiens
  misc_feature (659)..(667): n is a, c, g, or t
gcacgaggctctgacaccaagttgtgtggacagcttaaaaccctactccatggcattgggcttctaatgggacagcactcagtttttatttacaatggaaaatgttataattctggtccttttttaagtttgaacagaagggttgatcaaaatgtgttttgtctgttttaggcttgatgattcacgcttctctttaaactgccttaaagtaataaatactatggcattctgtttaatacacgaaaggtttccacttgatatacattgtgttaaaacagaagatagccatattcacatctgtttctgaaaccagactttgttaattaacagttttaaaatattaattagttttgacatcttgtaaattttaggtcaaaaatacagtccagaacttcctcaaagtgctaaccttaagtaacataacagtgtttgcctgtttgcttgcctggtaaattttgctttttatactgacagacattactaatgtttaagttgatttatcaacagtatttttaaaaactcaaatttgtcttgtgaaaaatgagatgattagaggaacagaaagaaagcaacaggtaaagaattcttcaatttacataaattacaaatgatttggtgctaaatttatgcactatgacatttggcttttatgcaatcannnnnnnnnctttaaagatgttaacactacctgatattaatcataatgttccattatgttgattgcttgtaataggaagaaaaggggtgtcttcctgtgcaactgacacagctaggctttgacggcaggcctccacaaggtctacccttttgattccctttaactgaattctgttcatcaattgttttgtttcatgggcggtgggaggggaaaggggaattcaatgcataaataatatttctaaggctcagtagaaatttctaccatagggatcatttcatgcatttatttttcatt

SEQ ID NO: 19191 - DNA, 929 bp, Homo Sapiens
tcccgggtccccctcaaaactggttctccctggccgtgctggtggtgctgggcgccgcggacatgatcagcatggtgatccgcgcctcgttcgtacagctggaaaccccggatgaaatgcgcggccgggtcagcgcggtcaacgggctgtttatcggcgcgtcgaatcagttgggcgagtttgagtccgggatcaccgcccactggttcggtaccgtgcccgccgtggtcatgggcggcatcggcacgttggtggtgaccggggtctggatcaaactgttcccgaccctggccagccgcgaccgcatgcatgtgccggtggaagaacccgccaaggtttagaagaccttgtcgagggtgacgggaaagtcccgcacccgcttgccggtggcgtgatacaccgcgttggccaccgccgccgcgaccccgacgatcccgatctcgccgacgcccttggaacccagggcgttgacgatctcgtcgtgttcttcgacaaacagcacgtcaatctcgccaatatccgcgtttaccgggatgtggtactcggccaggttgtggttcatgtagcgacccaatgcatgatcaatctgggtctcttcatgcaacgccatgccaataccccagaccacaccgccgagaatctggctgcgggccatcttcggattaaccacccgcccggccgcaatcgcactgaccacccgactgaccttgatggtgcccaggtcttcatccacccgcacttcgacaaacactgccaaatgcgtggctgaaggcgtagccttcgcgctgtttgcccggttcacaatccacctgaacctcagcgcctgctcaccgctgtcctgtaccagttgcgccaagggagatgcgctggtcacaagcatgcagctgggccattttcgaaccccgccgactctgcatctttaaaagccg

SEQ ID NO: 19192 - DNA, 1064 bp, Homo Sapiens
gcacgagggtgcagtgtcctcctggtgtcaccattggctttgttgcggaacattggaacctgtgcagggcggtgtacagcatccaaaatgagaagaaagaaaatgtgatgagagttcgtgggccatgctcaacctatggctgtggttcagattctgtttttgaggtcaaatcccttgatggcatatccaacatcggcagtattatccggaagtggaatggtttgttatcagcaatggcagatgctgaccattttgacattcacttcccactagacctggatgtgaagatgaaagccatgatttttggagcttgcttcctcattgacttcatgtattttgaaagatctccaccacaacgttcaagatagagagacacagcaagccatcaactatggttaattttgaaaaatggaaaagttggattgggcttacagtcagcactcagttatttgcaagtgtatttctttgctttgtagagtatttttattgggtgttaactttgacagctgagagtgggcttgcaagaacacaatctaaaagtgtgtttcaattgagtatctctctagtagaataggagttcatcctgaaaagctgtgactcattaacccagtaaacatatacaaagtaagcttaaaacactataaacatgagataagggaaaatgaatccagagttctcatattaataggtagtgaaacaataaggctttttagagcagactttgttggcataaaataacctggcttctatccctaacctttcctacctttcctctccgtcacatgtcctcatactgaagacaaacttgtttcaatgatagtcttcattttcaaaacaaaaaggcaggcagacagaaatatgatgttttcttgcactaagaagtactacttgtacacatatatcaaacctcattctgcaagttttgaaggtttcatgggaaatttgattttattacaaataaaacattttcttaatgttaaagtttatatattccatgcttgtgttctcattcgctggcatggatgatcaggagctgcctatatatgaaggcagaatcagactat

SEQ ID NO: 19193 - DNA, 838 bp, Homo Sapiens
ccgaagcgccatggctatggctagtgttaaattccttgccggtgttttaagaaagccagatgcctggattggactctggggtgttctccgagggacaccttcatcatacaaactctgtacttcctggaatcgatacttgtatttttctagtaccaagttacgtgcaccaaattataaaacacttttttataatattttctcactgagactcccagggcttttactatctccagaatgtatttttcctttttccgtaagactcaaaagtaatataaggtctacaaaatctactaaaaagtctctgcaaaaagtagatgaagaggactctgatgaagaaagccatcatgatgagatgagtgagcaggaagaggagcttgaggatgatcctactgtagtcaaaaactataaagacctggaaaaagcagttcagtcttttcggtatgatgttgtcctgaagacggggctagatattgggagaaacaaagtggaagatgctttctacaaaggtgaactcaggctgaatgaggaaaaattatggaagaaaagcagaacggtgaaagtgggagatacattggatcttctcattggagaggataaagaagcaggaacagagacagttatgcggattctcttgaaaaaagtgtttgaagagaagactgaaagtgaaaaatacagagtggtgttacggcggtggaaaagtttaaagttgcctaagaagagaatgtctaaataaatggattgctttttagccatagagctgctttctagtggtaaaggaaggggtcaccctgaaaaataggacatttttattaaaataaagttctcctaccgtttgtgg

SEQ ID NO: 19194 - DNA, 802 bp, Homo Sapiens
gcacgaggatcaagctgtttttccattaacagtgtaaattcataacatgtccttcaaaaggtgatattctaagctgtcttaattgtctacggttgataacttttaaataaagtacaggactttctgaaagtgtttggcatgttatgctgccaaaaacaatctgtgttttgaaataccaattaatcagttaatttctgaagactttgtataggacttgatatatgagtcagaatctgtctgtactcattctgtacattgtaactttgaacacttatgaaaaactgtatctgttggtgtgttttgattagttagtgtagatttgtttgcgtatttgaattccgattttagtttaggaagactaaaagtagccatttttgtaaagttcatatgctattttttaatgtcatttttgtttttaatatttatacaatagtgatgttactagtaaaaaatgtttatagataacacgtagagctattaactgttcaaaagcctacatgataggcatattttgtatttcgtgttgcactcgttctgtttcatattggactttttacatcccttttttagcaaaaaaaagagacacatttgaattctctttagcataaagctgtgcattggaaactatgtgactgtatccatacggttagcaaaatactctttgccaccaaaggtaaatgaaactgtaaaatacctctggatatttgtgccaatgaacttttcttagcatattaggattaaagcaaaaataatcttttcagtatgtttcatctaggacttacaataaatgtttaaaccatga

SEQ ID NO: 19195 - DNA, 446 bp, Homo Sapiens
gtttttttttttaatctttactttgaatttgttccccaagtgtacttaatcaccttagtgccagtttaatccagttatgcagaagaaattcatattggttgcctgatgtagagctcagcaccaccctaccacaggccttgtctggtgtatttgggaagtggaaaagagccctcagttggagggagctgacaacccttggtggagggagggtgcccttgaatgtattaaaactatcacccaaagaaggtatgaaaacagggtaaggtggtcagttgtttgccaggtcaatagacagaaagtacattagaaaacaggacttaggccaaacaaacaatactggatactgaatacaaaacagtatgatttatattaaaggtttccaaaggttgcctgcaaaggataatattactactagtctgctggaaaaaaatgcattcagaacccaa

SEQ ID NO: 19196 - DNA, 595 bp, Homo Sapiens
ttttactttaaatttaatgtcatgtagggtcactaaaaacaaaatgtaagggataaatataagtgcataaaacagagataataccaatttccacaaatacaacttttattatccaaaatcatcttggaaggactttttctaatatgcccattttctaaataagattaaccatttgatgggaatatttccaattgtatcacctccttccttgactttttcttcatcaacttagggcctgggttgtaggcactgtggctctttgggatagttaaatgggtgcaatttggctgagaccgcccctgtcttaaatggcccaggctacagggcttgccaaatggctttggtttgcaacctcttcctttgatatccattgaagaacacatgtcctaccctcttgattgcaagcttctatctgctattggctatcaggagcataacagataagttctaaggtccttccagttccaaaagccattgaccaaccctgtgaggcactatgagagattggagattactgaggaatctcttccaataacatatgatatataaaggtaattgtgattctatgaagagtgaataaaaacctgcagcccgg

SEQ ID NO: 19197 - DNA, 971 bp, Homo Sapiens
  misc_feature (605)..(664): n is a, c, g, or t
gcacgaggctgcgattgctttgatgggtatcacttggatacggccaagatgacctgtgtcgatgtaaatgaatgcgatgagttgaacaaccggatgtctctctgcaagaatgccaagtgcattaacaccgatggttcctacaagtgtttgtgtctgccaggctacgtgccttctgacaagccaaactactgcactccgttgaataccgccttgaatttagagaaagacagtgacctggagtgaaacagaatctacataacctaagcccatatactctgcactgtgtaaaggaaaagggagaaatgtattatacttgagacattgcacctaccccggaaggctggaaatacagaaacagcatggagttgcaagtcctctgaagacaatgagaggatttaggatgagcccgataggtgtggcagaccaaatggacatttctctaaaaaaccagtatatatagtctgttcatatgtaaaattcaatggaagagaggtggaacagtgctgttattttaaacagaaggttgtattattatgttgttttgtttttttactattgcttgattaaatttggcatttaaatagtggtggaaatattttatatannnnnnnnnnnnnnnnnnnnnnnnnnnnnnnnnnnnnnnnnnnnnnnnnnnnnnnnnnnnaaaaatctcaaatgaaaaagtcttcgatacaatattgttaagctgtattataagtattgttacacaggggttatgcaattcccggcctggagcatttttgaaattcaaattgtctgtcctgtggagcaggcagtgattttgttccaaaactttgtatacacatttggagaaaagtactttatattttcagtgttttgtctgatttaatgtccgttcttaagccagctgctagcagtgttaattggaatccttttccttcactgaaatggaggagtttataagcttacgttagtattgtaatatgtaa

SEQ ID NO: 19198 - DNA, 913 bp, Homo Sapiens
cccccgggctgcaggaattcggcacgaggctctttactaaatggagactacaaaaatggcatgattataggacatacatgtagattgtgctaatatttctcagcctttaaattctgtctccacttttctgtatttttctgtatccacttctattggtgcactgacttttccccaagagttttccatttacttaaaatcaaattttggcaaacacttataaatattttttgtcttcccttgactgaagcgctgcttaaaaacatactattttactctaccaagttcatccaaagaacatgatgaagctgtgtagagaagattgaacttttaagtttagcagtaaatataggactttaaattatgaaatggtaaaaatttttaatctatttagaattcagcattacattttagtttcatttttcactaggtataaatggtattagtgaatttacagaaacttttcacttgttaaccatgaaattttaacttttaaaactcatattctagcattttggggtcaaataagcatcagtgactattgaactaaattacataatccttctcactctcctcaaagatttaattttacgtttcaaggtaaatgaattcccctatgatttgaaatccctacaagtatttttgtggaattacatgatatggagaaagaaaataatgaggccaaataaaagttaaactttgttatgttttatttttcttctaattaattttttaagctctgcaagtgaataccacatttcaattgctgccaatgagacagtccctgaagttattaattctactgaggacattggaaatgaaattaatatcttctacttgattagaaaaagtggatcttttccaatgccagagcttaagctgtcaatttcattccccatatgacatcaaatggtta

SEQ ID NO: 19199 - DNA, 860 bp, Homo Sapiens
gtggacatcacaaagcaacctgtggtgtacctgaaggaaatcttaaaagaaattggtgttcagaatgtaaaagggatccacaaaaacacatgggagctgaagccagagtacagacactatcaaggagaagaaaagagtgactaagaagactcctagccagcatgctagtgaaacgactagcagcgatgctatgcaaaaggcgctgatactggaaggcttgaacaccgtatgttaataggggttaagtgacagtactttgatttctctcggtaaattttttaaacctgtaattcttgtaaagtttcttaactgtttttttgaggagaaagaacagatttatttatagacttaacttgtattaaaccagattattcacagtaggaataggggttggaggattaagagggtttttcttaaatattagcttttaatgtgtacaattaggaaatttttttaagtgaggactctctacccttgccgtatctaaggagctgaggtaatacagatccaaggagaattgtatagcaagaaaaaaacagtcaactacagaaactcttaaaaggaataaaaacccaaagttccttattttgaaattgtcaaagaacaaagcggtgtttttcttttaaacaggtgatcacgtttcgtgttcatactcacgttaataaaaggagagagtttgtagtgaaatggcagtgttcatcattggcttattttaccgtaatgatgctgaatgagaaatgtgcaggatcatggtcagttgatgtttcttttatttgcttttagataattagaaattaaatatctttccaaaatttgaagatatgtctcccccagtcagattataagcttctcaaaactgg

SEQ ID NO: 19200 - DNA, 820 bp, Homo Sapiens
ccggcctattgtagattttcttaactacttgctaaggaaatcatatccttttacatgaactacaggtttagaacttggttttaagacaactgctatggccagaaggtaaatgggaattgccttattgaaggtaacattgattgcctaataagaaaatgaattgtttgccacagagttgaatttaatttgagttagatagttcagaatgtagcacttgccctataaatgaatcagatttgttctatttatataatattagaattaatatattatcatgtaagtgggaattttattttgttaagtggactctcaaattttagaacttgtgtgaaatatctcccagaaaacacaaaaggtttcaaggtatcacccaaagctagggaatcaacaaacgtactttattaatgcaagaccacaatttaagccccaggcaggaatccaacagtaacatttttcctttaggttaagcagtaatttttttgaattgtcatttttaatgggtctcacacatgcatattgctaatatcattcatgtttgaggttttcaacaaagaaccaatttattaatataatgtacaaaaatagttggttcattttctgaattcagtctttgaaataaaactccttgttttggccgtgtttctgaatgtattggtgattcacccccaagctaattttttaaagtcatttttgaagttgggaagtctcatgagagatgttgaagtatgtatttaatcaagagtcatgatttcaaactagttttacatataagcagttagtgttctaatttatggggtaaatgtgtgtttggataaatatc

SEQ ID NO: 19201 - DNA, 634 bp, Homo Sapiens
gaattccggcacgaggggccccccttacagcgggggcacatctcccacttggagagagagatccagaaactgagagcagaaataagcagcctccagcgagcacaagtgcaggtggagtcccagctctccagtgcccgcagagatgagcaccggctgcggcagcagcagcgggccctggaagagcagcacagcctgctccacgcacacagtgagcagctgcaggccctctatgagcagaagacacgtgagctgcaggagctggcccgcaagctgcaggagctggccgatgcctcagaaaacctccttaccgagaacacgtggctcaagatcctggtggcgaccatggagaggaaactggagggcagggatggagctgaaagcctggcggcccagagagaggtccaccccaagcagcctgagccctcagccaccccccagctccctggcagctcccctccacctgccaatgtcagcgccacactggtgtctgaaaggaataaggagaacaggacagactaactttttaaatgatatgaagaaatcagaggtgaaaattgtacattgggaatatatttatgcaaattttattgaaatttattgtaaataaagattttctcagtggtctagaaaatca

SEQ ID NO: 19202 - DNA, 1429 bp, Homo Sapiens
gcacgaggcttaagtccaaaataggaagaagtggagtagtttgcagtattgatttatatcttagactactttagcaataaaagataaatctcaactttaataagttatcctgacacttgataaaaataaatatttggtattttgtggtcatgtaaaacttctttttgtatgaaaattgtgagaaatttaaatcagcaatagtaacacttagatttttataaactaacaaaaacttgctctcagtcaatataataaatgatagttaaactctaaggaagacctgggaaatgaaaacaatttatggaagtcccctacagtcagtttataagggcttcagtagtgatagacattgttataaaaacttgtaccatgttacatgtacactgcaccacagtctaaattcagaccagcatttgaaggactgcacatatttcatttcctctgatttatgctgtcacaaattgaaaatctgagtgtagttaggacaaaaaacaaagctaaccatatggcactaattttgattttaacattagtgtaacaaataaggtcgggacatatatttacatagatcccagacactcaagaattagcacagctgatgtaaaattctaaattaccatttacttccagatagagcagaggagaaacacctcactgcagtttcaacatgctttccaagaacaatatatacgacatatacattttcctgcctctctcttgtgacaatttctgttagaatttgttgggggtctgatggttaaaatcatgggcaaggccattctctacatcattgcttaatatttcaaaaataggtattagagcactatcagtggtccaaaattagttttagctacttattttgctccatgggttttgggcttttcaaagaatactatgtataatttgtaattgaaagcctttcagtaggatatccaaagttcaatgtgtttcaaaagggaaaacttttacttgtgggggtgggagttagatgtattaaaaaaacgaaactacaaaatccttttaagaaagtaataccaatttagactctagtttgtgttacgaggtattctttcaaattttttttaaaagccaactactgtcattaagaaataattttagatttgtgctctagcagaaaataactctgtacccatcaatcttattgccaacattccataccagtggtaggaaagatattctcattttttttattgaaccagacatttttataaaatactgattgactttgtacattatggatattatatatgaaattttgccttgtattctttcacttgaaaaaactccaaaattccacaatattttagtagtaacttcctattctttcttaatttgatggagaatggaaaataaattgcagttattgattcttgccatctttgttttcttaaagaaatctatgcatttt

SEQ ID NO: 19203 - DNA, 986 bp, Homo Sapiens
ctgctgtgtacccagagtttataatagaattcatcctaattctcttctttttggggttatttcttatgtcaggtctagtacctgccagttttcttcccactttcttctttagttaaaagctggtagcgtcaggtacagttttaccaggtacacaggcagtgctctggcaccctgctgtttccctcacttgccaccagaagccattttggtacaagcttcaacatccagctatagacagtctggtgtctttagctgtgggaaaggtgctggtgtgacttggatcactctgagactcactgccttcagtaggcctttgtcacaactgcaggtgagtagttcagaacatctgcttaacagccattcacactggacatcctttctgaatattgagcagccagtagaaagaccagctgaaacgattttgtggctttgacagtaaatcagaccaggctttataagcaaggtagatgttagtaaaaattaagaaaatatcttgttgctttaacactaagttagattttcttttgaatgtaacagaaatttgtgactcatacttaaccatctattttaattttttcgttagcacttaaggaaatcagaaatgcatttgatttatttaaattaactccagaagaaaaaaatgatgtttctgagaataatcggaaaagggaagaaataccactggattttaaaaccatagacgatcacaaaaccaaggaaaacaaacagtcacttaaagaaaggagaaacaccagagacgaaacggatacttgggcatacattgctgcagaagtgatcaggaggttttagacagcgtgtgccaagcagatgagaattcaggtgagtttggaatcattttgcagaatttttcaaggtagttgcaccatattatttactgtactcttctctgtatttctgatctcaacgatcaaaaatatggaatccaaagtttatttggatctctgaataataacattttaatatgg

SEQ ID NO: 19204 - DNA, 888 bp, Homo Sapiens
aaaccattactgtgactttattataatagttaacaatattttagtggtatacaatcatatcacaattactcaagctatatacaaacaggtatttatataagtctacatttaaaaaagaaaaagcaattaatgacctccccaaaatcacattatcatcaacaagatttttttctaaaagttacggccaatccaataacaaaaaaattcacagttattctgcagacattttaaagatgcaggaattgtattgcacattatataattataaaccataacaagcagttatatattttaatctagtttttcacaaaatttacattatcatgcaatacttcactgtacacagaatgatggaactagaacaggttaacttacaaacttttaattatagccacaaatttagaattattttaaagttatatttcaaattattatactaaaaaaacactccagtgtaataaaacagacacaatcataatttgttcacagatcaaattacttttttagtgttcttctttgtctttgcctttcttttccttttcatcctgtagtgcagtaccgagctttttgataagaactgacagaaccttgtccagtggatccatgactcctctttgaagccatttaggaatagtagtcctagcatgatgaaagcccaatttttgaagaatataatcaacacctactggatcaatctttcttccagtccaagaattaatctaagagtaggttctagatgccatgtattgcacataaaatctctccagtccacagtagtatagtgatgctatcttctctatctttatcaaaggaattgtcgtcatgtataataattggacttttttgtctggtcgagtaaataaatccgaggtggaaagatggcttttt

SEQ ID NO: 19205 - DNA, 1095 bp, Homo Sapiens
  misc_feature (81)..(91): n is a, c, g, or t
gcacgagggttagttatggtgtcttatgactagatttattatggtatattaaagtaacaataatattaatattaccttccnnnnnnnnnnngtttcaaaagagatctttctccagatgcttcagcctgtctggccttcttatcatatgtgcagcacatcatgtctcagcaacagtgtggtgaggtccttaggtgtcccaagaacaactcagggagcacgggagggtctgcagttgggaccccacaactatacagctatagggtaggaggcttccttttcattggtcctgaatgaatacaaatcgctcagaaagcattttggtggcacagaaaggggatgtatttgtgttgagatcttattttattttgtatttatttatcttctttgacttgcacagcactattgggggtgggggaagcagggtagtgggagacgaaggcagaagcaagagtcaaactcagaatgactgagttgaattcactgtctagtcagcaatgcctgcttctgagtttggcccagagagaaggtattgagtaagattttaataactgtaaaaagtaagctggataagtaaaatcatgatggatccaaagcacagtttcttcatctcctgataaagaaagtcaaatgcttgataaattcagagtcacagatgtgagcatagctatattcttttaaacgagaggtagagtgacctagcactaagcaaatgagctgaaatgtcggaaacagagtccatcagcttatttggccacacgatcccaaactagttttatcttgggaaatggccctgtcctcagcattcccttcttgtgctggtggggccagtgaagtcttgatcttatcagaaaaaggccacaccaagtgcgagttttcccaggctgactttccaggcccttatcaaatgaaacaacagaagctcttcacagttctgtgccccatggccactccacagacagacaataccaagcatcttagaactgtcataagatagggtcatgcctgaaatagatcttgaccatatgagagtcccagaaatcagcaaggcctggacaaatagaactaagagagaggcagaaggcaggaagctgcggg

SEQ ID NO: 19206 - DNA, 853 bp, Homo Sapiens
gcacgaggggccaagctgaagtctttctcagccaagatcgtgcagctcctgaaggagtggaccgaggccttcccctatgacttccaggatgagaaggccatggccgagctgaaagccatcacacaccgtgtcacccagtgtgatgaggagaatggcacagtgaagaaggccattgcccagatgacacagagcctgttgctgtccttggctgcccggagccagctccaggaactgcgagagaagctccggccaccggctgtagacaaggggcccatcctcaagaccaagccaccagccgcccagaaggacatcctgggcgtgtgctgcgaccccctggtgctggcccagcagctgactcacattgagctggacagggtcagcagcatttaccctgaggacttgatgcagatcgtcagccacatggactccttggacaaccacaggtgccgaggggacctgaccaagacctacagcctggaggcctatgacaactggttcaactgcctgagcatgctggtggccactgaggtgtgccgggtaagtgcccatggcagacatggtggggtggctgccatgcccacacccagtgagaccctgatcttgccccaggagttagatgatggaactttaagagtgaatgcacaaagtccctgttgcattgtcaggggccttggtggtcccccaaccccgacatacagcgattccttcaatgacaacagacaccccatccgtggagcaggaatagttccactgtattgtcacagtgtgtttgcactttctgaggttctagctagtacagattgtatattgatagtacatattgctttgttatgtctttgagatgaaaaggctt

SEQ ID NO: 19207 - DNA, 802 bp, Homo Sapiens
gcacgaggagcgggagttgcttatgggcagaactcacagtttggagatgaaaaaacatttagtgattcatcattgctggaaaatctccaaaataatcatccaactgcacctataatatgtgaatttcttacaatgatggcagtctgtcacacagcagtgccagagcgagaaggtgacaagattatttatcaagcagcatctccagatgagggagcattggtcagagcagccaagcaattgaattttgttttcactggaagaacacccgactcggtgattatagattcactggggcaggaagaaagatatgaattgctcaatgtcttggagtttaccagtgctaggaaaagaatgtcagtgattgttcgcactccatctggaaagttacgactctactgcaaaggagctgacactgtaatttatgatcgactggcagagacgtcaaaatacaaagaaattaccctaaaacatttagagcagtttgctacagaagggttaagaactttatgttttgctgtggctgagatttcagagagcgactttcaggagtggcgagcagtctatcagcgagcatctacatctgtgcagaacaggctactcaaactcgaagagagttatgagttgattgaaaagaatcttcagctacttggagcaacagccattgaggataaattacaagatcaagtgcctgaaaccatagaaacgctaatgaaagcagacatcaaaatctggatccttacaggggacaagcagaaactgccattacatcggacactccctgcaactgttgagaagaacatgg

SEQ ID NO: 19208 - DNA, 793 bp, Homo Sapiens
gcacgagggaaaaaccttacaaatgtgaagagtgtgggaaaggctttggtaggagcttgaatcttcgccatcatcagagggtccacacgggagagaaaccccatatatgtgaggagtgtggtaaggccttcagtctcccctcaaatcttcgagtccacctgggtgttcacaccagggaaaaactctttaaatgtgaagagtgtggtaaaggcttcagtcagagtgcacgtcttgaagcccatcagagagtccacactggagaaaaaccatacaaatgtgacatatgtgataaggacttccgtcaccgttcacgtcttacatatcatcagaaagtccatactggtaaaaagctttagaaatgagaaatgtgttaccaacttttgtctgaatgcacatcttcaagtttttggctagtccatgctggtggtaaaccctgtaaaactactgagagtggaagggggtttgttcacacttggaatctttctaacaaatccatcaagatgataacacagaaccatgaacaggaatagaactcgtatttaggggagaaatagggctggtggctctcttggtaagatctagttaatataaatgatcacctttcattgtgaatatatgcctgaagataatgtgtggaaggatatttgccatatgctaactggttttttggccagggagagttttgggttattatcccttttctttaattttcattttatacttacagtgatcattattttcataaaagctgtaaagctatgaaaaatgaataaaattactaaaaattttctgt

SEQ ID NO: 19209 - DNA, 380 bp, Homo Sapiens
gcacgaggagaggcctggtttgctttggtggcattgtaaaaagagtaagagaggtttggtttgtggtggtttgctttctttaccataagcaatcccttgccttaactcatcaccctttttcactatgacccttagaccctgagtattttcaaatatatgattgctgatagtagtgaccaaaactactttgttcctttcttaccactctctcctggggccgacacgttgggacagcacaccatagcataaagctaggggatgcatggaaatagcagcttgaaactaggaggtaacaagaaagcttctaggaagtagatgttccatatcttcaaaatgcctcctccaattttgtaagaatgctagctaggtattcctgggat

SEQ ID NO: 19210 - DNA, 932 bp, Homo Sapiens
tggagtcccagggatcacaggaagcatgggaccgcaaggcgccctgggaccacctggtgtccctggagcaaagggggaacgaggagagcggggtgacctgcagtctcaagccatggtgagatcagtggcgcgtcaagtatgcgaacagctcatccagagtcacatggccaggtacactgccatcctcaaccagattcccagccactcctcatccatccggactgtccaagggcctcctggggagcctgggaggccaggctcacctggagcccctggtgaacaaggacccccaggcacaccaggcttccccggaaatgcaggcgtgccagggaccccaggagaacgaggtctaactggtatcaaaggagaaaaaggaaatccaggcgttggaacccaaggtccaagaggcccccctggaccagcaggaccttcaggggagagtcggcctggcagccctgggccccctggctctcctggaccaagaggcccaccaggtcatctgggggttcctggaccccaaggtccttctggccagcctggatattgtgacccctcatcatgttctgcctatggtgtgagagctccccatccagatcagccagagttcacccctgtccaagatgagctggaagccatggaactgtgggggccctggagtctgatagcctcaggagaaatttgaagaccaactgcaagaactcttaaggaatcttgtttgagaaaatgttgttatgtggtttgtatgctacttttggggggcagggctcatttcagcagccctaaatctcctcctgggataatgttaatattattattattattacccaaaaatatatatttttaaaaggttcccttaatcctatgacatggtagcaatgatttccctttggtgtcctaatggcatgtcaaataatttggtttttccgagaaaa

SEQ ID NO: 19211 - DNA, 206 bp, Homo Sapiens
gcacgaggttttcatcaaagactcaggtacctattattgttccctggtgaaactgaggagaaaagttaatcaaccaggttactcccacagtttgcccgtgtgttatgtatcagttatacaggtatcccaccaagttcaagtcaaaagaaattcctaactttgtatatttctggagctataaaacccctgatttaagacaaaaaaaa

SEQ ID NO: 19212 - DNA, 1000 bp, Homo Sapiens
gcacgaggcgtgtgctcaaggagctgtttggtcatttgagcaagttgttgggctgtaagcagaagattattgatctactccctaaggtggaagtggccctcagtaatatcaaagaagctgacaatactgtcatgttcatgcagggaaaaaggcagaaagaaatatggcatctccttaaaattgcctgtacacagagttctgcccggtcccttgtaggatccagtctagaaggtgcagtaacccctcagacatcagcatggctgcccccgacttcagcagaacatgatcattctctgtcatgtgtggtaactcctcaagatggggagacttcagcacaaatgatagaagaaaatttgaactgccttggccatttaagcactattattcatgaggcaaatgaggaacagggcaatagtatgatgaatcttgattggagttggttaacagaatgagttgtcacttgttcactgtccccaaacctatggaagttgttgctatacatgttggaaatgtgtttttcccccatgaaaccattcttcagacatcagtcaatggaagaaatggctatgaacagaaactacatttctactatgatcagaagaacatgattttacaagtataacagttttgagtaattcaagcctctaaacagacaggaatttagaaaaagtcaatgtacttgtttgaatatttgttttaataccacagctatttagaagcatcatcacgacacatttgccttcagtcttggtaaaacattacttatttaactgattaaaaataccttctatgtattagtgtcaacttttaacttttgggcgtaagaccaaatgtagtttgtatacagagaagaaaacctcaagtaataggcattttaagtaaaagtctacctgtgtttttttcaaaaatggctgctcataagttctatttcttgaagaataaattctacccccttgtgttgcactgaacaggttctcttcctggcttcataaggagttgg

SEQ ID NO: 19213 - DNA, 945 bp, Homo Sapiens
gcacgaggctgagcccaattattgaagacagtcgtgaagccacacactcctctggcttctctggttcttctgcctcggttgcaagcacctcctccatcaaatgtcttcaaattcctgagaaactagaacttactaatgagacttcagaaaaccctactcagtcaccatggtgttcacagtatcgcagacagctactgaagtccctaccagagttaagtgcctctgcagagttgtgtatagaagacagaccaatgcctaagttggaaattgagaaggaaattgaattaggtaatgaggattactgcattaaacgagaatacctaatatgtgaagattacaagttattctgggtggcgccaagaaactctgcagaattaacagtaataaaggtatcttctcaacctgtcccatgggacttttatatcaacctcaagttaaaggaacgtttaaatgaagattttgatcatttttgcagctgttatcaatatcaagatggctgtattgtttggcaccaatatataaactgcttcacccttcaggatcttctccaacacagtgaatatattacccatgaaataacagtgttgattatttataaccttttgacaatagtggagatgctacacaaagcagaaatagtccatggtgacttgagtccaaggtgtctgattctcagaaacagaatccacgatccctatgattgtaacaagaacaatcaagctttgaagatagtggacttttcctacagtgttgaccttagggtgcagctggatgtttttaccctcagcggctttcggactgtacagatcctgggaaggacaaaagatcctggctaactgttcttctcctaccaggtagacctgtttggtatagcagatttagcaccatttactattgttcaaggaacacctacaggtcttctgggatgggtccttctggaaactt

SEQ ID NO: 19214 - DNA, 772 bp, Homo Sapiens
ccgggctgcaggaattcggcacgaggaactcctggagtcccctgggagctgccgctgcaggcccccgagccgctaggccccgccgccaggccaccgctgctgcggcagccatggcggaagttcatagacgtcagcatgctcgggttaaaggagaagcccccgcgaaatcctccacactccgagatgaggaggagctggggatggcgtcggccgaaacgctgaccgtgtttctgaagctgctggccgccggcttttacggcgtgagctccttcctgatcgtggtggtgaataagagcgtgctcaccaattacagatttccctcctcactatgtgttggacttggccagatggtggccacagtggcagttctctgggtgggaaaggcgctcagagtagtcaagtttcctgaccttgacagaaatgtacctcgaaagacgtttccactacctctactatattttgggaaccaaatcacgggactgttcagcacaaagaaactgaacttgccaatgtttacagttctgagaaggttctccatcctgtttacaatgtttgctgaaggagttttactcaagaagactttttcttggggtattaaaatgactgtatttgcaatgattattggagcctttgtagctgccagctctgacttggcatttgatctggaaggatatgcttttattctgataaacgatgtcctaacagcagcaaatggtgcatacgtaaaacaaaattagattcaaaaagctgtgaaaatatggactgctctatt

SEQ ID NO: 19215 - DNA, 1050 bp, Homo Sapiens
  misc_feature (840)..(848): n is a, c, g, or t
gcacgagggtttcttttagtaagtcacaatacatgctaattttcatttctagaatggtcactggcagttctcacttttaactataagaagtcacgtggaacttagtgatttttaacaaatactaaattcatcctcactttatgttgatcttccagcaacgtttatatatttagtaattttaaaaattcctatttgatacaattaaattttatataatgtgttttgcttgaataaaatgttacatttatactttgagaactctgaccaaatctttcatacagatacaggtaaagaaatatttttctaggttgtcggagctgcgtacctcccgctgcttctccttgtggtccagcaccacctgctggtcagtggcagaactgtcctgacttcgtgaacatggaactgctaagagggaaaactgcatctcagcattttcattttttctgaatattaagtgaaaagcaagttctatttttaagaaatagcttttgctgaggagttgtgaattcctgcacctgtgtttgatgttatttgtatgcaatggattgctggccctttgttcctaagcaagagaagaccaaagatgcttccccatgacctctccggtgaggatccgcaccccccggacttgctctctgatgaagggcatgtcgttcagtgccccagcagtcagaagcagtttttgtggaactaaaactaataatgttaccctcacaaaggaaatgttcttttactataagttattgctgattcttgaatgtctgttatataactgggtcggctatcaagaaggaaggttatatttcttatcacattttaagttgttaagcaaatgtgagnnnnnnnnnaaaaaatgaggctttcactgagatttgtgtgctattcataattttagaattactgcttagaacagctgcttgggtgtatttttctacacaggtctgtacttctgccactttctccttttaaaaaacaaaactatgcatattatgtattaaagttttcttggttttatatatcagagaataaaacctttttggactttggagt

SEQ ID NO: 19216 - DNA, 1293 bp, Homo Sapiens
gcacgaggcttttactttaattcttgcaatccaaatatagaattatatatttatctattattgcctttattctttaagcacttgagtttaatgattattcttacctgagaaaggaagaaatttaattctaccagtgatgaatacttgaaattaattgaactcataccaaaagatgtaatccagtttctcagtttgaaggagaacgtttgactcactttcattgttcatgctagctgaatataatcaagacttttgatttgatttgcttttattattcaatgcagatagagcctgataagttttagaacatttaaagaagattgaaatctcagtcagtaactaaatgataaaatgagattgattggcttatactaggtacatttatttttgaaagaattaatgtaaaataatagttatttttaaagcagctaatattacactgataatttgttgctaaatttagtgctgtccacatcataggtgcttaaatatgtactggttaactagaggggggtaggaaagcaagcggttttatcttgttcttacctttttgcaggaaaagtggctttaaaaaaatttatataataaaactattttggaaattcattcttttagaaagagaccttgagataaatattttttgactctggatatttctatagttctgaacacagattttaaacccactatcaaaatgaaaacaatataaagctatattagtgagtctccatgtagcagtttgtttttatagttactgtttcatgcttaaaacttcattcttactttcattaatgttacccttcactggtatagccactcactaaataagtatatttaaaacatcaaaattttgaactaaagtttgtgattctcttattcagcaatccttatcttatgctggctgcatgagttaattcaacatccagattaaatatcctgaagtaggttctatatatttcctcatacaacagacatggaatggaaatgccactagaaactgccctgctacttttaagtctgacctttgcaggaggtacactttgctgttctatgattgtattcacctacctaaaatacaaatgaagacagaacatatcatttactgcacgatgaatttttcatttattaaatgaaaaacgtttgctagacattttaaatattaagtattttgactacacggattaatttaaatgattctatcacgcattctgatatttaacaactctattaaaatatttatagaaaataaagcaattgatataattttgagcaattctatttttgtagaaaaaa

SEQ ID NO: 19217 - DNA, 498 bp, Homo Sapiens
gcacgaggcccttctcttcattcagttgtggacagcagtaattttttcaggacctttgcttcttagaggaaatacatttttccttatttatatttttaaaagatgtttctattacattatatatagcaagagatctattaaggatccagaaaatcttaacctgtagaggatatgagttcctcatcataagaattagtttccttgagggttctttagtatattctatttacacagtttatgcataagtaaactctgtggccgatgtacataaaaaaacctatcacttttatgctcattcatcctcctaattcagtgtctgggtcatgagatgtttggttcatagcttcaaaaactgttcaagaagactgatttcagttctctctatgttgatcttccagttgaatctggagtcttctgattgtggaaaggagtagcagatcacattatactgaaaattgtccttttcattgagaaataaaggttgactgagctacctaa

SEQ ID NO: 19218 - DNA, 927 bp, Homo Sapiens
gcacgaggcagaccatggtggattcgtatggggactgacatttgttactataaaaatcatttctcaagaagttcagttgctgcaggtgggcaaaagggaaaatcctactatacaattacatttactgtcaattttccacataaagatgatgtttgctactttgcttatcactatccatatacgtattcaactttacagatgcatcttcaaaaattggaatcagcacacaatcctcagcaaatctattttcggaaagatgtgttatgtgaaaccctgtctggaaacagctgccccttggtgactataacagcaatgccagagtctaattattatgaacatatctgccatttcagaaatcgcccttacgttttcttgtctgctcgggtacatcctggagaaactaatgcaagttgggttatgaaaggaacgttggaatatctcatgagcaataaccccactgctcagagcttacgagaatcttatatttttaaaattgtccctatgttaaatccagatggtgtcatcaatggaaatcatcaaagagacagtgtggcataccaatgataatgcaacttcatgtgatgttgtggaggatacgggatacaggacattgcctaagatactgagccatatcgccccagcattttgcatgagcagctgtagcttcgtagtggaaaaatctaaagaatccacagcacgtgttgtagttttggagggaaataggagtacaaagaagttataccatggagagtactttatgtggctgtgatcaggaaaaatacaaggggttacagattggtacccgagaactggaagagatgggagcaaaattttgtgttggtcttttacgtttgaaaagactgacctctcaatggaagtataatctgcttccagcctgcttgactttgaaaatgatttaaatgaatc

SEQ ID NO: 19219 - DNA, 1297 bp, Homo Sapiens
gcacgaggtgaatttagacatttaatcatgatctttacagaaaagaacatgttattcgtattttgctaatatcaactgcatggattaaagtagtccctccatacatggggaagtgtttggagcaaagagatgaacagtttgtctgaaacaaacacagagcactccatcaaaatttacctgatctttgtgattagaacagaacaattctatttgcatgtttctctatctgaatattctgtgacaaaaagttaagattcttgggcagaatatttaaattggtcagtcaggtagaagatacatgtgtgatatagaaaaataatgcctctcctgctgccatccgtttccctcatatattttggacaagatttatatggacaaaattaagtctttaaaatttaggcactttaaggagaactaataactttttccatgtatcaagattatgaggttaaaaataatgtggttttatatagcatagtggttttattttgttagttatttttaaaggagaagaaatgttactttttaactttatactcagttgcattatcataaaattttcatatatgcctagataatgggaaaaaaaagtcttgtgattgactttcgcaaaataaacaggatttactgagtagaggtttcagcccattccttggaatactaacaggtatttcatcagtcattgtaggttgggaagggtctctgttaatcctactctgctttagccagaatagcctagtattttatttctattttatatattgagatttcttctaacatttcctttgataaaaatcttctgctttttgaaaagtggtatgtatcatatttttatgtttctggtgtgtgaactttatggtaacttctactctagaatacgtacgtatgcacccacagacacacacagtttattgacacatctattatgtaatgctgtagacctgtccgtgtctgcttcataaggagtaacgactgacattagcatgtccagtgacaagtcacatccggtgtaaaaaaaagagatcagccagttaccttctccattgtcttagttctgtcacccatttcgtcaagtgacctctcatcttctataaactaatacaggaattctttccaaagcaatgtctaaaaactcttttttttaaagtaacagtttggtatgtttattgtagataaattatttttgaggccttcttttagctaagtttaaatttatattaggcaactatgattgagtgggttattcattgagtaattttccactataaagaattttattgacatttattaaaaataa

SEQ ID NO: 19220 - DNA, 860 bp, Homo Sapiens
  misc_feature (484)..(508): n is a, c, g, or t
aaacaggcaccaaagaatttaataattcaagagttttcatctctctacaactctaatcctgtatctagtccattgtaaactgatataaaggagcttgactagtagatagacattaatgaatacagatcatttcactttgtgatcagtgatattgagaggaaatcgcagaattaacttgaaaggactactgtggttgtatactggaagtatagatgacaatgtgagattgggagcgggaagatgatgggttagatgtggtgacagcaggagatacagacttgcctgttttcatccttgagggaggtttactactgccttctgagttggcttattgcagtgacagctgatggaaacatgtttggggtgtcaccagaccagtgatttaccctcagcctctgaagaccctagtatactgaaaataggacccttttcacctttctctgtggtacttgatcttcaacaaagaagataaacggtgtgttannnnnnnnnnnnnnnnnnnnnnnnnatgtgtgcaaagcttggggacaaatctgcttacctgctctggaagtgagagtctcctgcttgttattcttcacatttgactcatatttcttccatattttcctgaaacctgtagctaagtaaagtgtctaaaggaagaattgtttaataagaaaaacctaattaaataggactctctggaaatgcatgttattaagtatacacgcaataaggtaatcgatttttgaatgttctaagtttcatatctgtattagtccattctcccactgctttaaagaactatctaaactgggtaatttatgaataatagaggtttaatagactcagttccacaggcttaacaagaagcatga

SEQ ID NO: 19221 - DNA, 1366 bp, Homo Sapiens
  misc_feature (377)..(393): n is a, c, g, or t
gcacgaggctacactttcatccctgttttttatcttgtatatcatcaggaaattgtgatttaatcattaacattggtttttttgtgtgtgtggtaaaaatcaacactaggctcatggtacatatttttattctgtacatttgcttgtaactatcaatttgtaactctgtttatctactacatgtgtatatatacttagagcattttctctaacacattttaatgttagtattttttaaaaggtctgaccagtctagcaaattgtcagtccaacgtcattactttaaattaagaagcagtcttcttctggtaaaccttgttggtatttgtaaaataattttgaaggtcttaatttcttcctttgtaaaaggaaaaggnnnnnnnnnnnnnnnnnaggttggcatggaggcagaagttggtgattacttgatttacaacagattttttccagatcatacaaaaggccatacagtaagtatagaagtaggtatggggagggcttactaatatcaaataggcaaggccttagtgagtgggcaggataccacctgagagtggccagatctggggaggttactctgctctgggtgctctcattcatgaatcgacaaggatacattagattattttgaaacatttttttaagaagcagaattctttaataattccttcctagacattgaatatacttataaaattaaagacttggggaaggagacactgagagacttgccagtttggttcctcatgaacaaaagaggacagtttgataactaccagaatagaatatccctagttttaaaatagtgagaatctctgaagttcatcaacatcttaagatgcacttacttgaaagtttgagattctgtttatcatttgaaaacacattttgctttaattctttctttgacatgttgttttttcatatcaagaaatatatgaacaaaataataaccttttgaccctgaccttgctgggtgaattagctctgaaacactctctacaaccagtaatgcatttgtcccacatttcattctgatagaaaatgaacaccatagcaccaaacaaaaatccgaggcgttagataatgtctggattaaataatttaagactctctaggattttggttgtcattttttatttataacagactttaagtcactttctgttgcctcataggtcacattttagacaggtttgtgtctgttccttgcatctgaattcctgattgtaaagacacctatgaggtctcttagtttttgtcattcattttcttggtttatcacccctcccttctttttgttgtttttccctgactgttaagcagttcatctttgcttttgttaaatatttgacacagttagttt

SEQ ID NO: 19222 - DNA, 872 bp, Homo Sapiens
gcacgagggccggtggccctgggcccggagtctgcaggccgcgctcctgtcctgccgctgagggacccggttaccaacctgcatgacgctcagtttgcccatctgtcccagtggtaacacacagttctcgggagacgttccccattcccagaggagtagtgtgaaacgcgtgcgcctctagtcttaaacttggcgtttgtattagttgggtttcctggtgtctctttagcaagtgaagtttctggttccctccttcactgtgtgacctgcctagtcctcctgggtcgcatttacagaagtttatatgagacctagtttccagggaagaactcactgattccgcgagggagatggcttaatggatgatggtcgtcagccttaaggatacttcagtcttaactgtgtgttacaaagtttgaaagggagggttccctatgaataagaagcacacttgaaagaacagccatctggtctaacctctcactggtgcttcagaggaggaaaaaaggtcacagctatgtttccagtgtcctctgggtgtttccaagagcaacaagaaacgaataaatctctggctgcataaggggagtgaacacaaagtacatttgaccacaaaatgactctttaaaagtcagaactacggtagcatgaagccaaacgagggttccacagaagtctccaatcttcaaatcttcagtgtatgaaagcacagattcctgaaagaatggcctcaaatgaccaggagtaggagctctctatatccctgctcctgaaaaacaagctaactggagtctccatcacctgccaccagctatacacactaccaactacccaactgaactccatgactgattggcagctaatcatgcccc

SEQ ID NO: 19223 - DNA, 866 bp, Homo Sapiens
cccccgggctgcaggaattcggcacgaggaagcggttaggtgggcagaccccttacttgatggatcagttgggattacgattagggatgtggtactggaaagatgaaaccagaactcttgaattcagaaggtttgccgcagaagattctgtccagtggctcctgaaacatcaccctcattttacacctgcagcagaagtcaaggaaaaaggaaagaaaggcaaagcagttcactttgcagaaattgatggtccagcttcagacaggttgacagataaaagacttgctgcaaaagatgataagtcagctaaagctgtagagaaacgaggtcaacagggcaccattacactggatgatgttaaatttgttactttgcttttgctacaagatactgagatgcagcggatctgttcttttacaacatttatgaggaataagaatcttgataatttcctcatggcattattgtactacttatcccattacttggaaaaaaactcactggaaaagaaacccaaaagctatatggtggagaaaatatcagatacacagaaagactggaagttctttgagtccttttatactttctgtacatatgtggcttggattgtcttccgacgtcaacacttgacagagattgaagaagaagtagggagactctttcgtaccaatatgttcaacattcctcgcaggaggcgtgaagatgaggaatcaggaggggaaaagaaacgcatgacttttgttcagttcacgagaatgatggcaaaacgcccagcaattaaaaaagctatcaacatgcgttctccagtcatgtctactctgctgccatctctcagagaaaaagcctcaaaacgtcttttgagaaaa

SEQ ID NO: 19224 - DNA, 910 bp, Homo Sapiens
gcacgaggatttattcaagcttggcagtcactacctgaatttggcatcactcacttcattgcaaggttccaagggggcaaaaaagaagaacttattggaattgcatacaacagactgattcggatggatgccagcactggagatgcaattaaaacatggcgtttcagcaacatgaaacagtggaatgtcaactgggaaatcaaaatggtcaccgtagagtttgcagatgaagtacgattgtccttcatttgtactgaagtagattgcaaagtggttcatgaattcattggtggctacatatttctctcaacacgtgcaaaagaccaaaacgagagtttagatgaagagatgttctacaaacttaccagtggttgggtgtgaatagaaatactgtttaatgaaactccacggccataacaatatttaactttaaaagctgtttgttatatgctgcttaataaagtaagcttgaaatttatcattttatcatgaaaacttctttgccttaccagaccagttaatatgtgcactaaacaagcacgactattaatctatcatgttatgatataataaacttgaatttggcacacattccttagggccatgaattgaaaactgaaatagtgggcaaatcaggaacaaaccatcactgatttactgatttaagctagccaaactgtaagaaacaagccatctattttaaagctatccagggcttacctatatgaactctattatcatgtctaatgcatgtgatttaatgtatgttttaatttgatatcatgttttaaaatatcctacttctggtagccatttaattccctccccctacccccaaataaatcaggcatgcaggaggcctgatatttagtaatgtcattgtgtttcaactttgaagaaaatgctatta

SEQ ID NO: 19225 - DNA, 749 bp, Homo Sapiens
ccccacgcgtccgagcacaggctgaggctgtcagaatggacaccttttggttgttgggtttctgtcagtttctggggtgaagctgcgtgattgagaacgtagctcttggctgccatctcggggattattaaggactgtgaactctatccacaagccatggcaatatctgtcccaccgaatgctccctctaacactcttactcccgtgatgtgtgttaagggctccgatgatgctgaaaacagcacaggatgtgaaaaggcaggaacagttctgaagtcaaaggctgatgtcctgtttctctttccctctgtgaccgactcccttcccagtggtaacaagtacccacagcttggtttgaatttctgcacgctgttgtctgtgcactcgctcacacttacgcacacagcaggcatgtgggcgatgctgggtattttgtgtatgagtgggatgcacatacacacatctacatccatatcatgcccatgcatctgtaacttgcttttcccgtgtaagaacacttcttagagtttgttcaatgcatgtgtctgtgtgaatgattgaaggcatttctaacccattttaaagatggctacttaggaccatatggatgttgtactgatgtcatttgaccacgtccattgtttccatcttttgggctgttcttgtgtattttactttccatgtaacactgtgacattgagaattggtacctacaacagtctatttgctttacattaaatttgtaggct

SEQ ID NO: 19226 - DNA, 928 bp, Homo Sapiens
ccccgggctgcaggaattcggcacgaggataagattacaaagaataagcagcaatattgaagcatctacagtatgttaactacattttttaaatgtcgagtaaaacttcgtgaaaactgctcataaagactaaaagttgacctgttaaaacgttaatgtactaagatagttttaagatttttggttgtataacaaaataaaagtttacccaaaagtataagatacattttttggtaaaccatttaaaatacaaaatcctattttggaggcaataggataagcattgtcttagtgttttagaattatttttgaaacagagttaacaggataaggttacacttgtattagaattgtttttttctaaagttatgttacctgaaaaatcaaggagtgcacctgatttactgttgcttcatttatcccatccttcagagaccagcaaggttctgccaggccccaagcatctgagcatgatgattttgctgtgacaattctaagatcaaccaggttacttaagtccgctctgatgaaacccagtctctcaataccttcctatttctcaatagtctttaagccctaaatctgagtcagtaattctctaaaaatccttcccaaaaatcagtgtctagggactggttgatctagatgagttataaatggtatttgacttttcataagtagtggaaggtttcactaagtaaagatctgagtttcttggtatctgacgtttgtatacagatggtgtccatttgctcaaccagacaggagttaacttgtattaaattgttttttctaaagttatgttacctgagaaattaaggactgcacctggtttaatgttgcttcacttatcccaccctacagagaccagcaagttctgccaggctccgagcatccaagcatgattttgctgtgacaaatctaaatc

SEQ ID NO: 19227 - DNA, 937 bp, Homo Sapiens
gcacgagggtcatgctggaaaaaaaaccctataaattcagtgaatatagaagggctttcagctggagtgcagacatcactggaacttaaagaattcatatcagagagagatcctaaaggtgtaatgtatgtgggaagaccacatcttgttccacatcaggcaataattactaaagagaatccctgtcaatgtcaagagggggtgggcttcccctctcttaccaaacatgggagaatccatactagtgagaaaccacgtgaatgtaatgaatgtgggaacgctttgatcagaggatgcatattattcagcatcagacagccgacactggggaggagccttatcaatgcagtgagtgtggcaagccttcagttacatactgattctttaagaaaatcagataacttgtactggagagaaatcctacaagtgtggtaagtatggaaaaatcttcagttgtatctcttcctttactaagcatcaagaacacatactagagagaggccctatgaaagcaggaaatagaggaaggccttcagtcagggctcatcccttattaagcatcagaaaattcatacctgagaaaaacctgtgaatgtgggtaatgtgggagagccttcagccaaacctcattgctttataaaccccttagaactctccctactagctggaaactctggtgacgtgatgaatgtgggaagggctttggtggatgttccaccaaaacacgttagagaatttgtacattagagaatttgtgctagagcaactcttcaaatttagtgaaactgggaaaacccattagtagagttcaagcttcagtattcatctcaaagagaaaccttgggaacatgatgaatgtgaggaaagttcctttccaacttgagatgtataaaactagagctgaaaagaagctgagaatcaccttgtctggtgattt

SEQ ID NO: 19228 - DNA, 970 bp, Homo Sapiens
gcaagaggtgactatacctctttccctaacccttagtgtaccatagcttcttccaacctctctccaatccattacttttttctgagctaccctgtctcaaatctaactcaggcctttttgcaagaggaagtttaagccattgtttactcattaactcacttgacccttagaacaatcgtgggaggtgtttatttcggaaaggaagctaaagcacaggacagaaaaataaggtcatagcgtgaactagtaagtagcagaactgggaacataggactgttattttcaaacactctaaacttcactgcagttgcaaatttgcaaccaaaatggccgccttgaaagggtcttttgcagtaaaatctcagtgtccaacatcaaagacagttcttcagggcctccaattaactatacatcctgcccccagctgctcatctctgcacctctaacacgtacttcacagagtaggaaattgggctttctccttcaaaaagaaaagtagagaaggcctgagggcagtgtaattaaaatggagaagtagagaccacgaattacttggatgaattcataactggttggtctctgaggcagggattattatttttcctgtattttaagcttaaaagtagtgatttttgcattgttacaaaaaacaaaatagcaaaatatcatttgatacttgtattctgtttgcaatagctaccacttcctttagccccagcaaaaatcaataggtgtgtattctctacaagcccatgctgtgccagaatgccagtattgctaaatgtcatgcaaggatttagacacttttttaaaggaaactctgggagtgcctgttgtctggagagttgacattgtccaaagcaggccaacactggtatgggtatggagaacccacgtcctaactgtggctcaactgcagatgccttgaatttacctctctgggttggaagtgggaagacttcttttaaaa

SEQ ID NO: 19229 - DNA, 848 bp, Homo Sapiens
ctggacccagccacgcagaagctcatcactaacatcttcagcaaggagatgttcaagaacaccatggccctcatggacctggatgtgaagaagatgcccctgggaaagctgagcaagcaacagattgcacggggtttcgaggccttggaggcgctggaggaggccctgaaaggccccacggatggtggccaaagcctggaggagctgtcctcacacttttacaccgtcatcccgcacaacttcggccacagccagcccccgcccatcaattcccctgagcttctgcaggccaagaaggacatgctgctggtgctggcggacatcgagctggcccaggccctgcaggcagtctctgagcaggagaagacggtggaggaggtgccacaccccctggaccgagactaccagcttctcaagtgccagctgcagctgctagactctggagcacctgagtacaaggtgatacagacctacttagaacagactggcagcaaccacaggtgccctacacttcaacacatctggaaagtaaaccaagaaggggaggaagacagattccaggcccactccaaactgggtaatcggaagctgctgtggcatggcaccaacatggccgtggtggccgccatcctcactagtgggctccgcatcatgccacattctggtgggcgtgttggcaagggcatctactttgcctcagagaacagcaagtcagctggatatgttattggcatgaagtgtggggcccaccatgtcggctacatgttcctgggtgaggtggccctgggcagagagcaccatatcaacacggacaacccagcttgaagagcccacctcctggcttcgac

SEQ ID NO: 19230 - DNA, 415 bp, Homo Sapiens
gcacgaggcccattccctgagcctggagcagagccccctctcactgtgggcttgctcaaagccctgctggagcagactggggctcaaggatggctgtcgggcccagttctaagcccatatgaggacatcctatgggaccccagcactccacccccgactccacctcgggacctatgactacccttcaggcatcagaacactcagggcctggaggcttgcttgggactggaggcttgcttggacagttcctctgtgtcactgacacaggaaatcatttctaggacacagtgatcagggaagggtgcctgggacttggagggtcccatgtatggacctgtgtatgcaatactgttctgtcatctggagctatttttaagatgtgtgtgttaaatatatacatagtttaatataaaaa

SEQ ID NO: 19231 - DNA, 943 bp, Homo Sapiens
gcacgaggactagcagtagggagaacaagatgtcatttgtgttcagtgtaagctgagtaaacaggcccttcctagagtgtcctggaaatcacagcaacccattgaaaactgccctccccaccagaacgtgctacgttctttcttcatgcctatgtgtgctccattcctcatttctacttggctcaagaaaacatttctgcagtcaggtgagacttttacaaaagaggagaaaatcaatgcctccttgaacatgatgagatgtgagaacttacaatgaaaaaggcaataatgatagaaattatttcttaggtacagcaatagttgataggatgtgagggtgttaccttggggtgaagtggagaaggtcccaggtgaattggctctcatggaaatttggaattacgaaataaacgtcctgggggttacccagaatacagatttaaaagtttgcctgtagagcaaaataaaacagtcagttgtagtcattaatccttgaggcccaacgcagccgatgggttggtgtttgggaaattctgagatgggagtgagatctgatcggatcctgggaagatgtatacccagttagaacgtgtagggttctgggtccctggcaagtctaggtgggcgggtgacagggaaagcatgggcatttttgtattgctgtcacatgctaacagaggtttgtaattatcttttggacccaaattatagagacattcacgagttttctagccctcacagtaacagagctaagaattcagatgtcagggaagtctgtgaatcttgatggattttctgagaaacctgactcaatggcatatataagagggaagtaagacttttaagaaaagaaaaagttatgcctcattcctcatgtggcttccataagtatccttagaacttatttccttttaaaaatatttttaaattttaaaattgattt

SEQ ID NO: 19232 - DNA, 881 bp, Homo Sapiens
gaataccagaggaacttcctgtggaaaaagtcttatttgtcagagtcttgtaattcctccgtggggcgaaagtacccatgggctggacttagatcagatcaattaggcatcacgaaagagccaagttttatttcaaaaagaagagtcccttaccatgacccacagatttcaaaatctctggagtggaatggagctatctcagagagcaatgtggttgcatcaccagaaccagaagccccggaaacaccaaaatcacaagaagcagaacaaaaggatgttattcaagaaagagttcactcactagaagcttccagggttcccaaaagaaccagatctcactctgcagactccagagctgaaggggcttcagatgtggaaaataatgagggtgtaacaaaccatacaccagttaatgaaaatgtggaactggaacattctaccaaggttctttcagaaaatgtagataatgggttggatagacttctgcgtaagaaagctggattgactgttgttccttcatataatgccttgagaaattctgaatatcaaaggcagtttgtttggaagacttctaaagaaactgctccagcttttgcagccaatcaggttttccacaataaaagccagtttgttccaccattcaaaggtaactcagtcatccatgaaactgaatacaaaagaaatttcaagggtttatctccagtgaaagaaccaaaattaagaaatgatttgagagaaacagaaatcttgaacagtgtctcctgaaaggaagagtaataaaatagacgatcgtttaaaattggaagcagagatggaatttaaaagacttacaccagcctaaaaggaggcttactccttggaaacatcaaagcttgggaaag

SEQ ID NO: 19233 - DNA, 1005 bp, Homo Sapiens
gcacgaggaaacattatactccaccaatatggctttatcatccagcccagggatttcagctgtacagcttgtaaggacagttggccacaccactacaaaccacttaatcccagcattgtgcacaagcagtcctcagacacttcccatgaacaattcctgcctgacaaatgcagtgcacctcaataatgtcagtgttgtttctccagtcaatgtgcatatcaatacacggacttcagcaccatcgccaacagccttaaaacttgccacagttgctgccagtatggacagagtgccaaaggttactcccagcagtgccatcagcagcatagcaagagagaaccacgaaccagaaagattgggcttaaatggaatagcagagacaacagtagctatggaagtgacataacctaaaacacgtggctctgacctgtgctgatggtgtgcagtcattcatattccagctgaatgcaaaaggcaacactctgtggatcacagagtgtaacaatggacctaaatggactatagtatattggatgttaaatccatatatgatgtatattttgtaaaattgggaaaatcactaccttgtaaaatagtttatttgtatcatcaatattatttctgttacttgaatagtagatattcatcatcatgcttttgcacttgaatttgcaactgaatggattttaaaaaataattctttaatgggatcatgagcatgaaatgggatcctgcatcacttgttttaactatttattttgccatgtttacattttgtatcttgtaaaaataaatccaactttgtgtctaaaaagttaaagattcatagctaggaaatgaaattcttgtaatttttttctaaaggaactgtaaagttttcacttggttcatttgtttcacatttgactagatggactttttggtaaatactttagtggcatttcactgtcaaatatgaagttcaaggcaaaatagtattttctattactgtgcaggggaaaggga

SEQ ID NO: 19234 - DNA, 1594 bp, Homo Sapiens
gcacgagggaaaaaagtcacatggttttaccaggattgaaataaacagtcaatgtgacttttaacatgtgtttttttgaaataaagggcacatactcttcaattaaaaagttccttatagggactctggcaaatgctaacacagttgctttacaatgtttacaattcagacaatacgacttataatagaaaatcctcattcatttagcattgaaaagctggaagttgcttctttaatgttgaatagtatacagtggtattgagcatggactttctaaatgttttatatatacatataaaaatatattggtgtctcacacccagaaagatgttatattgtagatattattaggaaaacagtgtttctcaggaacgttgtaaattttaaatgatatatgtacttcccgtcctcccacctccactctgtgctctaatgtgagactgcttcagcagtgttgctaagttaatggaaaactttttctaatcaagtcaggtgaatgtgtattctgctaaataatgttagccatttacatgaattgtatggtcattaaatggaatcagtgattcctctttaatttccagaggggaaatgaattatggaaatcagtcagcattctgatcattaaattttatactttaattttgccgttcagcattctaaatatccaatgtgaaagtcacatgataatttgttttgcattgcgtgcactgtacaaacacttacaacttgtcatttaaaatgttttctcgggaaatgaatgctagtcagaaagtaatagattgtattattcatagttttaaaattatgacaatgtcatatttactacaagctaaataatcgtgtttatttttgtgcagttgccctttgatagttcctggttttaaaacctattaagtgtataatcttacaaatagtcatctacaaaatttatggagaaagtgcccagcccattcacatcacatggaccaggaattcttttgtaaatgacttaaggtaacatcatgcagttcagtgcctaataaatgctttttaatgatgagcatttctataatgactcgtaagataccatagtctgatttttctcacattaaaataactgaagtcacttgtgtaacgtagttatactttgctgcattttaattaaccttcaacagctattaaagtggaatgtaagttaaattttgaaggaaaggaaataaatgttttccatatttcgtcttgatttactttctgtatgagaacagctgtgtttttgataggtttatggtttgcatgagttcatatttaaagtgatccaggccaatgcatggctattgctgtaaatcttgatgtttatttctgccttgtaaagttctatcacggcctacctggaatttaaaattcagtagacaaattaattggtcctctgcacaacttttttaataagtagattattttacaaagaaatttgaacaaatttattgaatcttttgtttagcttgcctctaagaacttttctaataaagctctcaaaacttctcagcaaataaatctcccttaagtaggaaaactagatttcatattttgcttacttttgaattaacagcaactttcc

SEQ ID NO: 19235 - DNA, 673 bp, Homo Sapiens
gcacgaggtaggaatgaaattaattttgtatctactgataacagaatctgggtcacatgaaaaaaaatcattttatccgtcttttaagtatatgtttaaaataataatttatgtgtctgcatattgcagaacagctctgagagcaacagtttcccattaactctttctgaccaatagtgctggcaccgttgcttcctctttgggaagaggaaagggtgtgtgaacatggctaacaatcttcaaatacccaaattgtgatagcataaataaagtatttattttatgcctcagtatattattatttaattttttaggtaatgcctatctcttggtctattaaggaaagaagcaatcagtagagaattcaggatagttttgtttaaattcttgcagattacatgtttttacagtggcctgctattgaggaaaggtattcttctatacaacttgttttaacctttgagaacattgacagaaattatgcaatggtttgttgagatacggacttgatggtgctgtttaatcagtttgcttccaaagtggcctactcaagaggccctaagactggtagaaattaaaaggatttcaaaaactttctattcctttcttaaacctaccagcaaactaggattgtgatagcaatgaatggtatgatgaagaaagtttgaccaaa

SEQ ID NO: 19236 - DNA, 960 bp, Homo Sapiens
gcacgaggccaaaagttagaagaaaacaatcacaaaactgaagcctaagagagaaactgtcctagttgtccagagataaaaatcatatagaccaattgaagcatgaacgtggattgtatttaagacataaacaaagacattgacagcaattcatggttcaagtattaagcagttcattctaccaagctgtcacaggttttcagagaattatctcaagtaaaacaaatgaaatttaattacaaacaataagaacaagttttggcagccatgataataggtcatatgttgtgtttggttcaattttttttccgtaaatgtctgcactgaggatttctttttggtttgccttttatgtaaattttttacgtagctatttttatacactgtaagctttgttctgggagttgctgttaatctgatgtataatgtaatgtttttatttcaattgtttatatggataatctgagcaggtacatttctgattctgattgctatcagcaatgccccaaactttctcataagcacctaaaacccaaaggtggcagcttgtgaagattggggacactcatattgccctaattaaaaactgtgatttttatcacaagggaggggaggccgagagtcagactgatagacaccataggagccgactctttgatatgccaccagcgaactctcagaaataaatcacagatgcatatagacacacatacataatggtactcccaaactgacaattttacctattctgaaaaatacataaaacagaatttggtagcacttacctctacagacacctgctaataaattattttctgtcaaaagaaaaacacagcatgtgtgagagacagtttggaaaaatcatggtcaacattcccattttcatagatcacaatgtaaatcactataatacaaattggtgttaaatcctttgggttatccactgccttaaattatacc

SEQ ID NO: 19237 - DNA, 972 bp, Homo Sapiens
  misc_feature (812)..(827): n is a, c, g, or t
attctaatttatattttattgcattatgaaaataatacatttggcaaagtaatctaggctccaagttgaaataaaagaaaatcctgaagagtgtactgatttttaaaatgtgaaatagtaagatgtattctaaccaatacatactagcactcttattaggccaaaacccagcaaacctaatttttataattccatatgaaattacaaggtgttttgcattcattcattttatgattagcacaaatcttgagaactgaccctcacttcatcaaaaccaatgttaaattcctgttcagaagacaatttgaaacactaccgaaaatttttaattcctttggttttgtaagttgcattttcatccttaccatgttacatttttttcataatcaaacattgtagcagctttagattctgcccaagtacctttaagtaaactagtatattacatttacattatttgaaaagttgattttacaaatgcaaaaatgcataaatacatgcctatctacaccagcaaaacaaaatactctgaatctcaatgctttaacaagccacaccttctggccgaggatttctgggatgcctttccaagccacagggcctggctggcaattccactactccaaaacacacgtctgaaaggtgtagttacaataaaccctaagcaggttaaatttatctaataatcaacatttaaaatatgacattttcactacttctgctacatttttcagaactgaaaatatatttttcaaaaatgtacaaggatattttcactttttaaaagggaaaagtgctagaaacataatacnnnnnnnnnnnnnnnnctcactttcctcatcaccatcttcaaattttttttacatgttgggttatagtctagagaacaggtaagcaatctgctcaaggtcagaaacaaaatatctttaatcactgaggtctccattcttcatttagatcttttcctcgtgc

SEQ ID NO: 19238 - DNA, 732 bp, Homo Sapiens
gcacgaggccggaacccaccagtgccctggacggcggccccagcaactttggagctggccgcagtgtaccagggtctctctgtgtctccagagccctgtctgtcgctgggagctccatctctcctgccccacccatcatgccagagactgcagcctcagacccccgggaggtgctggagccacagtgcagaggtggtgcccaactcagaggaccagggaccgggcgccgccttccagctcagtgaagcaagccctccccagagctcaggcctgcggttcagtggctgccctgaactttggcaagaagatctggagggggcccgcctgggcatcttctactaaatggcctcggcttccctctttccatccaggaatcagtcctgtagcttgggtgcctccttatttgttaattagtggcttttcatgttctcctttagccaaggctccctttttccaagtgatgtctttcagggaagcagtgtttgaaatagatagcgggtaccttccctggatggagtcagggcgggggcactgtcctccactgctagacacccccagaatgcctggcgctctgcagagcacagtctgagctgctctaagaaggggtctcctttaccctaaaggcagctgggcagggacaggtgggagaatgggtgtaggagcaggccccaggctctgcttcttggtgacagttggccagagccctgtatgctttgatttttgtacttaaaa

SEQ ID NO: 19239 - DNA, 885 bp, Homo Sapiens
gcacgaggcagcagtgagggtcagtgggcctgtgagttaagaagaaggtggcacagagcgagggtctctggatcctgactgtttgacttttccatgattaggataagtagccagggcttggctagttggagagttactcgaacctcaggtgacagttgtaaggcagcacatagtgaaaaagagtcctagcctgggaaagtccaaaaccttaggtctggtttcagttcactcacctatctctgtgacatagcaaagtctgttaatttctctaattttctgattagtagtatagttgcaggaatgaaataaaaatggtcctgattactcagagattcatttactgattactctttttgtgacctgaataaagagtacaacatctctcaaaaggtaacaatatgatgtttcaggaaattagagaagttaagagactttgctgtatttactatacagatagttgactgacagctgagcccggacccaagattcatttataaaatgaaggagttgagaagtacatactctgaggtttatcctaaataaactaaagtctcttctttccgccagctacctcttgtgtttaagaattaaaggaagatgagctaggaatcaagaaatacgcagaactgattcctgtcactggcgccaccctgccacttgcccagagctgtggtataaatttttttaataggctgaaataaaaatatgaatagcattttggtgttaagcattaaattgataaaggctatgagatacacctgctctcaccatgttaattttttattattggtattaataaattattacttactaacatattaacaagaattgcattgagaaacaaagcatccacaggcccaatcttctgaatttcaatgtttatat

SEQ ID NO: 19240 - DNA, 900 bp, Homo Sapiens
gcacgaggcaccttaattgtgtatgatatgataaatgtttagcagtaaagctatcttaagatttaatggaaaagtttaatttgaagatgtaacaaaaattctgaccacagttgattctgaatttttaaggctttcctaataggctgatcacagagaataatccattttgaaggtataaaactgcactgtatgtctgtcacttgtagctgaactgattcacattttgacaaaagagagaaaatacaaaaatgagttttgcaaatgtaataactttttctgcatatagaactaaataattgaaaaatatgggctatagttctcaaaggtagatagtaaaatcactggccttttccagctgtatgtttttccactgtgcgtgtacacacacactggaaaataattaggctgatcttgcaggtcttcattgttagagattctgaagtatttactgtcaattcataggtttcagtttatttaggaaattagtgtttgacagctttttttaaattatttcactgaagctgagattattagtgatacaaagttaaaatttcaatatttaatttctctatatattattaatattaaattgttttttacttataaattcatgttctcatctgatttaatattaaatttgtataggtgggcgtttcttaccattttgcacaagtttttgtttttctgaaatacttaattgtgcacgttgtaaaaaagattagtgcattttcatttaaaggatgctttgctccttaaattgttcgacagaaatgactttttagggaaagtagttttttttggagctactaacttgtatttattattgtacatgcataaccagggtggtgagggcactaatcttggtagaaacacttacttgaggttttatttgaactttcc

SEQ ID NO: 19241 - DNA, 612 bp, Homo Sapiens
gcacgagggaaaagggtatataattttagaatacctgaaggcttcttggcttttccactttccttattcctcctcttcctgccactctttttgtcccttctgtctttcctgctcatccttatttgggtattagaggtgtcagttgaggagggactttagctgaggttaagccttcttttgggatttgcattgtaattgagggccctggaagatctctgagactcaaaatcaggtgaagctaggaagatggagctttaaggagcatggctagtgctctgagtaggaccgtaaccgcctccgtgcgtggcatatggtccctgcatgctgttcactctgtatagtacttagtattcgctgaggctaagaggcctcaggtgcctgggcttctgcccttggactcctggatatccagcctagtgctaattgaatgctaagcagtggtaattcaaaatgagagggtcccctgcctctagagtcatcatctaattggggacaggcagacctagataagaaaagcagagaactactttggaaaacagtttatctgctgtaattgaacattcagctaccctataacccagttaatccaatactggggataaatcctagaga

SEQ ID NO: 19242 - DNA, 1588 bp, Homo Sapiens
gatagcttcagcttcagcttgtgatcatgccaatccacagctttcaaatccaagtccgtttcagacacttgggctggatttagtattggaatgtgtcgctaggtaccaacccaagcagcgttcaatgtttacctttgtgtgtggacagttatttagaaggaaagaattttcttcccactttaagaatgtgcatggtgacattcatgctggactcaatggctggatggaacagaggtgccctttagcttactatggttgtacctattctcagcgtagattttgtccatcaatacaaggagcaaagattatacatgaccgccatttgaggtcatttggagttcagccatgtgtatctacagtattagtggagcctgctagaaactgtgtgttgggattacataatgaccatctaagtagtcttccttttgaggtcctgcagcatattgcaggctttctcgatggcttcagcttatgtcagctctcatgtgtatccaagttaatgagggatgtgtgtggcagcctgcttcagtctcgtggcatggtcatactgcagtgggggaaaaggaagtatccagaaggaaattcatcatggcagataaaagaaaaggtatggcgatttagtactgcattttgttctgttaatgaatggaaatttgctgacatcctaagcatggcagaccacttgaagaaatgcagttacaatgttgtcgagaaacgggaggaagcaatccctttgccatgtatgtgtgtgacacgagaactcactaaagaaggacgttcactacgctcagttttaaaacctgtactttaaaagttgtaatattactagcacatatatgcaagcacctagtataatttctttgtaatatgtgaaactttattaatgtattaaatattacaactagctaaatttattgtcactgtgtatataatgttttgaagtgacatctatttttataaagtactgtttagttggaaaaagttgccttaatgtttgaaatgtgtgaaatttttggaacttgctggacagggtgatttaatttttagctacataattttaagaattagtattttcagtggtgtgcatattttggttcttaaatttttgcttcttaaactaaaaaaatcctgaccaatttatttgttgttttctgtgggttgcgacccatgcaatcaaaaagcaaaattttgattgagattttttacagcataggtttttcatataaaaatattctgaatttgttaagcactgccataatatcattataatgtttttgtcttttagtgcttccctatacaattgttaatgcacaaatgatctctaatatatacttacatacgtaaaatcataaagtttggtaatgcagtttatcgttttaaaaataatccacaaagatgtttttatctcacatacttacaactcaacacacagagtgaccatgtgcagctttcttttttggtagatgccacatccgaagactcatcgcagtgtgttatatgacaggacaaagcaaaaacaaacaaaaagcaagcctgtgaatataatttaatttgaactgctcctggtattatatatttgctagttatc

SEQ ID NO: 19243 - DNA, 913 bp, Homo Sapiens
gcacgaggattttcctgagagaccaagacctggtctcctcggttcaattggagaaggaagatacttcaaaaaagaaccaaacttgttttctcatgatgcagttgtgagagaaatgcctacaggggtttcaagtcaagcagaatcctactatccctcacctgggcccatctcaagtggattgtcacatcatgcctcaatggcacctctgccttcttcaagctggtcatcagtggcccaccccaccccacgctcaggcaatacaaacccactgagtagtttttcaacaaggacacttccttctaattcgcaaggtatcccaccattcctgagaatacctgttgggaatgatttaaatgcttctaatgcttgcatttacaacaatgccgatgacatagtcggaatggaagcgtcatccatgccatcagcagatttatatggtatttctgatcccaacatgctgtctaattgttctgtgaatatgatgacaaccagcagtgacagcatgggagagactgataatccaagacttctgagcatgaatcttgaaaacccctcatgtaattcagtgttagacccaagagacttgagacagctccatcagatgtcctcttccagtatgtcagcaggcgccaattccaatactactgtttttgtttcacaatcagatgcatttgagggatctgacttcagttgtgcagataacagcatgataaatgagtcgggaccatcaaacagtactaatccaaacagtcatggttttgttcaagatagtcagtattcaggtattggcagtatgcaaaatgagcaattgagtgactcctttccatatgaattttttcaagtataacttgcaagatttaaatccttttaaatcttgataccacctatatagatgcagcattttgtatttgtc

SEQ ID NO: 19244 - DNA, 830 bp, Homo Sapiens
gcacgaggttacagattattggttacacttcaatttacagggcataaacaatgattatctattactctgaactttatgattacatgttcttcagattacatgggattgtagttgggagttaccatgtaactcaaacataattaacatgtaattagtttacagattgtagggcatcacttcaattcaccaagcatgtagttctagcgcactagcatggcgccagccatgtacttacaatgtagttacagagtaattacatggtgatttttgcaatgtaaaataaagtgtttctgattattttctatgtaaaggaaccctctcctttccccttctggtccctgcgctttggtataatatatatacttctccatacacagacctctgcagaatgcaaaataaaacttgcagtgaatgaatttagcattttatgagagtgctgttggaaagacttgataattcaccccttttgttttgaagagttgaatcttctgttaaaaggtgatttaaaacttgaatgtgatgaattgtggcaagttaacttcaagttatgtgcaatacttatttcaaacttttgaaagatctttgcagtgtaattctttgtttttaattgcagacatttaaaaatgtcattttctactgttaagagtaatcctctttcttgctggtgtttctaaagaaaagaatcagaaatcaatctttctactaatgtaaatttgagattatttttaaaaatggaataaaagaggttttggtcatttgctttattttattattttaaagctactgtgattgatagcattgtaagaatcgggacaatattgtattcactg

SEQ ID NO: 19245 - DNA, 741 bp, Homo Sapiens
gcacgaggctccttcccagcaccgctgttccccccgcagaccccgcttgttcagcagcagaatggctcttccttcggggacttaggatcagccaagttggggcagaggccactgagccagccagctgggatctccaccaaccccttcatgactggaccctcatcaagcccattcgcctccaaacctccaaccaccaaccccttcttgtagcactgtgtttttggggggcctcttccctgccttctggggcccctctgctccctagagctctggtgaccacttgcctgtgggcatttctatgggccttggggatggtggaggtgctaatgctttgcttggggcctacaggtgaaaggtggctgccctcagattccacaaagcctctctcccctccctcgtcccacccccacccaggcaggaagcccaggaggagtgcgggcagggcctgacctggaggagtgatggttgagggggagggatttttttcaaatgatcagtcccctgtggaacagctcttccctgggcctagctcgccagcgctgtgctcctcatggacgggagcgcagtggggaaggtaggggaaagatgaggcacagtgttgatggggcagtgaccagacagtcctgagacccagaagcccaggtggcccaagtgctcttggtggcccagcttggccagcacacactttcctcctgcagcacccctgctgaaagggtcccccattgtttgcttcccagcgcc

SEQ ID NO: 19246 - DNA, 783 bp, Homo Sapiens
gcacgagggctggatgtatacatctaccaagaagtaagtaagaatagactgtttttgggctgtgataataaagacaactgttatatgaattattctttgtttcagataattcttgctaatcacttcaatgaaggaggagcagcccagctgcagtttgatatgactcggaatcttttccctttgttttctcactattgcaagagaccagaaaattattttaaacatataaaagaagcctgtattgttttgaatttgaacgtcggttctgcactactgctgaaagatgtactgcagtcagcttcagggcagcttcctgccacagcagcattaaatgaagttggaatttacaaactggctcaacaagatgttgagattctacttaatttgaggacaaattggcctaatactggaaaataatgtctttcagaaaaaggtttctttggtttttgtttctaagaaagaggaagccaattggatttcaagttatatgatgaaattctgaattaatgaaactggaaaactttatagaattacttattatcttggatttatggtgttattaaaatgctgaccatatttccttcatcctcttgttcctaaggaaacaaaaacagaaaacgaaacaatgaaaactcaattctatttacaagtataaatgctgagtatgtctgttgaagacgagcagagatattaaattataaccaactttcaatttcctgtgctaattaagggaaattctgttgtggataatcaaacatagccaataaatttttttaaaactcc

SEQ ID NO: 19247 - DNA, 921 bp, Homo Sapiens
gcacgaggtgaaaattccttctggttcagcatcttggagttcagcttggaagaacattttacgtatggaagaatttgcttctccaaacctctcttttggccattgtgtgtcctgaaggatgggacaacttgtgctgtagaagcactgcttgcctgagtttgcttcaggcattttaaatttaacttgagggatcatgtgtttggcatgatgaggaccactgaagacttccacaagcctagtgccacattaaactctaacacggccaccaagggaaggtacatttatctggaggcattcctggagggaggagctccctggggttttactctaaagggtggcctggagcacggagaaccattaatcatctctaaggtcgaagaagggggcaaagcagacaccctgagctccaaactgcaggctggggatgaggttgtgcacatcaatgaggtgactctgagcagctccagaaaggaggcagtttccctggtgaaaggatcctacaagaccctcaggctggtagtgcgcagttgaactttcaaaggaaaaggaggctgcctttacatctgacacatgcttatagatggggattatcaacacgcctccagagacatggatggacattcctcccctaccttgcagagatccgggtagaagcctctttgcgctggattaatctggctttgtatttcgtagtgccgtcactttcctgagaagtcttacctttataccttggcacacgtcatcgtcctgagattctgtttcctttgatttattgatgccagagtgactaaagacatttcatttattaactttctttttttctatgtgatctctatactttaaaaaaactggggtgtcttcttggaacataataggaaggaatgtctgtttcatgaataaatcatttgtgtagtcaaatgt

SEQ ID NO: 19248 - DNA, 770 bp, Homo Sapiens
ggaaagcctggggtctttctggtctggagaactaaaagatgggatctgggctaaccacagcttccagaaagtgaaggagacgtctcagaagggataaacgaggacctggagaaagaggtccccagacttacttagtagatgaagtcagcgaaagtaattaacccctgaactctagatacagaacatatcaaagataaagccagatactagttaaaacagtaaggatagatttaaatcagtaacatactcttgaaataagaagagtccagtatgaactgaactcaattttgatttgtattgaggtgactgggtgtcttaaagggagaatgagggaatagaggaggataagtgggggcttagagtcagggatataaacaggaaagggaattggttgatgtgaaacccatttagatttgttaactggctctaatgccaaggtaggctcttaccctcccacagagactgggactctaccttcaagtgttggttggaagaaacagtaaactcagcaaccttgagttttctcaggagttgactttcaggaggaggatagtcaacctatggatgtggctttgagctgttagaaactgctagtgttttcttcagatctttacaggcaaaggtttatttagacgtagaaagggctcagaagaacctggctagaacttcatcaaagagaatctttgtgaaaaagacaagcagtttgcagtttaccataataaaattaaattgtgatttgaacagacatatttagagagactaaaaaaagg

SEQ ID NO: 19249 - DNA, 268 bp, Homo Sapiens
ccccacgcgtccggacagaattttcttgatgttgtttgatctaactttgcactctttgataataatgttttagataatgtgcgtaatccaaattggtattgtagcctctgttaacacagacagtatatgttttaaactttgatgtaaacctttttagacccaaacttgtggaagtatcatgtgttaagttctctgtctctgtttctttgttcatttattactaaaatgaacttgttattaaagtatatgcaaatatgaaacctcgtgc

SEQ ID NO: 19250 - DNA, 961 bp, Homo Sapiens
gcacgaggtgtctattagataggcaataagaactgcagtgtagctgagtaacatcttttagctgactataaatcactttgtttttaaacaagaaaagctgtgctcttttatgtgatgccttttttatttattcaggctatacctacaatatgtgaatcaaactgtttaatgaatcctgggacatactgatgactataaactggcctctctgagtcatagaaaaatggccttatttctccagaagtgagtaaaccacacttccaggctatctgaactcctgaagccctaaaaataaaaagcacagttgtaactacctgaaatatgaagatccagtttcatacaaacatttgtatgacgtgaatagttgatggcatttttttgtcatgaaaaaaataatgtaaatcacagacttttgccaaagctcttattttttttcctaaatctctccagaaaaaaaatgcaagtgactaaattcaattattgactaatttccactttttatccatgacttctccaaatcaaaccacagtatatgttgtaacaatatctatgaccactgttagcccattatattcattccaattagaagaaatgtgaatactatattccgtgttttgagtgacaagtttcgaaaaataaaaacactgtatttttaaaagggaaatgcacttaaatgaaaacagttattacaaaagttaagatttaaaaagaaaaagcaagagtttttattatgatgtaataccagtagaatatttaaaaggcacaccacatctgaataatcaatgtaaatattttctttcaaagttgtaagttttcatatcatgtgctgtaaagttttcctaaatgaggctttaacgtaaacactggtgacataaaccattcattgctacgttgcttattgtgtttttatgctgttttatacttttttatgagttatgatagcagcaattaagttgtttgt

SEQ ID NO: 19251 - DNA, 739 bp, Homo Sapiens
  misc_feature (377)..(425): n is a, c, g, or t
gcacgaggatccttccatccagttctctgaatctttaatgaaatcatttgccagagcgaggtaatcatctgcatttggctactgcaaagctgtccgttgtattccttgctcacttgctactagcaggcgacttacgaaataatgatgttggcaccagttccccctggatgggctatagccagaacatttacttcaactctaccttagtagatacaagtagagaatatggagaggatcattacattgaaaagtaaatgttttattagttcattgcctgcacttactgatcggaagagagaaagaacagtttcagtattgagatggctcaggagaggctctttgatttttaaagttttggggtggggggttgtgtgtgnnnnnnnnnnnnnnnnnnnnnnnnnnnnnnnnnnnnnnnnnnnnnnnnnaaagagaatagtgttcacaaaatttgagctgctctttggcttttgctataagggaaacagagtggcctggctgatttgaataaatgtttctttcctctccaccatctcacattttgcttttaagtgaacactttttccccattgagcatcttgaacatactttttttccaaataaattactcatccttaaagtttactccactttgacaaaagatacgcccttctccctgcacataaagcaggttgtagaacgtggcattcttgggcaagtaggtagactttacccagtctctttccttttttgctgatgtgtg

SEQ ID NO: 19252 - DNA, 832 bp, Homo Sapiens
  misc_feature (720)..(728): n is a, c, g, or t
ccattttaattgatctgtgaaaaaacttaagaaaatcacaatttcagctaacagcaattgtgtcccaaagatgaaaatactataacctcaaatggtgcagatccagaactgggctggatgacatccctactgtgccatgtcctggggcatttggaagggactggacctctttcccctcatcaaaggaaacagcagtctttgcctctttctgttggttgtgcccaagggctacagtagctctgaaataacaagagctctgtaataacagtaataaatagctctgaaataacagtcctaagaactcctaaagtcctgagaacttttcttgtaatgcagctttttctcttcctgagaaacagtgtgttctaatgggattcccaggcagttcctacacctacggtgtgtgttccagcagggaggagttatgggctgggctgccttttcccatgggtcttcattcccaatggaaagttcactctgcttagtttggaattatttttctttcagttgttctggaacctttgctttttattgatttatacaatacaattggtgggagggtggacttgggatgggagtgggaaaagcatgtaagagctccttttgtgatggtccatctacccaaaagagatctgctttagtgaacgatactctttcatttttctaaattagatcaagttgttactgattttaaatgacttgtatgcaaatttgaaaacnnnnnnnnnaatgctgattgggacctacaaatatgatgggatctactgactcgctaattgggaaacagatgtctcttctgtctaatggaggctgggtgttaaaaacatccctt

SEQ ID NO: 19253 - DNA, 1010 bp, Homo Sapiens
atggaagtaaaggtctttcagtttattgcttaaaaaacaacagattaaagaaaacttttagttttagtctctgatgttacagattcaaatgattcctataggttatttaaagaattcattttatcattttataagcaccctaaatttataaagctaaccacaaaagttgcctggacattttttctatacctagtttcttgcaaattctacaatctgacttaagggataattaacggggaatacagggtattactaaacatgaaagtagtcctatccttaaaaagctgtagttgaatataccaaaataagtcagttgaaaaaatctgggattctagtagtaataccatatcacttaggaccatcaaaaaaatgggtacctttctccaaacgacaactgatgcctttctttatgtaagcttttcacgtgttttggcacatattccattgcatttcaataaaaatgttaatgccttatcagtaaataaaagaattctatataaaactattctcagtttcataattgcttcccatatatttccttggaaaatagtgaaattacatatgacaaggcaacccgccaaatttaagagattttgtagaaaaattcatttatgaccattaagttttggctgggggcccaaacatcaagttctcacttgtgatttttaaaatgcactcttaatccattttgaagtattaaaattcccttgggcacaccctatttaattgctgaactagggttgacaaattatatatttgttaaagtctagggatggtctgggaacagtccccacctaaaaaattatctctgacctcagaagaaattccggttttccagccattatagggttatggaaatctggccttaaatttctgcttggggacctattccggaacaaaacattgtacccaaacaagtgtaaggtattggcataacttttttaccaaggtggaaacacacagaaaattttttagacttttgagtccaaaaagattgaaagcaccaaaaa

SEQ ID NO: 19254 - DNA, 690 bp, Homo Sapiens
aaaaaaggcgtacagccaactcttagttatttagggtaagagaaaaaagaaaactgttaaacaatgaaatcaaagataataaatatgatagatttccagtatgaggcacttgcaaaacagtcatttaaactgatggttactgtaagtcagttggaagctggcatgtatgtaaattacttggtgttacaccatatccgaagaagttcctatgtgcagtgcagaattgcataaacagtatttaatcactgctacaaatcttccaaccaagaaggaaaactgctattcttcataaatctaatttttagtatatgcttcctttcatcttatacttttatcaatatttataaaagtcatttctataataaaagcagtctttcttgctcaaagtattaaggtgaacaattgaatagagtactgtggtcgggagactgatttgagactgcagagctgatgctgggtagagggtctggacttgtattcatgttctgtctcagggcagcccctggagcaggagatggcagaggcatttacagctgcagaaaacagggaggaatggaatctgaggtagccctggcctcaaaattcaggcctggctgtatcatttacagagatttttctggagggaaaagtctcatttctgaggaaggcaaggtggctaatcattattaattttttttaaacttttgggcc

SEQ ID NO: 19255 - DNA, 743 bp, Homo Sapiens
aagctaccttatttacagattctgcacaatatttcatcatacaaaactgttttcctaaattcaaagtaaactgcatatggttactacagaagcattataaaattttcattggcatttttaaaattggagcatttaaaacagatttgagaatgagaaaagaatgtctgactcaaaatgaaaacatactagcctctttcataaactcctagaatcttgacattattggttgctgtggttggtggataaatcaaatccacaaagtgggtaaaccctctaggtgcaagttataagctccctcaagcaagccttttatcagaaaagacttgagatattctctcctctgtctgcccttcattgataagcaatgaaatgaccccaaaactcagaaagcaaataacatttatcaatgatcttcatccctcccaaagcagaagtttccaaaaacatcccataaactgaagtaccccaatggctgtagaataaaatggtttctgtaacttgctgtgtttttaaacagttccgttttctagggggagctggtaacactgcagtatggcagcatcaggtcaaaagaccatcagaaataattccatgaactagttcattagcttattcatttttagggttcatttactcaatgatgggcaccacacaactctgaatttttgttcttattctggaactacaactaatctagctcatcacaatacagttttctctcacccctagaaaaactcagattt

SEQ ID NO: 19256 - DNA, 1349 bp, Homo Sapiens
gcacgaggatgaataaacaagtgtttgagcagtggctccttactgatctgagggatttggagcatcctcttttacccgatggcattttagaaattccaaaaggagaattaaatggattttatgctctgcagattaattccttggttgatgtaagtcagcctgcatactcccagatacagaagttgagaggaaagaatacaacaaatgatctagttacagctgaagcacaagtaaccccaaaaccttgggaagcaaagccttcacgaatgttgatgctgcagctaactgatggaatcgtacaaatacagggaatggaatatcagcctattccaattcttcatagtgatcttcctccaggtacaaaaattttgatttatggaaatatatctttccgtcttggtgttctcttattgaaaccagaaaacgtgaaagtgttaggaggagaagtagatgctcttttagaagaatatgcccaagaaaaagtacttgcaagattaataggggaacctgatcttgtagtttcagtcataccaaacaattctaacgaaaacattcccagagttacagatgttctagatcctgcattaggtccttctgatgaagaactcttggcaagtcttgatgaaaatgatgagcttacagcaaataatgacacttcctcagaacgatgtttcaccacaggtagttcctcaaataccattcccacaagacagtcaagttttgagccagaatttgttatttctccaagaccaaaagaggaaccatcaaacctatctatacatgtaatggatggagaattagatgacttttcactggaggaggccttgcttttagaagaaactgtccagaaagaacagatggaaactaaggaattgcaaccattgacttttaacagaaatgccgatcgaagtatagagagattttcacataatcctaatactacgaataacttttctttgacttgcaaaaatggaaacaataattggagtgaaaaaaatgtatctgaacaaatgactaatgaagacaaatcatttggttgtccatctgttagagaccaaaacaggagtattttttcagttcattgtaatgtacccttagcccatgattttacaaataaagaaaagaacttagagacagataataaaataaaacaaaccagcagttcagatagccattccttaaataataaaatattaaatagagaggtggtcaactatgtacagaaaaggagttcacaaatttctaatgaaaatgattgtaatttacagagttgttctttaagatcatcagagaatagcataatccttctattgccatggattgtattctccaccctttgtctatttgtc

SEQ ID NO: 19257 - DNA, 912 bp, Homo Sapiens
gcacgaggcactttattttcaaaattttatttttatggaattttcagcatgtttaaacttaatttttagaacaaaatccaaaagcttaaaatcagatatcttataatgtgtcacaattaagtatggagagttctgtcatttttgaggaaaatctttcataattcttaaaatgcagatatttacaacatttttaaatacagacatatacaacatggcatatttaaatgtacaaaatagttgaaattatattttatcacagaacattccaaaattcaaactaatttttaaaagtccacaaacactgatagcatttggaaaaaaatagcaacaagtttatcaataaccatgccatatgtttagtaactaacttacttatacacaacacataatttacatgtcaaatccacaaatctaaaagatatatgactaatctatttaactcacgctagaatctaaatactattttataattcataggtttaaatacatgtttcacagtaatctatgaaacaggaatataaactatgaaaacatatttaactgacttcttaagagacgaggaaatgtcaaaaatagcaaatcaggcattttttcccctgaaattaaagttcttatgaataccttcataaaccccaaaggaagaaaataaaaacaactcagatactacaacttaatttttaccttctcaaacttctgtttagagctcttggcataatcacagctcccctgggatatttttattttttcctgatttagtggaggcaactatttattccctcccttgttccaggaaaaatgtaaggtggcttagaagatagactcagaatatactagaaagtataattataggttaaataaaaaagaaaatagagaaagcagaatttgggggaatagcacatgaagccctcgtgc

SEQ ID NO: 19258 - DNA, 930 bp, Homo Sapiens
gcacgaggagagggtccagtaaatctttgttttgaatgaactgatggttttgaagcaggtgacctggaggactgcatgtagaacacagtgatgtcaaggagtaaaggagagaacagaagtgagattagcactaatcacctctaatgccttatttccagtaaagtttagagaagaggaaaagctacttggcttgctcctttgaaggttttgtttccctcttaacacagaaattaaaaggtagaggagagatgctgaatgatgctttttttcttcttaatcttggggggtcattatgattaagttattgaatccatatcaccgtatgacagcacatgatgaaagaaaatcagatgtttgtttcaatcaaagtgaaacaaaatgagaataactatttgggcaaaacacttttatcactgctaagatactactagaactgagcagagaaatactcagagagagccatggcatagtactaattaataatggggtaccatttagcaactggaatattctctgatgatgcctgtttaattactcataggtgctaagtgaatgttaaaaattacggtgctggttgaataggccgagtagaatttgtgttagggcacatcccatggagatcttttttactgcttaattttttggagttacctcagtaacttaacaggcaggaatatggttttaatggaaaggaaaccatttgcctttaacagcattagtcccgctaagagaaagtttttgcttgtctagtttattacaggtctttgactttgtcagtatatggcaaatttagtataaaagatgattaattatcaaggctgatgaaatataggcagctgaaaagaaaattcttagcaattcataccttaagggaaccctgaagggacaggacgcatagaaatccctggttttttaaaaagtaatttcaag

SEQ ID NO: 19259 - DNA, 540 bp, Homo Sapiens
cctgcggtacttgctaaatatacaaattaccatccttctcctatataaattcttattatggaggtctaagctgggagccaaataattgttttttaacaagggtccaggggatgtttatcttcaggtcaatttgggaactgttgctgtagtgaactgggatagctcagccgaattctttaccacttttctggtgacagacttcatctgctttggctacaagtgtggagacataaccaaggattggccagtcctggcactccattgccctagagcttgagactggttcacgggcagacatgtggcccacactgaccaatcacaatccttctctaagacatcatacatggaagccatcagagaaacattttctttctttgtgctgggatttggtttgacagtggtaccccagcatggagtattggcctgccactgctggcagtcaacttctctgactacatcgaggaaggtcatttgcagtaggaagagataataaaccagaaacggagtagaatccagaggagagagagggaaaccctactc

SEQ ID NO: 19260 - DNA, 937 bp, Homo Sapiens
ccacgcgtccgcgctttccctgggctctgaaggccagggggcttggatgtgagtctagtgctcctggtccccaaagtcacaaccccttctatcccagcatcccagacttctccgggcggggacagagttggacgtgcatggctgtgtcctgcaatcccctcgccacgaccgcccgggacggagtggaagcgggtccgtgcccccgttcctcgcgccagcctcggcggtggcaagcgctgtcccccagcagaggtgtccctggatacaggatagcaaaacctgatctcataaaacctaggtcacaaaggacagccctgcaaaacagaccctatttggatcaagtgagccagttcctggaacctgaataatgactcctgaatcaagggatactacagatttgtctccagggggtacccaggagatggaaggcatcgtgatagtgaaggtggaggaggaagatgaagaagaccattttcaaaaggaaagaaacaaagtagagtcatcgccacaagttctcagtcgctctacaactatgaatgagagagccttattgtcatcgtatttagttgcatatagagtggcaaaagagaaaatggctcacacagcggctgaaaaaattatccttccagcatgtatggacatggtacggacaatttttgatgacaaatcagctgataaactaagaactatacctcttagtgataatacatatctcgtcgaatctgtacgattgcaaaacatttggaagcaatgcttattacacggctgcagtccggtatagactttgcaatccaactcgatgagagcactgatattgcaagttgtcccacactcttggtttatgtcagatatgtgtggcaagatgattttgtagaggatctcttatgttgtttaaatttaaattcccatataactggaattagatttatttactgaa

SEQ ID NO: 19261 - DNA, 914 bp, Homo Sapiens
gcacgaggccttacagtgccccctggaaacccacttggcctgcataccgcctccctgtcgtcttgccccagtctaccctcaatttagccaagccagagtggccaagagtgtttatcccaacccttccatttaacaggatttcactcacatttctggaactagctatttttcagaagacaataatcagggcttaattagaacaggctgtatttcctcccagcaaacagttgtggccacactaaaaacaatcatagcattttacccctggattatagcacatctcatgttttatcatttggatggagtaatttaaaatgaattaaattccagagaacaatggaagcattgcctggcagatgtcacaacagaataaccacttgtttggagcctggcacagtcctccagcctgatcaaaaattattctgcatagttttcagtgtgctttctgggagctatgtacttcttcaatttggaaacttttctctctcatttatagtgaaaatacttggaagttactttaagaaaaccagtgtggcctttttccctctagctttaaaagggccgcttttgctggaatgctctaggttatagataaacaattaggtataatagcaaaaatgaaaattggaagaatgcaaaatggatcagaatcatgccttccaataaaggcctttacacatgttttatcaatatgattatcaaatcacagcatatacagaaaagacttggacttattgtatgtttttattttatggctctcggcctaagcacttctttctaaatgtatcggagaaaaaatcaaatggactacaagcacgtgtttgctgtgcttgcacctcagtaaacctgcattgtagcaatttgtaaggatattcagatggagcactgtcacttaacattctctgggggatttt

SEQ ID NO: 19262 - DNA, 1068 bp, Homo Sapiens
cgcacgaggacaggagttacagaccgagtagttaaccagttgctgactcagttggatggagtagaaggcttacagggtgtttatgtattggctgctactagtcgccctgacttgattgaccctgccctgcttaggcctggtcgactagataaatgtgtatactgtcctcctcctgatcaggtgtcacgtcttgaaattttaaatgtcctcagtgactctctacctctggcagatgatgttgaccttcagcatgtagcatcagtaactgactcctttactggagctgatctgaaagctttactttacaatgcccaattggaggccttacatggaatgctgctctcgagtggactccaggatggaagttccagctctgatagtgacctaagtctgtcttcaatggtctttcttaaccatagcagtggctctgacgattcagctggagatggagaatgtggcttagatcagtcccttgtttctttagagatgtccgagatccttccagatgaatcaaaattcaatatgtaccggctctactttggaagctcttatgaatcagaacttggaaatggaacctcttctgatttgagctcacaatgtctctctgcaccaagctccatgactcaggatttgcctggagttcctgggaaagaccagttgttttcacagcctccagtgttaaggacagcttcacaagagggttgccaagaacttacacaagaacaaagagatcaactgagggcagatatcagtattatcaaaggcagataccggagccaaagtggagaggacgaatccatgaaccaccaggaccaatcaaaccagactggctattattcagtcacatttaatgactgcacttggtcacacaagaccatccatttaatgaagatgactggaagaattttgctgagctatatgaaagctttcaaatccaaagaggagaaaaaatcaaattggaacattgttttcaactggacaaaagtaactttaccataaaatatacttcttttgaattgggtcgggtaagtttttgaagggctttccatatggtggaaccaggaaaaa

SEQ ID NO: 19263 - DNA, 857 bp, Homo Sapiens
gcacgaggagcatttgtgggccccgtggatctgcaagcctatcccatgtattgcacagtagtggcatatccaacggatctaagtacaattaaacaaagactggaaaacaggttttacaggcgggtttcttccctaatgtgggaagttcgatatatagagcataatacacgaacatttaatgagcctggaagccctattgtgaaatctgctaaattcgtgactgatcttcttctacattttataaaggatcagacttgttataacataattccactttataattcaatgaagaagaaagttttgtctgattctgaggatgaagagaaagatgctgatgtgccaggaacttctactcgaaaaaggaaggaccatcagcctagaagaagattacgtaatagagcccagtcttacgatattcaagcatggaagaaacagtgtgaagaattgttaaatctcatatttcaatgtgaagattcagagcctttccgtcagccggtagatctccttgaatatccagactacagagacatcattgacactccaatggattttgctaccgttagagaaactttagaggctgggaattatgagtcaccaatggagttatgtaaagatgtcagacttattttcagtaattccaaagcatatacaccaagcaaaagatcaaggatttacagcatgagtttgcgcctgtctgctttctttgaagaacacattagttcagttttatcagattataaatctgctcttcgttttcataaaagaaataccataaccaaaaggaggaagaaaagaaacagaagcagctctgtttccagtagtgctgcatcagccctgaaaggaaaaaggatcttaaa

SEQ ID NO: 19264 - DNA, 878 bp, Homo Sapiens
gcacgaggcagactgggtcgacaacaaaaccttcagcgtctgctccagggacttcaccccgcccaccgtgaagatcttacagtcgtcctgcgacggcggcgggcacttccccccgaccatccagctcctgtgcctcgtctctgggtacaccccagggactatcaacatcacctggctggaggacgggcaggtcatggacgtggacttgtccaccgcctctaccacgcaggagggtgagctggcctccacacaaagcgagctcaccctcagccagaagcactggctgtcagaccgcacctacacctgccaggtcacctatcaaggtcacacctttgaggacagcaccaagaagtgtgcagattccaacccgagaggggtgagcgcctacctaagccggcccagcccgttcgacctgttcatccgcaagtcgcccacgatcacctgtctggtggtggacctggcacccagcaaggggaccgtgaacctgacctggtcccgggccagtgggaagcctgtgaaccactccaccagaaaggaggagaagcagcgcaatggcacgttaaccgtcacgtccaccctgccggtgggcacccgagactggatcgagggggagacctaccagtgcagggtgacccacccccacctgcccagggccctcatgcggtccacgaccaagaccagcggcccgcgtgctgccccggaagtctatgcgtttgcgacgccggagtggccggggagccgggacaagcgcaccctcgcctgcctgatccagaacttcatgcctgaggacatctcggtgcagtggctgcacacgaggtgcagctcccggacgcccggcacagcacgacgcagctccgcagaccaagggctccggcttc

SEQ ID NO: 19265 - DNA, 891 bp, Homo Sapiens
gcacgaggtttggaagttcgagcccagttgggtctttgtcttctgaggatcatgattttgaccccactgctgagatgttggtccatgactatgatgatgaaagaactcttgaagaagaggaaatgatggatgagggtaaaaacttcagttcagaaattgaagacttagaaaaggaaggaaccatgcctctagaagatttactggcattctatggctatgaacctacaattccagcagttgcaaattccagtgcaaatagttccccaagtgaactggcagatgaactaccagacatgacactagacaaagaggaaatagcaaaagacctgttgtcaggtgatgacgaggaaactcagtcttctgcggatgatctgacgccatctgtgacttcccatgaaacttctgatttcttccctaggcctttacgatcaaatactgcatgtgatggtgataaggaatcagaggttgaagatgttgaaacagacagtggtaattcacctgaagatttgaggaaggaaataatgattggtttacaatatcaggcagagattcccccttatcttggagagtacgatggtaatgagaaagtatatgaaacgaagaccagttactttggtgtcctgatgtggttttggagagcaaagttaaggaataccttgttgagacttcattaaggactggcagtgaaaaaataatggataggatttctgcaggaacacacacaagggacaatgaacaggcattatatgaacttctcaagtgtaaccacaatataaaggaagcaatcgaaagatactgctgcaatggaaaggccttctcaagaaggaatgactgcatggacggaagaagaatgcccaagctttgaacatgccactcatgctttttggaaaa

SEQ ID NO: 19266 - DNA, 832 bp, Homo Sapiens
tccagtcagtgcttagaattcccaatagcattacaaaaaccaacttcaactgaattcaagcagaaataatggttatttgtgaacttgtctgatgatctcttcccatttatcagattaccttttccacaaaagaaagtctctaaaatatcacagatttacctagagggcaacatttagatacaggaaaattttacatagtgttttgtcttaggattagacgtgaccagattgatcctgtttgattttggagagatcctattctaacaaatactctaaaatgataaaattgaggtacaactctctaaaagagtatggataactatattttctggattctggaggttgataaccatatgcacttaacattatattctataaacattaagtagtgccagttatgagattcccagttcttactaaattgtattagcaggagctggtaattacttgtattatcacatgtaactaataatttgaactatacttgaaggaccgtgttgatgtcaggtatttacagtggttggaagatagcagtattattagcataagctgcatacgtaatattcagtaactgccatattatataacaaatttacattcacaaattcagtatcctgttaagtgtcatattcttgtaatctgcattctccaggagttttatgtgtttaatagatgaatttattttatttctaaaggtattcaaatgtttcagcaccatatagtagaaatacccaattatattctagttcctttatgtcctgtacatcattctctgcttggatttccattattctgtttggttagagaataaaatcggtaattgccctcgtgc

SEQ ID NO: 19267 - DNA, 886 bp, Homo Sapiens
ccccgggctgcaggaattcggcacgaggcctacatgaaaattatgggcatttgtcccaatgattttgtttcagctgttctgtaggctgcataaccactctgatatttaggtatctgctattttattatcttaaaagacaaattaatttaattgcatgtgctagggaaaagctaccatgtacattcaccccaagtaaatagaatcctagatgaatcctagaaaaataatccctaagcagataggtagacagaggtaaacattcacatgatttagctctctagctcttgcactctgaacattcttgctttggttctgacttctgggaactgctttgcatttctcctatagatctgtagttaagggaaccaaggggtcattggggcaaaagcattgtttctcaaagctccttgattaagagaaagaacagaaatttgcacagaagatagtgtcaaggagtgagaaagtttgtttgagggcagtagctcagtgtggaagaaaatcctgaagtttctgttgaagccatacaatgttctatggggttactctctaagacattctctgaggtgtgtgaggaagtcactactcctagcctttgttaagatgtaattttaaatattcagttatggtactatgtttgcaactctcgtcttatcacaatgcctcagtagtttgttcccttagaaacatttagatgtgcacaaattaatcttttatatatctaaaggtttttctatcatgcattggattgctcagaataaagtgtctgttagacttcgttttggtaaataaattctccataatgtagattaataatataaaagtctttaatgacacaatatatctatatagcctcactgtataattcagaaataaaaattgattctgc

SEQ ID NO: 19268 - DNA, 1179 bp, Homo Sapiens
  misc_feature (301)..(309): n is a, c, g, or t
tgtgctaataaaacttccctccatggctaagagggaaaacgcttacattcaattctttagtcatggatggtctcgttccagatgttattgttccagggaactaaattcattcctgatgccagatctgatcgagtcagtatgtcttcagcttgatcagattttaaaatcagttttgaaagtggttcccgacttctttgctttgggagaatttggtcttatgctcataagcagttcatgagtgacaagtgtagcaaaagccagccatatattttcagaatctatatcctcaggaaatggtccnnnnnnnnnctaaaaatcaccaaccaactatctaaatggacatttgggggaattccctcccaaatttgattttgttattagaaaaatgattccgtgaacacagatgtgttttgaagaagtagcacgtaatggcttttatctaccatcaacctgataaggcacatgtgaaatggaaatgttctctttcctctgaagcagcaaattaatgttgaaaacttacatagacagaaagtaggttttggaaagggaaaccacagagattagggggacttaaaattaatataggcacaggaaagagaaaagtgtgcgctccattctcagtgggggttcaccacaaaacacgggccccaggagggaagcgctgtctaggcacacggcaaggccttagtaacagcatgctacactgctcgaggtacggtatgtcccatcgccctgtgcaccgtagagacctcagtcatctcaaggaagaatacatttgcttctccttagaggcgttcgaactagaagctatgcgttacctctgattctggaaacagaatagcagccactcattctgcattcccatttttctctccacgtgttctggtggaatgagatgctccttggcactatagcctgatgtcccacattgacccactgaccacacaggaaaagcagcgaaacctgcaccctctcttctgagtcacgcctgtggctcatcggcttccctcttaacctttagtgccctgaagactgctgccgctgtcaccgttgcgctgaaaccccatgggcccgttctgattgaaggtgaagcccaccagattatttttcaaagtcttaggtttcggtgtatctaacctgctcagtaaatatggacgcaattaaagatgctctaggaaa

SEQ ID NO: 19269 - DNA, 1313 bp, Homo Sapiens
  misc_feature (829)..(853): n is a, c, g, or t
gcacgaggcacactcttccgcttctggtccttcttcctccgagatcacttcaacaaaaagatgtatgaggagttcaagcagctggctctggaggacgccaaagaaggctacagatatggtttggagtgcctttttcgatactacagttatggcctggaaaagaagttccggctggacatattcaaggattttcaggaggaaacggtgaaggactatgaagctggccaactgtatgggctggagaagttctgggccttcttgaaatattccaaagccaaaaatttggacattgaccccaaactgcaagaatacctcggcaaattccgacgtcttgaagacttccgagtagatccccccatgggtgaggagggcaaccacaagcgacactcagtggtagcaggaggtggcggcggtgagggcaggaagcggtgcccctcccagtcttccagcaggcctgctgccatgatcagccaaccccctacaccacccaccggccagcctgtccgggaagatgccaaatggacaagccagcactcgaacacacagactttgggaaagtgaaaagctccttagccctggggcttgaggggggaaaggggtagggtgggtaagagtccatgggggtgcccagtcccaggagaggggacaatgaagggacaggcctggagttactaggacaggcctttgtgctgagtagcaatgtatacaccatttgggctatcagaggtacccctgggcaggagcctctacatccccttccccctcctctctccatgactcttgacatcctagcttcttctaaggggggagggaaaggggggagattttnnnnnnnnnnnnnnnnnnnnnnnnncaagttttaaattattgatagttcatctggattaccaaaatcactctgcagccctgcccgaggctagtaggctgcaaccctggtccccacccctaacctcctgctccccctcaagccaactatgcagcccacaagaaggccctgcgggcccccccattgcccagcactgtctcatagaaggctctggtggtacctctgggccccaggagcatcagccccttgatcatctggggtttgtcatcaccatattttctccctgctgttcccaccatgcccttctgccatcttctgggagaaggaaaccaaaggatctaaaactggggtttgggggaaggtttcagcctctccccactccccttgccccacaccctttactccccagcccagagagacgctgcttttaccaggaaagactattgaaagatgttttattttatttttctctgacctttccatcctt

SEQ ID NO: 19270 - DNA, 796 bp, Homo Sapiens
gcacgagggggacatggggggacatggaccacattgagaccttagtcatcaagtagagtggtttatatccacttggaatgttgcttccaaagatgaatggccttcagagaaagtccccttagtgctggcttcctctttgcatggactctgtgggttacattctctatcaacatatctatgcagagggtgtcttctttggtacaacagccaatatttcatgtctcctttgagtgtggtttactgcattaaggccagatgcttaattgagctctagggtggctggttagtattaatacattggtgtgctaacagggcatataggatgtggcttttgtccagctgatagtagttagaggcttacaacttaggagcagcaccaactgaaggtgctaattgcttggatctccttcattgggatagttggagagggattggagtaccactttccttccactgttacctggtacttaatgccctaaagatacaactaggagtaacagggccaaagttatttctgttagacgtcaaggaatggtatcacagtctattgacctcagcgatttgtgcttgtttgtgctagaagaacatcccaaataggagaacctctcacaagctggggcaggtcaccttatctttgtaagatgaggatatcatctagatcagaaatctgactagattggattctgaggagaagaacctactacaaggcaaggagccgttttttggctttgaaaagtcttgctgtcttgggtctacattttagggaagagcaggtacatggatccaggcttctgcc

SEQ ID NO: 19271 - DNA, 811 bp, Homo Sapiens
  misc_feature (156)..(166): n is a, c, g, or t
gcacgaggaaaagttttattggagaaaaatagaaccaccacgtacacagggaaaagagcacaaaaattcaactgatacagaacaacaactgaaagtcacaattatccaatgtagtttgcaattacttttcagtttcttaaacagctcccctcaacnnnnnnnnnnnaacagtcttgctaatttttcagctgaaacagcatcaagttttcaaagaattaagagcctcggggaggggacccgctttcaagatactgaaggtgacatcaagagtctcctcctaacaggaccaactctatctaaaagttgcttacgagtaacttgaatcttgtgtaatagtctacatctcacagaccatcagggatgagttagaacactgttgttgatggtccggtatgaagagagggtaaacaaaatagctgcatttgcttgtcagctgagctcatataaagaaatcagtgaggagctgagaaaatataggcaatggctgctcaataagaattacaagttccgaataccacatatagttagacaccagtgtgcaagttgatgcaactagaaagaaatagacgactttttaaaatacctggccacaggtctttgagaactcaagcaaacaatcaacagtagacacaagagtcaaaaatcttctcaggttgaagattaggacataggtaatcttcctaacggctccaacaggcaaggaaatatgctgtggcaaaaagcattaagtagttctgatttttaacaaacataaacaaaattttctgcttctcctcccttcaaagcttcaaggaaatagaaacaaggaaac

SEQ ID NO: 19272 - DNA, 595 bp, Homo Sapiens
ccacgcgtccgcattagcaacatggctgagcctttcagtgccacagaccccaaggccatcggccatcggaactaccatgcaggctactccatgtttggggctggcctcaccgtaggcctgtctaacctcttctgtggagtctgcgtgggcatcgtgggcagtggggctgccctggccgatgctcagaaccccagcctctttgtaaagattctcatcgtggagatctttggcagcgccattggcctctttggggtcatcgtcgcaattcttcagacctccagagtgaagatgggtgactagatgatatgtgtgggtggggccgtgcctcacttttatttattgctggttttcctgggacagctggagctgtgtcccttagcctttcagaggcttggtgttcagggccctccctgcactcccctcttgctgcgtgttgatttggaggcactgcagtccaggccgagtcctcagtgcggggagcaggctgctgctgctgactctgtgcagctgcgcacctgtgtcccccacctccaccctcaacccatcttcctagtgtttgtgaaataaacttggtatttgtctgggtcaaaaaaaa

SEQ ID NO: 19273 - DNA, 748 bp, Homo Sapiens
gcacgaggcaccaatcatgcaaagaccttgcctggcccggtggcaagcgctgaaaaaccgaccgcctgtaggctcctggaactatacagataggtaaagagttccaagttcgtccagcccatgtgcaaagtcaacagtatttgccttaagatttcatatatatatatttttttgcattgactgctgagagctcctgtttactaagcaagcttttgtgtttattatcctcatttttactgaacattgttagttttggggtaatggaaacccactttttcattgtaatgactttgggggcttttgttagtgagggtgggtggggtgatgggttgcagacggaggtcaggtcttcctctttcctgagactggatctgttcaaacagcaaacgcccacagatggcccagaggtggtggtagtcagggtgtgtgggtgtttttagggttctttagtgttgtttctttcacccaggggtggtggtcccagccagtttggtgctgacggtgagaggaaattagaatctgtttgcaaattgtccaacccaccccctcaacatgaggggcttccattttctgtgttttgtaagggaactgtttccttcatgccgccatgttcctgatattagttctgatttctttttaacaaatgttatcatgattaagaaaatttccagcactttaatggccaattaactgagaatgtaagaaaattgatgctgtacaaggcaaataaagctgtttattaaccttg

SEQ ID NO: 19274 - DNA, 901 bp, Homo Sapiens
gcacgagggagaagtcactttgatggcatccgagcccttgctttccatcccattgagcctgttttgataacagcatcagaggatcacacattaaaaatgtggaatttacagaaaacagccccagccaaaaagagcacttctcttgatgtagaacctatctatacattcagagcccataaaggtccagtgctttgtgtggtaatgagcagcaatggtgagcagtgttacagtggtggtactgatggactgatccagggctggaataccactaatcccaacatcgacccctatgattcttatgatccttctgttttacgaggccctctgctaggccacacggatgcagtctggggtttggcttatagtgcagcacatcagcgtttgttgtcctgttcagcagatggcactctgcgtttatggaatacaactgaggttgctccagcactaagtgtatttaatgatactaaagaactgggaatccctgcctctgtggatctagtgagcagtgacccgagccatatggtagcatcattcagcaagggatatacaagcatttttaacatggaaacacaacaacgcattctcactttagaatccaatgtagatacaacagccaactcttcctgccaaataaatagagtcatcagtcatcctactcttccgatcagcatcactgctcatgaagacaggcacatcaaattctatgataacaatacaggcaaactgatccactcgatggtagcccacctagaagctgttacaagtttagcagttgatcccaatggcctttacttgatgtctggcagtcatgactgttcaatacgtttatggaatctagaaagtaagacgtgtatcctgaattcacagctcatcgaaaaaagtttgaagaatcgattcatga

SEQ ID NO: 19275 - DNA, 818 bp, Homo Sapiens
atcccccgggctgcaggaattcggcacgaggctcataagtggctgattggaaggggacaagcttcgtttcaggggtctgccgttccatcctggttcagagaaggccgagcgtggctttctctagccttgtcactgtctccctgcctgtcaatcaccacctttcctccagaggaggaaaattatctcccctgcaaagcccggttctacacagatttcacaaattgtgctaagaaccgtccgtgttctcagaaagcccagtgtttttgcaaagaatgaaaagggaccccatatgtagcaaaaatcagggctgggggagagccgggttcattccctgtcctcattggtcgtccctatgaattgtacgtttcagagaaattttttttcctatgtgcaacacgaagcttccagaaccataaaatatcccgtcgataaggaaagaaaatgtcgttgttgttgtttttctggaaactgcttgaaatcttgctgtactatagagctcagaaggacacagcccgtcctcccctgcctgcctgattccatggctgttgtgctgattccaatgctttcacgttggttcctggcgtgggaactgctctcctttgcagccccatttcccaagctctgttcaagttaaacttatgtaagctttccgtggcatgcggggcgcgcacccacgtccccgctgcgtaagactctgtatttggatgccaatccacaggcctgaagaaactgcttgttgtgtatcagtaatcattagtggcaatgatgacattctgaaaagctgcaatacttatacaataaattttacaattctttgg

SEQ ID NO: 19276 - DNA, 974 bp, Homo Sapiens
gcacgaggggtacatctatattattcatattgaatgtattaacagataatggtgcaaaagcattcttcccaggggaagagtgtatcatgcataactgcaatttaagtccttcctttgataatacttcaaaacatacacagctttgcttactgaattatttttgcaaataatacaaggaggggaaactaacttgctactagtgttgttaatgaagtataggccttggaacatttaagaaaactggtcttcagatagttaagggcttgggataatttaagtgaaaagtgagatcagtaatgagctgtgttgttaacaatattatctggtaataataccatgcaatatagcgttgtataccaacttagtgcattttatactgtattaaatatggagatacttctaatgcctctctaaaattaaattttacataaaagttagttttattcacctttaggctttccaagtgaattgtgactaattttttcaatcttacatagatctttcacccattagcattacttacgtagataattctttatgcctagttattatacatattaatttttaaggtatacatttaaattacacaattgttcattgtggtttgtatcccagaatgtgttgtgttttttaaaagatgcataatagctgaatgtatgcatgactttgaaagaagttaaaatggtgattttttttcacctcttgtacattttaaaaccaggccaaatctatttgccaagcagtgtatcactaataagaaaagcagtttttccttttattgcagtttttgtttatctgccatagaatttccttatactgtggcttggtattattcagattagctatttcgctggtattacatctttttaaaagcctattataacatggttagcctataagcagtgttgtccccttctaatattggctcataaaggggttccactgtactttcccatattactgtgttgtggttt

SEQ ID NO: 19277 - DNA, 908 bp, Homo Sapiens
gcacgaggctgccgaccggaagcgctccgctgtacctggatcctgctcctctgggttgaaacccgggcgccgccaagatgccggcttaccactcttctctcatggatcctgataccaaactcatcggaaacatggcactgttgcctatcagaagtcaattcaaaggacctgcccccagagagacaaaagatacagatattgtggatgaagccatctattacttcaaggccaatgtcttcttcaaaaactatgaaattaagaatgaagctgataggaccttgatatatataactctctacatttctgaatgtctgaagaaactgcaaaagtgcaattccaaaagccaaggtgagaaagaaatgtatacgctgggaatcactaattttcccattcctggagagcctggttttccacttaacgcaatttatgccaaacctgcaaacaaacaggaagatgaagtgatgagagcctatttacaacagctaaggcaagagactggactgagactttgtgagaaagttttcgaccctcagaatgataaacccagcaagtggtggacttgctttgtgaagagacagttcatgaacaagagtctttcaggacctggacagtgaagggagcccgggcagccaccgtctccagagccctgggcagcattttccagcaagatgtacacaatcttttgcctttatttcgtaaagttttatacagaagagagaagagcatgtctttacttgaaaaactcttgatcaagaatttgggtgggagaaaagaaagtgggttatcaagggtgatttgaaattttctgcagcattaaagctggcgcttaataagaataagtaataataaagaaatttctaacattccatgtcaggaaaactttattgccagtctttgacattcactta

SEQ ID NO: 19278 - DNA, 1452 bp, Homo Sapiens
  misc_feature (1364)..(1373): n is a, c, g, or t
gcacgagggcggagtacgacttgactactcgcatcgcgcactttttggatcggcatctagtctttccgcttcttgaatttctctctgtaaaggagatatataatgaaaaggaattattacaaggtaaattggaccttcttagtgataccaacatggtagactttgctatggatgtatacaaaaacctttattctgatgatattcctcatgctttgagagagaaaagaaccacagtggttgcacaactgaaacagcttcaggcagaaacagaaccaattgtgaagatgtttgaagatccagaaactacaaggcaaatgcagtcaaccagggatggtaggatgctctttgactacctggcggacaagcatggttttaggcaggaatatttagatacactctacagatatgcaaaattccagtacgaatgtgggaattactcaggagcagcagaatatctttatttttttagagtgctggttccagcaacagatagaaatgctttaagttcactctggggaaagctggcctctgaaatcttaatgcagaattgggatgcagccatggaagaccttacacggttaaaagagaccatagataataattctgtgagttctccacttcagtctcttcagcagagaacatggctcattcactggtctctgtttgttttcttcaatcaccccaaaggtcgcgataatattattgacctcttcctttatcagccacaatatcttaatgcaattcagacaatgtgtccacacattcttcgctatttgactacagcagtcataacaaacaaggatgttcgaaaacgtcggcaggttctaaaagatctagttaaagttattcaacaggagtcttacacatataaagacccaattacagaatttgttgaatgtttatatgttaactttgactttgatggggctcagaaaaagctgagggaatgtgaatcagtgcttgtgaatgacttcttcttggtggcttgtcttgaggatttcattgaaaatgcccgtctcttcatatttgagactttctgtcgcatccaccagtgtatcagcattaacatgttggcagataaattgaacatgactccagaagaagctgaaaggtggattgtaaatttgattagaaatgcaagactggatgccaagattgattctaaattaggtcatgtggttatgggtaacaatgcagtctcaccctatcagcaagtgattgaaaagaccaaaagcctttcctttagaagccagatgttggccatgaatattgagaagaaacttaatcagaatagcaggtcagaggctcctaactgggcaactcaagattctggcttctactgaagaaccataaagaaaagatgnnnnnnnnnnctatcaaagaaagatgaaataataaaactattatataaagggtgacttacattttggaaacaacatattaccctcgtgc

SEQ ID NO: 19279 - DNA, 1451 bp, Homo Sapiens
gcacgagggtattttgagagcagtatttcatgtgctaagggttataagaattcttttagaaagggattagaattttactctgctagttacaagttttaaagtcacgctacggcattatcaccctggcaggtaggttttgttattgttttacattttgtgaaaaaaagttttgtagaagttacagctagtggtcttttccctccagagccagtgatgagtgtgggagcacttcagctctgtaaggggccagcgttctgacctttaaccacatgaactaacctgcgtcagcagttgcagaaagtagcctgttaggacagcagctgctaagcgttgcctggtattttagtggggagaaggctgggactcttcatggcatcaacacttgcatgctctgaatctttgatcagagatgaggtgccatttttggcatttccaccccgtctcgtggtagcctttaaaagtggtagaagatgctgccctaattccccgaggatgattgtcattccatgcagcataatgtgccgtgaggagttttctcattccagttctttggacttcgtaacattggaattgtttttccataatttccggcattccataaatatttgtcaaggacaaagaaaaggaatgtggatgtttattcttttcatatgaatgactttgtacacatgacttcctgctttcattatgaaggaggggaaactagttcccttgtatggtaactccaaagttaaaaaattgtgcatgtctgaggggttgaatatattttgtaaaactctaaatacatttgtatttctgtgctgttctaaagtttacctttttacttatatgaaagataactatatatttaaatcatgtaagtggaacacagtgtagggggtttttccaatcttatttttcatcaggttctcacacccacgtagtatgctgctcaaattttttcgtgtgtgcaaatgtgaacatttgaacatttcagttaggtactgagccagaaaaggtaattgaagttttcagaaagcttctgtgcttagaaaatattttgttgttttcttaaaatattagtattttgtagctggaagaataagatcaaggcttacatgtttcaggccacttggtcactggttcctgaatttagaaaacattggattaatgagttggtgaaggcatttagtggttacaaaaacagtttaaatatttatgattaaaggcttttcacaaacctttttaaagaaaatttagctgagaaaacttaaaaagttttctaaggaagtttaactgtggcacatgttttgatcagaaaggtagttctctttgctctggtagttttaaagtttgtactagttctttatttctgttgttttttaaattgttaaaattataaatcacgtctaatcatactgaattgtaaaacttgaattgtatctttattttaagcataaatgagaataaaa

SEQ ID NO: 19280 - DNA, 858 bp, Homo Sapiens
gcacgaggctgaaaagcttaagaaaaaagaatcattgagtagaaagtgaacattttaagttattttcctttttcattggcaattagttaacatgtaaaatcttttccattaaactgtataacttttaataactatatattatatatgggataaaatatatggactgaattgtgagaatataaatgcatcgaaagactctggtgtcatgaaagcacaagaataaggctggagatggtcccagatccaagatgtcccaaaagccttttgtatcagtttctctatttttggtattttgcataatgcatggatccttagttcaaatgagggacaaagtttctcagtcagccccacttcctttctttctaactcctacctttcccttgcagaggaggtagtagagattctggaattgtctatttttatgaattccattattttgtccatggcatctctaatgaaaacaggttctagaataaaggagttgattagtctgaacagtactaattaactacaaaataaacgttagtgatcagcctcttcctctataaacaatgaccaattagacgtttccgtaattccatgtattatgtatagtacactctataaatgtaaatgtaatgcttgtctaaaaagtgcaatttattgtacattgtcccaacaaatgtttacttttataatcgttatgaacttgaattggattagtatcttgtttttatgtgtgaatgaagccttgtgaaataaacaaatgcaactgaaaaagtaacaaggtgactgtttttgtgagccagtgatgttttcaatgctttgtgttgcccctttggcccccattaagcagtataaacatttgttctgaagtcc

SEQ ID NO: 19281 - DNA, 942 bp, Homo Sapiens
gcacgaggcagaggacaccctccaaacactggttccccactgccctgtgccttccggccccagaaggatcttcctggatgccaacgtgaaggaaagctactgccccctagtgccccacaccatgtactgcctgcccctgtggcagggcatcaacctggtgctcctgaccaggagccccagcgcgcccctggccctggttctgtcccagctgatggatggcttctccatgctggagaagaagctgaaggaagggccggagcccggggcctccctgcgctcccagcccctcgtgggagacctgcgccagaggatggacaagtttgtcaagaatcgaggggcacaggagattcagagcacctggctggagtttaaggccaaggctttctccaaaagtgagcccggatcctcctgggagctgctccaggcatgtgggaagctgaagcggcagctctgcgccatctaccggctgaactttctgaccacagcccccagcaggggaggcccacacctgccccagcacctgcaggaccaagtgcagaggctcatgcgggagaagctgacggactggaaggacttcttgctggtgaagagcaggaggaacatcaccatggtgtcctacctagaagacttcccaggcttggtgcacttcatctatgtggaccgcaccactgggcagatggtggcgccttccctcaactgcagtcaaaagacctcgtcggagttgggcaaggggccgctggctgcctttgtcaaactaaggtctggtctctgatccagctggcgcgcagatacctgcagaagggctacaccacgctgctgtttcaggagggggatttctactgctcctacttcctgtggttcgagaatgacatggggtacaaactccagatgatcgaggtgcccgtcctctccgacgactcagtgcctatcggcatgctggga

SEQ ID NO: 19282 - DNA, 1319 bp, Homo Sapiens
gcacgaggctcaccttttctcgctgaaagcactaagaggtgggaggaggcctgcacaggctggaggagggtttgggcagagcgaagacccggccaggaccttggtgagatggggtgccgcccacctcctgcggatactcttggagagttgttcccccagggggctctgccccacctggagaaggaagctgcctggtgtggagtgactcaaatcagtatacctatctgctgcaccttcactctccagggtacatgctttaaaaccgacccgcaacaagtattggaaaaatgtatccagtctgaagatgtttgtgtatctgtttacatccagagttctgtgacacatgccccccagattgctgcaaagatcccaaggcattgattgcacttgattaagcttttgtctgtaggtgaaagaacaagtttaggtcgaggactggcccctaggctgctgctgtgacccttgtcccatgtggcttgtttgcctgtccgggactcttcgatgtgcccaggggagcgtgttcctgtctcttccatgccgtcctgcagtccttatctgctcgcctgagggaagagtagctgtagctacaagggaagcctgcctggaagagccgagcacctgtgcccatggcttctggtcatgaaacgagttaatgatggcagaggagcttcctccccacttcgcagcgccacattatccatcctctgagataagtaggctggtttaaccattggaatggacctttcagtggaaaccctgagagtctgagaacccccagaccaacccttccctccctttccccacctcttacagtgtttggacaggagggtatggtgctgctctgtgtagcaagtactttggcttatgaaagaggcagccacgcattttgcactaggaagaatcagtaatcacttttcagaagacttctatggaccacaaatatattacggaggaacagattttgctaagacataatctagttttataactcaatcatgaatgaaccatgtgtggcaaacttgcagtttaaaggggtcccatcagtgaaagaaactgattttttttaacggactgcttttagttaaattgaagaaagtcagctcttgtcaaaaggtctaaactttcccgcctcaatcctaaaagcatgtcaacaatccacatcagatgccataaatatgaactgcaggataaaatggtacaatcttagtgaatgggaattggaatcaaaagagtttgctgtccttcttagaatgttctaaaatgtcaaggcagttgcttgtgtttaactgtgaacaaataaaaatttattgttttgcact

SEQ ID NO: 19283 - DNA, 1045 bp, Homo Sapiens
gcacgaggctgagctggagcaggaacgccggcaccggcagattgtgtcctggttcgccgaccacccccgggccccctttggcctacaccggctggtggagcttgggcagagctcaggcaagaaggaaagccgtggagagctgctccgacgtcacccgcctggtggtgtacgtttctcaggactgcacagtgtacaaggcggatgtggcacgcctggtggccaggccagaccccacagccgagtggaagtctgtggtcatcctggtgcccgtgcgactgggtggcgagactctcaaccccgtgtatgtgccctgcgtgaagatgacttcctgctgtacctggaccctcactactgccagcccactgtggatgtcagccaggccgacttccccctggagtccttccactgcacctcgccccgcaagatggcctttgccaagatggacccaagctgtaccgtgggcttctatgctggagacaggaaggagtttgagacactctgctcagagctgaccagggtcctcagctcctcctcagccacagagcggtaccccatgttcaccctggccgagggccatgctcaggaccacagcctggacgacctctgctcccagctcgcccagcccacactccggctccctcgcacagggcggctcctcagggccaaacgccccagctctgaggactttgtgtttttataaagggaggggatgaggggaaagatacaacactatttatttttttatttatgtcatgtcgggtgtgggatcttgagctctggcagtgatgatggtacttcctgttgtcagcccctcaagcccagctgcaaccagtctggggccattcagccagggacagagcccacagagcccatacacctgtctcccaccagcggggccctcctggcagggtagggaaggaggaccccgggcacccccctcagggcctgactcacgtactgtagtttgcactggacgcccgggccctccctgtcccaaagcccccttgggggaactgtggctgctgggggccaataaagctgtgta

SEQ ID NO: 19284 - DNA, 1534 bp, Homo Sapiens
gcacgaggtggagaagctgaagctgctccgctacgaggaggagttcctccggaagagcaacctgaaggccccgtccagacactattttgcactgcctaccaaccctggcgaacagttctacatgttttgtactcttgctgcttggttgattaataaagcgggacgtccctttgagcagcctcaagaatatgatgaccctaatgcaacaatatctaacatactatccgagcttcggtcatttggaagaactgcagattttcctccttcaaaattaaagtcaggttatggagaacatgtatgctatgttcttgattgcttcgctgaagaagcattaaaatatattggtttcacctggaaaaggccaatatacccagtagaagaattagaagaagaaagcgttgcagaagatgatgcagaattattaaataaagtggatgaagaatttgtggaagaagagacagataatgaagaaaactttattgatctcaacgttttaaaggcccagacatatcacttggatatgaacgagactgccaaacaagaagatattttggaatccacaacagatgctgcagaatggagcctagaagtggaacgtgtactaccgcaactgaaagtcacgattaggactgacaataaggattggagaatccatgttgaccaaatgcaccagcacagaagtggaattgaatctgctctaaaggagaccaagggatttttggacaaactccataatgaaattactaggactttggaaaagatcagcagccgagaaaagtacatcaacaatcagcttgagaatttggttcaagaatatcgtgcagctcaagcccagctgagtgaggcaaaggagcgataccagcagggaaatggaggagtgacggaaagaaccagactcctctctgaggttatggaagaattagaaaaggtaaaacaagaaatggaagaaaagggcagcagcatgactgatggtgctcctttggtgaagattaaacagagcttaacaaaactgaagcaagaaactgtagagatggacattagaattggcattgtggaacacacactactccaatcaaagctgaaggagaagtccaacatgactaggaacatgcatgccacagttattccagaaccagcaacaggcttttattaaaacatactggttttcatgtttctgattagttgggttttttatatcaaactatatttcatgttgcatagatttcaaaacataattttatgttcaatgggtatttttttacatatacatactcacatattatatcatggtgattatgatggttaaagcctttacactgaatgtaatgtttaataaagaaattacaaattctcactttctaagaagctttcactaatcattacctatgtttaaagctcccacctggtggctcatttttcatagcattcccttgtgtaagccaaggtatatgacctgcgttttctgcagatgctgctgctgtcacacatggaactgctgacacagtcctttaccttgctccacctctgcagtgat

SEQ ID NO: 19285 - DNA, 1579 bp, Homo Sapiens
gcacgagggtgatgtccgcttcctcctgtcagagagtggcagcaccaagggggccgccatggtgaccgcggtggcctcccgcgtgcaggcccagcggaagcagatcgacagggtgctggctttgttccagctgacccgagagcagctcgtggacgtgcaggccaagatgcgggctgagctggagtatgggctgaagaagaagagccacgggctggccacggtcaggatgctgcccacctacgtctgcgggctgccggacggcacagagaaaggaaagtttctcgccctggatcttgggggaaccaacttccgggtcctcctggtgaagatcagaagtggacggaggtcagtgcgaatgtacaacaagatcttcgccatccccctggagatcatgcagggcactggtgaggagctctttgatcacattgtgcagtgcatcgccgacttcctggactacatgggcctcaagggagcctccctacctttgggcttcacattctcatttccctgcaggcagatgagcattgacaagggaacactcatagggtggaccaaaggtttcaaggccactgactgtgaaggggaggacgtggtggacatgctcaggaagccatcaagaggagaaacgagtttgacctggacattgttgcagtcgtgaatgatacagtggggaccatgatgacctgtggctatgaagatcctaattgtgagattggcctgattgcaggaacaggcagcaacatgtgctacatggaggacatgaggaacatcgagatggtggaggggggtgaagggaagatgtgcatcaatacagagtggggaggatttggagacaatggctgcatagatgacatccggacccgatacgacacggaggtggatgaggggtccttgaatcctggcaagcagagatacgagaaaatgaccagtgggatgtacttgggggagattgtgcggcagatcctgatcgacctgaccaagcagggtctcctcttccgagggcagatttcagagcgtctccggaccaggggcatcttcgaaaccaagttcctgtcccagatcgaaagcgatcggctggcccttctccaggtcaggaggattctgcagcagctgggcctggacagcacgtgtgaggacagcatcgtggtgaaggaggtgtgcggagccgtgtcccggcgggcggcccagctctgcggtgctggcctggccgctatagtggaaaaaaggagagaagaccaggggctagagcacctgaggatcactgtgggtgtggacggcaccctgtacaagctgcaccctcacttttctagaatattgcaggaaactgtgaaggaactagcccctcgatgtgatgtgacattcatgctgtcagaagatggcagtggaaaaggggcagcactgatcactgctgtggccaagaggttacagcaggcacagaaggagaactatgaacccctgggattggacctgatgcatcttggatactgaacagcttttcctctggcagatcagttggtcagagaccaatggggcaccctcctggctgacctcaccttctggatggccgaaagaaaacccc

SEQ ID NO: 19286 - DNA, 1500 bp, Homo Sapiens
gcacgagggtgcattgtgtgggacggtctggggcagcccagcagcggctgaccctctgcctgcggggaagggagtcgccaggcggccgtcatggcggtgtcggagagccagctcaagaaaatggtgtccaagtacaaatacagagacctaactgtacgtgaaactgtcaatgttattactctatacaaagatctcaaacctgttttggattcatatgtttttaacgatggcagttccagggaactaatgaacctcactggaacaatccctgtgccttatagaggtaatacatacaatattccaatatgcctatggctactggacacatacccatataatccccctatctgttttgttaagcctactagttcaatgactattaaaacaggaaagcatgttgatgcaaatgggaagatatatcttccttatctacatgaatggaaacacccacagtcagacttgttggggcttattcaggtcatgattgtggtatttggagatgaacctccagtcttctctcgtcctatttcggcatcctatccgccataccaggcaacggggccaccaaatacttcctacatgccaggcatgccaggtggaatctctccatacccatccggataccctcccaatcccagtggttacccaggctgtccttacccacctggtggtccatatcctgccacaacaagttctcagtacccttctcagcctcctgtgaccactgttggtcccagtagggatggcacaatcagcgaggacaccatccgagcctctctcatctctgcggtcagtgacaaactgagatggcggatgaaggaggaaatggatcgtgcccaggcagagctcaatgccttgaaacgaacagaagaagacctgaaaaagggtcaccagaaactggaagagatggttacccgtttagatcaagaagtagccgaggttgataaaaacatagaacttttgaaaaagaaggatgaagaactcagttctgctctggaaaaaatggaaaatcagtctgaaaacaatgatatcgatgaagttatcattcccacagctcccttatacaaacagatcctgaatctgtatgcagaagaaaacgctattgaagacactatcttttacttgggagaagccttgagaaggggcgtgatagacctggatgtcttcctgaagcatgtacgtcttctgtcccgtaaacagttccagctgagggcactaatgcaaaaagcaagaaagactgccggtctcagtgacctctactgacttctctgataccagctggaggttgagctcttcttaaagtattcttctcttctctttatcagtaggtgcccagaataagttattgcagtttatcattcaagtgtaaaatattttgatcaatatatattttctgttttccttttggtaaagactggcttttattaatgcacttttcatcctcggtaaacttttttgtgctgaatgttgggactgctaaataaaatttgttgcataatt

SEQ ID NO: 19287 - DNA, 1413 bp, Homo Sapiens
  misc_feature (115)..(127): n is a, c, g, or t
gaatcaaaagcagggtttatttttctatcaaatccccaatccatgttcccgccaatggatgaagggggaatcaagccccacataaactcttggtaaaaacaattctaactttctnnnnnnnnnnnnngccaacacacttttttctttcttttcaaaaagctcccaggcctttgggaacagctgaaacaaattcttatcctgactaggtctgttttctcttaagtatttggatgggccctctctgctgccacttctgcacaaatgaagcactgataatggcctgcaggtcactcacaatcctagctccacatcactccatggtttgataacctaaaaccacgttatgatttccatttataatgccctaaaaacagctgaaaaaatctgtattaaattctgcaaatctttattgagtgccaactatttgctgggcacaggctaggcactgattctgctggttctgagaaacataaatggtaccatagggaggtgtttcctcctaagtggcaggaggatgtttgctgggagttaagtgaaccaattcctcctctgcttacaccacgtgggggtaggtccagaactcaggccttgggaacatatgctgtgctctcttctacaggcgctgtgtggaagaaccaatagcagttgttaaatagctgtggaatttcctccacaatccacatagtgatgtgtctccaaggagctctgggtcatgaggccaatgtatgaaatcttcactgaagttcgcatgaagatcactatgttgtgcaccaggatctcaggtaccgtgcagaagaagtacacataggaaaacggtcctcccatctcggccttcccggtaaaattcaccagttgctcactccgaggtggaataagggagacgttagtagtcacatatgtactgaccactgtgttcatgtactgaatctggctggacaggctggtcactgccaccgtgtagaagttggagttcctgattttcagggtggccatgatggtgagaattacaagggagtcttgcttattaaatgtgactttcaccactttgatgccgtcatcatccacaaggactgaatgcggaaacaggaagaaaaacaccaaaccagatgccaggagacaaagcaggatggacaggaggacatattgcttagttcgctgagggcgcaatctctgatcactgtgtgggatcaaagccaccaactcatttacttgctctgttggaatgtagcctgtcccctggcacgtgagacaggtgatgctatctctcccggtgaattccacatatgggaactgagcaatggcttcttcctgctctcgttcagccagcaaaccgtccctgtcatcttcttgctttcgcctgcaggaggaggggcgagcagcagcggaatgctgagaccccatggccgtgatatg

SEQ ID NO: 19288 - DNA, 947 bp, Homo Sapiens
gcacgaggttttggtttcatgttagtatttactaaagttttaaatataatcacgtagaaaacaaacatttcaaaaatgcaaaatattagaaatctaatcagtgctattaatctttccatgcaaacaatctcttttgctgagataagtgatactagttctgcagctgggaatatgtacaaaatgatgctgtaccagagtttaaaaatagggttggtctagagattgcacatgatacaaatgaagcagcgcaaataatatatgactaaatacaggatttcaatcaagcttatcatcctgggaatatacagctataataccatgaatagacaagatataaagctctttcacagttacccacccctcaccactaggaaagaaacatttcttaatacaaagagtggtttatctggctatccagggctatgctgtccatctttggttatagggactccctctgcttatcctttggtttactcttaaatagcacctattctgccaataggaagagtaaacataaatttgaagaccacaacttggcaaaagcttccccttaatatacagtgaatacttaattctcaataactcagagtttatatacctttaaaaaaataaagtattccatatatctgaaacttagtggcatacttagcactagactataagcagatgacaaagaaaggccaggcctgacctataccccaaccttacctctacaatctccatggtgacagtaattacccttcattttccttttctttccagaaagggataaagaccactgctgtctaagaatggcttcagtaaatattaaatgtcagtggctttgaataccataacatttataaaaaaatttataaacaataaaccacagctcgcctgcctttgccactctataaacagaggcctgtggaatctgagagcaagtataaggattatcataagagaac

SEQ ID NO: 19289 - DNA, 980 bp, Homo Sapiens
gcacgaggctgccgacgccagttccaggagggcgaggagtggaactgcttctttggctacaaggtctacccgaccctgcgctgccctgtgttcgtggtgcagtggctgtttgacgaggcacagctgacggtggacaacgtgcacctgacggggcagccggtgcaggagggcctgcggctgtacatccagaacctcggccgcgagctgcgccacacactcaaggacgtgccggccagctttgcccccgcctgcctctcccatgagatcatcatccggagccactggacggatgtccaggtgaaggggacgtcgctgccccgagcactgcactgctgggacaggagcctccatgacagccacaaggccagcaagacccccctcaagggctgccccgtccacctggtggacagctgcccctggccccactgcaacccctcatgccccaccgtccgagaccagttcacggggcaagagatgaacgtggcccagttcctcatgcacatgggcttcgacatgcagacggtggcccagccgcagggactggagcccagtgagctgctggggatgctgagcaacggaagctaggcagactgtctggaggaggagccggcactgaggggcccagacacccgctgccccagtgccacctcaccccccaccagcaggccctcccgtctcttcgggacagggccccagccgtcccccctgtctgggtctgcccactgccctcctgccccggctttccctgcccctctcccacagcccagccagagacaagggacctgctgtcatccccatctgtggcctgggggtccttcctgacaacgagggggtagccagaagagaagcactggattcctcagtccaccagctcagacagcacccacgggcccacccatcaagcccttttatattattttataaagtgacttttttattactttaatttttaaaaaaggaaatagaatatatgatgatga

SEQ ID NO: 19290 - DNA, 1559 bp, Homo Sapiens
gcacgaggcagagatcttcctccgaggcagcctcagagggtgaacagtatagactttgtagaattggagcaccttcaacctgatgtattagtccacgcagtactaagagttgttgatttcactatactgacagaggcagtatacagttatagaggacagaagcagaaaaaagttatgttaacagtggaacaggcccaagatcaacattatgcgcttgtattatggggtcctggagcagcctggtaccctcaacttcaaaggaaaaaaggttatatttgggaatttaaatatctttttgttcagtgcaattacacactagaaaacctagaattgcatacaacgccttggtcatcctgtgagtgcttgtttgatgatgatataagggcaattacatttaaagcaaaatttcaaaaaagtgcaccctcctttgtgaagatatcagacttagcaacccacctagaggataagtgttcaggagtggttctgattaaagcccagatttcagagctggcatttcctattacagcatctcagaagatagcgctaaatgctcacagttctctgaagagtattttttcttctcttcccaacatcgtatatactggctgtgcaaaatgtggattggaactagaaacagatgagaacaggatctacaaacaatgttttagctgcttgccatttactatgaagaaaatatattataggccagcgttaatgactgccattgatggaagacatgatgtttgtatccgtgtagaatcaaagctgatagagaagattcttctcaacatttctgcagactgcctcaacagagtgatagttccttcctcagagatcacctatgggatggtcgtggcagacctgttccactccttgttggcagtcagcgcagaaccttgtgtattaaagattcagagccttttttgtgttagatgaaaacagctatccattacaacaagatttctccctcctggatttttatcctgacattgtaaagcatggagccaatgcccgtctctgaggccagaggaagaaattgcaggcatttcaaggaagaagtactgaaatgatttgtcttttgaaataaatgaatgacagggcttttgctttggattttttatgaaatatattttacaaagagaattgcactagatatataaattaaaacttttttctaagaaaatcctgtgaggtttaaaaagattgtttttgtcttttggtttcttcctttctcctggagaaatgatctaccagtcaaggcaatatgtagcagatccctgggaattaaaggtttgcccatttgttcactgtatttagtccctgctacattccaggcattgtactaagtatggggaaccacagagaagacattccctcagaaactgctgcagtgctttcgcttatccctacctaaaaaaccgtcaatgtgaaatcatttccttgattataactataatgataatggattagtttatataaacctatgtttagacaagttccagacaagcgtgtctttctataaaaagtatgaaaatgagggaatgaaatcatgttccatt

SEQ ID NO: 19291 - DNA, 927 bp, Homo Sapiens
gcacgaggccggcccgggctcgagaatcaagggcctcggccgccgtcccgcagctcagtccatcgcccttgccgggcagcccgggcagagaccatgtttgacaagacgcggctgccgtacgtggccctcgatgtgctctgcgtgtttctggctggattgccttttgcaattcttacttcaaggcatacccccttccaacgaggagtattctgtaatgatgagtccatcaagtacccttacaaagaagacaccataccttatgcgttattaggtggaataatcattccattcagtattatcgttattattcttggagaaaccctgtctgtttactgtaaccttttgcactcaaattcctttatcaggaataactacatagccactatttacaaagccattggaacctttttatttggtgcagctgctagtcagtccctgactgacattgccaagtattcaataggcagactgcggcctcacttcttggatgtttgtgatccagattggtcaaaaatcaactgcagcgatggttacattgaatactacatatgtcgagggaatgcagaaagagttaaggaaggcaggttgtccttctattcaggccactcttcgttttccatgtactgcatgctgtttgtggcactttatcttcaagccaggatgaagggagactgggcaagactcttacgccccacactgcaatttggtcttgttgccgtatccatttatgtgggcctttctcgagtttctgattataaacaccactggagcgatgtgttgactggactcattcagggagctctggttgcaatattagttgctgtatatgtatcggatttcttcaagaaagaacttcttttaaagaaagaaaagaggaggactctcatacaactctgcatgaaacaccaacactgggaatcactatcc

SEQ ID NO: 19292 - DNA, 917 bp, Homo Sapiens
gcacgagggcacttcctcagggagatcatcgaggccatgttgaaagcctatcagcagaagctctttgtgactcacacagttgacgaattgctctggggctacaaagatgaaatcttgtcccttatccatgttttcaggcccgatatctctccctattttggcctattctatgagaaaaatgggactaatgatggagactatgtttttctaactggagaagacagttaccttaactttacaaaaattgtggaatggaatgggaaaacgtcacttgactggtggataacagacaagtgcaatatgattaatggaacagatggagattcttttcacccactaataaccaaagatgaggtcctttatgtcttcccatctgacttttgcaggtcagtgtatattactttcagtgactatgagagtgtacagggactgcctgcctttcggtataaagttcctgcagaaatattagccaatacgtcagacaatgccggcttctgtatacctgagggaaactgcctgggctcaggagttctgaatgtcagcatctgcaagaatggtgcacccatcattatgtctttcccacacttttaccaagcagatgagaggtttgtttctgccatagaaggcatgcacccaaatcaggaagaccatgagacatttgtggacattaatcctttgactggaataatcctaaaagcagcccagaggttccaaatcaacatttatgtcaaaaattagatgactttgttgaaacgggagacattagaaccatggttttcccagtgatgtacctcatgagagtgttcacattgataaagagacggcgagtcgactgaagtctatgattaacactactttgatcatcaccaacataccctacatcatcatggcgctgggtgtgtctttggttgggtttt

SEQ ID NO: 19293 - DNA, 1050 bp, Homo Sapiens
gcacgaggattttatgggctcctttcccccttttttggtgatctaattgcattggttaaaagcagctaaccaggtctttagaatatgctctagccaagtctaactttatttagacgctgtagatggacaagcttgattgttggaaccaaaatgggaacattaaacaaacatcacagccctcactaataacattgctgtcaagtgtagattccccccttcaaaaaaagcttgtgaccattttgtatggcttgtctggaaacttctgtaaatcttatgttttagtaaaatattttttgttattctactttgcctttgtacagtttattttactgtgtttatttcattttcccaatttgacaatcgtattttaaaattgaaactgatggaacattctttcttggtcttcaccatctgacaaattgaatggcaagaggtggattttgccagtttcttttcactgatgcagatttgtgttaagatagtactgaatggagtatttataaactggccctgagcatgcataaagcatcagtatctgacctttttttaaccttctaggaatttgaaataaatgtgtttgtgttgtctgattagatgatcattggtgtcttgccacaatgtttaaaaattactgtacaggaaagtcacagcaaagatagcagttgtgactgacatgtaggactttcacagttgtgccacatttttgcctaaaatttgggttatgacatttttcttggttcttatctgaaaatttcatctgtaacctttcatgtgtgttaagaaacactgatctgatcattttgggatttgctgaggcatttgtgagtcttccttataaacctgatgagcagatctcaactatctagcttgtgtgtcatcagaaaggtttatctcctttgagagtatcaagtcctcagttaatgattcttgctttcatctctccagtatttgctgtgggagctcgttttattcttaaatttggaattcagtaatttttcttctttattgacgaattcctctcctcacaaaactgttctttccacctctctc

SEQ ID NO: 19294 - DNA, 1571 bp, Homo Sapiens
  misc_feature (717)..(737): n is a, c, g, or t
gcacgaggatttcagtaaagtagataaagcactcgttaaatagcattgtttacatcgaccaaatattgcctgtttcctttaattcaaatgcattaggttcccgcctccctctccttccccgccatgttgctgttttaaggcttcatatgtattaacatttctctgatcaaaattgtggctgttttccttatgaaccataatataatcatttgtgtgatgtacattgtgccatttttgatgactaaatgtctatatttctgccattcctgtaagagagggagttttttactgatagtagcaaatgttcacttcagtcaaacttgggtgttcagtggtaaaccatatagtatttagactggtaaaaatagtttgcacacaggaatagcctctgatttttagctctcttgtaatccaagtatcattgttcatggaattctctaggtcatttttattgtgttgttctaacaagacagattattgctacaacaatagttacaagatatttctaaaatatcctttgatttttactctaagtatggtagagtaagaggctaaacaagaagctgtttccttgaagacattgctttcagtcaccatacatgtctaaataatttagcttatcattcattctatgtaggaatgagataagaaaggatatgatggcaggaaaagaaatgctattcattttttatactttagttttattttcttaggatnnnnnnnnnnnnnnnnnnnnntttttaaagcactaatttattgcagtctttattttagaaaaatgtgaagcatttttttctcccctaaaatgaatatatttagatgacaagtctttagtgctggtagaggaactaattgattttgtactatagtaggaaagtgtttatatgtttcaccagaaataaaatatgtagggtttgtatgtaatcttctgtgtttatcctatgttgatttaccttaaatttgcaacatacatatccacataaatattcatgactttcttatatttcattaaaatgttttatggcttcttaaaatcatcactgtgcttctaaatatttttacgtaaaatcattgtataatgctatactgtgatatacatgaaagtttatcttgaacagtgctctttaacaatattaaatttaaatttatcttggttttgctatgcttatgggtaattcatagaaaacagaaaaaatactgttcccaaaaggcagttatatatttcagtttaatatcacctataagtatgagaaaggtttccatgtctcctacccctcactgcacttaggaaaattcttatttatgaataaagtaagataagtaaatctaattgcctagtcgtttttttaacacatatacatgcaatgtatctggatgaatagaaggctgaattgaagctttctttatatttaagaggtaaaaagaaatattaatacttttaaaatatactaacaaccaaaaagtgttcagaattttgctataataataatttgtattaaaatagtacctagaaaaattcagtctatggaataggtaaaattttaaaattttaatttgctctcagagttctg

SEQ ID NO: 19295 - DNA, 775 bp, Homo Sapiens
gcacgaggctggatctggctactgaggctagagcccacagcagaatggggttgggcctgtggccccccaaactagggggtgtgggttcatcacagtgttgccttttgtctcctaaagatagggatctacttttgaagggaattgttcctcccaaataaatttgctttaccttggtcctttcttttgtgccagtattcaagtggtatagctctgagcagggtcacatttggccaaacctgacactgtcttgctgcattctcctttggcaaacatcagggtcagaattcaggatagcccttcctagggcactggactttctggcatgggggctgtgtttgcacaagttattttcatgttacctggagagtgtccagaggctgctctgaggctgaggtgtgttcccccttgcctggttccagctgtcagagggataccatcctagggtctgggaatccaaggccacgagactccttggtttgtggtccgagatcctgtactaaggagggtctggccagaggaacagaccagcttttgcacaatgaagcgcaagggaacaagtggtttgcctggtgtcctacctgtcctgaacctggtcctgtgggccattgaaaagttagatctgtgatctctggggtttttgtggctttgttcaatgcttccactctagggcaggcagagcagtctatactctcccaagcctgcttgacctccaagtagagctgatacagagatctgtgaatattgtgatagaaattcttttggtattcatacattt

SEQ ID NO: 19296 - DNA, 1494 bp, Homo Sapiens
  misc_feature (1188)..(1213): n is a, c, g, or t
  misc_feature (1298)..(1313): n is a, c, g, or t
  misc_feature (1358)..(1371): n is a, c, g, or t
gcacgaggacgcatttgatggagcaaaaattataaaccttgcagatactcttcgggtggttggttagctgatacgagttctaatgagatgactattaaattgattgtagattgattgctcttgcttttctgcttcttggtattttatctgcacagatctactctaatcttaatgtagtttatcccaggcaatcacatgataatctgggttaaatgcattttgtctgtataatggaaaggattatattgctttggggagattttattttggtgatattcatcctaaatggtgttctttggttctttccttgctaaaacttcttctgaatctctgtttctttgcttcgctagtacgctggggaggaggaggaggaagggagcggcagcagtgaaggatttgacccccctgccactgataggcagttctctggggcccggaatcagctgcgccgcccccagtatcgccctcagtaccggcagggcggttcccgccttaccacgtgggacagacctttgaccgtcgctcacgggtcttaccccatcccaacagaatacaggctggtgagattggagagatgaaggatggagtcccagagggagcacaacttcagggaccggttcatcgaaatccaacttaccgcccaaggtaccgtagcaggggacctcctcgcccacgacctgccccagcagttggagaggctgaagataaagaaaatcagcaagccaccagtggtccaaaccagccgtctgttcgccgtggataccggcgtccctacaattaccggcgtcgcccgcgtcctcctaacgctccttcacaagatggcaaagaggccaaggcaggtgaagcaccaactgagaaccctgctccacccacccagcagagcagtgctgagtaacaccaggctcctcaggcaccttcaccatcggcaggtgacctaaagaattaatgaccattcagaaataaagcaaaaagcaggccacaaccttaaccaacaccaaagaaacatccaagcaataaagtggaagactaaccaagatttggacattggaatgtttactgttattctttaagaaacaactacaaaaagaaaatgtcaacaaatttttccagcaagctgagaacctgggaattcctgcacggaagacaagagagtagcctctccagtttcagcaaccgctaggtttctannnnnnnnnnnnnnnnnnnnnnnnnnggtaatatatatattgaaacaagaaatattaataccacatggggagaaccccaaccaaagaaatttgaaatatatagtaaatgcnnnnnnnnnnnnnnnngttcattttggatgctggtgctaaacctccaagtgtcatgatttnnnnnnnnnnnnnntttatgtccttcttatttatttctaggatgaggggaggaaaacatttttgctttcttatgtgactctctttgaaaatgtgcagtaagaaattcctcaaaaataaaatttttacccttcagagg

SEQ ID NO: 19297 - DNA, 1597 bp, Homo Sapiens
  misc_feature (835)..(854): n is a, c, g, or t
  misc_feature (1212)..(1246): n is a, c, g, or t
  misc_feature (1326)..(1340): n is a, c, g, or t
gcacgagggcgactgtcgaaccggaaaccacccctactcctaatcccccgactacagaagaggagaaaacggaatctaatcaggaggttgctaacccagaacactatattaaacatcccctacagaacagatgggcactctggttttttaaaaatgataaaagcaaaacttggcaagcaaacctgcggctgatctccaagtttgatactgttgaagacttttgggctctgtacaaccatatccagttgtctagtaatttaatgcctggctgtgactactcactttttaaggatggtattgagcctatgtgggaagatgagaaaaacaaacggggaggacgatggctaattacattgaacaaacagcagagacgaagtgatctcgatcgcttttggctagagacacttctgtgccttattggagaatcttttgatgactacagtgatgatgtatgtggcgctgttgttaatgttagagctaaaggtgataagatagcaatatggactactgaatgtgaaaacagagaagctgttacacatatagggagggtatacaaggaaaggttaggacttcctccaaagatagtgattggttatcagtcccacgcagacacagctactaagagcggctccaccactaaaaataggtttgttgtttaagaagacaccttctgagtattctcataggagactgcgtcaagcaatcgagatttgggagctgaaccaaagcctcttcaaaaagcagagtggactgcatttaaatttgatttccatcttaatgttactcagatataagagaagtctcattcgcctttgtcttgtacttctgtgttcannnnnnnnnnnnnnnnnnnnggctagagtttccactatcccaatcaaagaattacagtacacatccccagaatccataaatgtgttcctggcccactctgtaatagttcagtagaattaccattaattacatacagattttacctatccacaatagtcagaaaacaacttggcatttctatactttacaggaaaaaaaattctgttgttccattttatgcagaagcatattttgctggtttgaaagattatgatgcatacagttttctagcaattttctttgtttctttttacagcattgtctttgctgtactcttgctgatggctgctagattttaatttatttgtttccctatttgataatattagtgattctgannnnnnnnnnnnnnnnnnnnnnnnnnnnnnnnnnncctcatgtaacattggtgaaggatccaggaatatgacacaaaggtggaataaacattaattttgtgcattctttggtaannnnnnnnnnnnnnngtaactacaaagctttgctacaaatttatgcatttcattcaaatcagtgatctatgtttgtgtgattccctaaacataattgtggattataaaaaatgtaacatcataattacattcctaactagaattagtatgtctggttttgtatctttatgctgtattttaacactttgtattacttaagttattttgctttggttaaaaatggctcaagtagaaaagcagtcccattcatattaagacagtgtacaaaactg

SEQ ID NO: 19298 - DNA, 939 bp, Homo Sapiens
gcacgagggtctcctgcgttgctgggaagttctggaaggaagcatgtgctccagaggttgggattcgtgtctggctctggaattgctactgctgcctctgtcactcctggtgaccagcattcaaggtcacttggtacatatgaccgtggtctccggcagcaacgtgactctgaacatctctgagagcctgcctgagaactacaaacaactaacctggttttatactttcgaccagaagattgtagaatgggattccagaaaatctaagtactttgaatccaaatttaaaggcagggtcagacttgatcctcagagtggcgcactgtacatctctaaggtccagaaagaggacaacagcacctacatcatgagggtgttgaaaaagactgggaatgagcaagaatggaagatcaagctgcaagtgcttgaccctgtacccaagcctgtcatcaaaattgagaagatagaagacatggatgacaactgttatctgaaactgtcatgtgtgatacctggcgagtctgtaaactacacctggtatggggacaaaaggcccttcccaaaggagctccagaacagtgtgcttgaaaccacccttatgccacataattactccaggtgttatacttgccaagtcagcaattctgtgagcagcaagaatggcacggtctgcctcagtccaccctgtaccctggcccggtcctttggagtagaatggattgcaagttggctagtggtcacggtgcccaccattcttggcctgttacttacctgagatgagctcttttaactcaagcgaaacttcaaggccagaagatcttgcctgttggtgatcatgctcctcaccaggacagagactgtataggctgaccagaagcatgctgctgaattatcaacgaggattttcaagttaaccttttaaatactggtattatttaa

SEQ ID NO: 19299 - DNA, 1066 bp, Homo Sapiens
atcccccgggctgcaggaattcggcacgagggcagcccgcagcccgctgcgccccgggccgcgtctcccggcggtgggagggggcggcccccactcggttcctggcccctcgcggccccgtcagcctcccgctcggggtgcgccgcccttcgtctgggtctccgcccccaggacccgcggccgagagctccggagcgcggcttccccggccggctgcgcgatgggctgcgggaactccaccgccaccagcgcgggcgcgggccaaggccctgcaggagcagccaaagatgtaacagaagaatccgtaacagaagatgacaagaggagaaactatggaggagtatatgttggcctaccatctgaagctgtcaatatggtgtccagtcaaacaaagacggttcggaaaaattagaagaaaataacatcatgactcaagaatcaagagcttgctcatcagtttggaaggaatttggctccgtgggacgttgtaatgtgcacagacatttccaaggaaattctaaacagtcacccttcccttttgcattcccccaaatcttaagtgtatacataaaaccctgggtacatattgttgtggtaatagaagggaattggttaaacagtacacttgtttatggaactttctgtggccacctacgaaagacaagttaacaaactgtcatggaggctgttgttgcccagccagggccgctgcattttgacaacatttccaccctggccactcagcacatttcatggaggtcatgtcttttcactgatacttttttgatagtttttatataacaaaatccttattctatttataacttaagatgataaggcactataaattaatgacctaaaataatatatttgtctgttatcttttgctatttctacttcactttaatttttacctgtaaaattggtaaatggattcttacaactatctctttccatttcttactatttggttttcaaatttcatttaaatgtccgaatttccttttttaggaacaatgtgtattttcatgcactatttaaaaataaactcaaaatttgcatgccc

SEQ ID NO: 19300 - DNA, 1441 bp, Homo Sapiens
gcacgaggattctattcccagaaactatttgaccatgataattcagtttatattcaccacatgaaagaaaaatgggtaacagaagaacccctaaaacaggttaatttggattgtaacgttcagtgaaagaaatttcaacccttcatagccagcgaagaaatttgccttggaagccaagtcagtaccagcttacctatttgattcagttgctgttttctcactctctatatccatttgaaattgatttattttagatgttgtatacttacgttaggctttctgttaatagtggtttttctcctgttgacagagccaccggattatgacacaggatgaggaagattaaggataatcaattgactaatttcatttagaatattatcaaacatttcaactaggtatcagaaaaaggctttctttcataagactattttaaatagaaattatttcaacaattaaagtaatgttgaccatccccctctcagctgaataaagaaaaatttagttcaatttattgcaatttaattacaatactaccttcacaacattttcatgtgttttaaataaatattttttaattggctaaaggacattcaagcaaagaaatgctttctttacttaaaatgtctatctcatttgctgccttttcactaagcctttactttgttaataaaagtgtccattgtgtgatgtttttgattttacagtttgctaaatcttattttcttggagttgctttttggtaacagccccattgctactccccattttattgttttacatcaatgcatgcttcgttgtgatccctcaagatgtaacacttggtatgctcggttgaggatatgaaaaaatacttccgaaaccaggaattcaatgtatgtttgttttatactgtttgataagaaaagtaggtccagccttaagcagcacagatgcgctggtagatgcatagtcaggaactttttttatttcttttaggtctagggacaggagtgaatagaaagggaggagagctctattatgttctatacacagattaggagatgaccttactgggtacacccctctaaccagtgcttacaggttaatgcatgttaatgaatatttttgcagttgtaaagcataacaattacaactacacatctatttctaaagaataaaacaggaccatatttatttacttctgtcaactatagaaagaaagaccttcagctgtatttccacagatttctcccaaggaaaaggctaatattagtcactactgttatcacatccctttgtataagttttaaaaagagatggagggagatcttcatttctttgaggagatcagtattgtaacgtatgtgaatagatgataacaattaatattactaaaggtcccacatgagagtcctgacgccctctccatgcccacagtaatgtggcttctttcatgggg

SEQ ID NO: 19301 - DNA, 1519 bp, Homo Sapiens
  misc_feature (1185)..(1245): n is a, c, g, or t
gcacgaggtatgacctggcattaattccagtgactagtcaggcattatgcctgatgcatacgcctcccgtgcacccctatctagccttcagatgtcctccactgcaggtcaccccaggagatagcatcaataatatagtctcagtcttgtttataaagattctaagttgtctagtaaataagtctccctgaatcttaaataattttggagaattagaattctccatcctattaaacagaaagtaaagccaaatagcctggagttgtttgtcctacttgttccataacccctatgctcaagatactgaagctatctgtggtatttcatgtaacatttctaagaataagagctggcaaatgggaaacttggggtggagagagcatacttattgggctgtgaaggcatacggatgtacatgttttagagcttatctcagatttaaatagccaaaggaagacctcattgccttccaggtgaaggtgcaaagtcatacatattaatgacctgacagttaacattctgttgtttattattgcctttctccaccttagagagccataaataactctctggtgaagtgatttgctataatgggggtgaggagtggggagacttctctggtcattacactgctatttatttctagaactcactatcagtgagcagtgccagagtgttttctctttgacctagaggtttcacatcatagcaaggagggaaaagtctccccatctccttacaactgtgtgctaagtaagtaacttggccaagggtagttttcagctcaatttatagaatagtccaagagactttgagaaacatggtgataggcaggggcctttcctaccatgtttcaatacctacaaacctattgaaagagaacagtaggtaaaacatttcctaaagttgaagcaatagcttcgtagattcttggttactttattttttttaatgctttacatttgatacaaactattgaagatcaattttaaaaatagctttccagtaatatattttaagtaatatatattttaatatctgtaaaaagtgacagtggaagactttgaatttttcatatatggtatgtttgatgtaggacctcactgttaaggcacaaattatttcaaaggaagttactctaaagacactcagattatttcagaaaaatgcaataaggggaatagnnnnnnnnnnnnnnnnnnnnnnnnnnnnnnnnnnnnnnnnnnnnnnnnnnnnnnnnnnnnncccttctggctgtaaggtttgtacagactggtttggtaaatgctaaacttttgtgtcttttgcctttttaaaggaattgttaacattggaattgagggtatgtacagagaagttggtgtcaacaccatttaaaaagtcatattttttcacaaatatagaaaatcattttacataagaattttaagtatttgcaataaatatatgtatatagattgtatgtattcctatattcttatttttcattttattattaagtaaaagatcattaaaagtg

SEQ ID NO: 19302 - DNA, 1051 bp, Homo Sapiens
gcacgaggatcacagttcccctctctgtgatcagccagccaatgaagggcaagagcgtggtcacagcccccatcatcaaaggcaaccttggagccaacctcagtgggttgggccgcaacatcatcctcacaactatgccagcaggcactaagctcattgctggcaataagcctgttagtttcctcactgctcagcagttgcagcagcttcagcagcaaggtcaggccacacaggtgcgcatccagactgtccctgcatcccatctccaacagggaacagcttctggctcctccaaagcagtctccactgttgttgtgactacagctccgtctcctaaacaggcacctgagcaacaatgattatgagagaggatggcttccgtgaaagaccatgcctggtctgtcctggctgagaagggaccagggaggttgcatcattgttttaagcttgcctgttcaaggcagccaggcgaggggtgatggcaacggtggcctggattcgtggcctggattctgctgccacgtgccatagtggagcaccctgagaaaggttcactccagggttccaaggtctgctctctaccaatctaggagaatattctgttgaaattgcaggaattaccagttacgtccaacaagccagagttctgagagtaagacccccagggaaggcttaccagttgcagagtgcacacagcgaataggctggttctccatgaggattgtattttttggcttctggtcttctccatgactagtggtctggataggagttttgtgtccagaaaattttatgtaatttatttttttaaagaacctgttgtacatctttctcaatacaaacttgggctttagctgccccctccactaaaccgatgacttacttttttgactagaatgagaaaatggcaagaatcttagtaaggtggtagccagcttggtaactgcatagtaatcgagaggctgtaagatgggaattcatcgtagcagcgaggtagagtgggtcccctgaaatgggattcgcttggcactgcctcttaaagataggggtg

SEQ ID NO: 19303 - DNA, 738 bp, Homo Sapiens
  misc_feature (615)..(643): n is a, c, g, or t
cccccgggctgcaggaattcggcacgaggcaccctgccaagactgtctctgaacggggtccggtttaagcggatatcggggacatccatagccttcaaaaatattgcttccaaaattgccaatgagctaaagctgtaacccagtgattatgatgtaaattaagtagcaattaaagtgttttcctgaacactgatggaaatgtatagaataatatttaggcaataacgtctgcatcttctaaatcatgaaattaaagtctgaggacgagagcacgcctgggagcgaaagctggccttttttctacgaatgcactacattaaagatgtgcaacctatgcgccccctgccctacttccgttaccctgagagtcggcgtgtggccccatctccatgtgcctcccgtctgggtgggtgtgagagtggacggtatgtgtgtgaagtggtgtatatggaagcatctccctacactggcagccagtcattactagtacctctgcgggagatcatccggtgctaaaacattacagttgccaaggaggaaaatactgaatgactgctaagaattaaccttaagaccagttcatagttaatacaggtttacagttcatgcctgtgnnnnnnnnnnnnnnnnnnnnnnnnnnnnnagtgcaaaaggtttaaatttatagttgtgaacattgcttgtgtgtgtttttctaagtagattcacaagataattaaaaattcactttttctcagt

SEQ ID NO: 19304 - DNA, 1067 bp, Homo Sapiens
gcacgaggatttgattagttgaaaacacttccgactaaggaagcagagagcccacaatcctgtgggaaaacaggcctgggaactaatatctcaggggtagtgagggtcgggcccagatcctcaaaggttccctgcccctgaaattgcacctttgacagctgctgaattccaagcacagcggtaagtgctttacatggggtaaccctaaaaaacacactgggcctcagacactcccgtacacacacccaacctctaccctgtggatgtcctagataagggttttctcttcacaaaggtaaatcaactctttgcctccttagggagggaaggaataaaggcattatttttgagacttttctgcagtccattctgcaggtatcagtagtgggtaatccctccaacgtccaggactccaaacgagcagctgctccctaaagctcacccaccaatcctggccctccacctgctactggggtagaggcctgggctacagacacagaggctgggcttctgcccagctgccagtggtgagacatggccttcaggagctcaggtggctttttaactgcaccatgaagattccaaacttggtggagttcagtgtccacacataacgaatgagaacaggtgtcagcagtgtcaaccaggtccgcaaaggggagaataaaaaagctagggtgccgtatgttgcataaagaaagtagcaggaataaacctgccagatgtacagcagtagcataagtaggtgaacaggcataattttcaagtattttctttgatggagatgagacctgaagttgtgaccaaagcaccgctgcagcaagctccaacacatgtaagccatcaaggggatgttaaaaaacgccagctggagaattccaattataaatgttatgctgccttgtaggaaatgtccattaacaaatatcccaaaggaaaagcagcaaccaaatttgccatcaatgatttcaccaaaaaaccatggacccagcactgtatacagggtcaacaacaacacagaatagtagaagatgtttattttgctcaagacatgaagagcctcgtgc

SEQ ID NO: 19305 - DNA, 1175 bp, Homo Sapiens
  misc_feature (820)..(865): n is a, c, g, or t
gcacgaggccagattttaaaaaataatttgagtgcttggaaactattagctttttaagttccttccaaatatgttagtacctaccctttactttttccccaagaccatctcagggtggagcattctgtctaagagaagaaagataaggaggctcccacccacctctcccaagagcagacattaaacatctttgtgctttgaagagagtgaattttggatagtcttgtgattctcagactaacttccagaattatactttaacccctcccagatatggtccgcctttggcattgtgtgtacatctgcagttttgcatggtgggttgttaatatttcaaatgtgtggtttatgaatacgtctgtataatcggcttctggagtgaaacagcaaaccccaaatcttcaaagttggaaggaactttaaaaatcatccggtccaatctctttcctctttctgccacctcccaaggcagaaatcccctcttcagcttcttttgtaggtgggaatccagcctctgttagatatgtccagagatggaaactcactcccctacaaaagatggagcttaatggagaaattgcaactttcattaaaaaacaaattcagatgaaatatcagtaactgtcttggacagtgctgaaatcaggtggttaaacgggtaaacaaaatatactgtattttgagaaatggcacaaaaacaggcagtcatctttaagggctatgcctaggcaaactactaacatgcattgtgagaatgccgtgtatacctcacgtactgtgtactttgtacatatattttaccttttatacctatgttcgnnnnnnnnnnnnnnnnnnnnnnnnnnnnnnnnnnnnnnnnnnnnnngtctgtgtctgtctgaataacctgcgtgtctaaaaccacgtgaaatgtgaatgattattggcaatattaccttgacagaatcatgggactttgagaagagggaggacagaggcctctgtcgcactaacgctctcgtggttgctcgactgttgtatctgtgatacattatccgactaaggactctgggctggcagggccttctgccgggaaagctagaaacactagttcttcctgtacatacgtgtatatatgtgaacagtgagatggccgtttctgacttgtagagaaattttaataaacctggtttcgt

SEQ ID NO: 19306 - DNA, 1184 bp, Homo Sapiens
gcacgaggggcagatatgtcctcacccacacagcgaacctacagcagctccctcaaacgctccagccccaggaccatctcctttcggatgaaacccaagaaagaaaactcggaaacaaccctaactcgcagtgccagcatgaagctcccagacaacacagtgaagttgggagagaagctggagagataccacacggccatacggagatcagaatctgtcaagtctcggggtctgccttgcactgagttattcgtggctcctgtgggtgtagccagcaagcgccacctctttgagaaggaactggcgggccagagccgagcagaaccagcctccagccggaaggagaacttgaggctctcaggggttgtgacatcaaggctcaacctgtggatcagcaggacccaggaatctggagatcaggacccccaggaggcacagaaagcatcatctgcaaccgagaggactcagtggggacagaaatctgactcctcgctggacgctgaggtgtgacaagccccgccaagacagacctgcaagtcttcgtctcaagggacctccctcatgccaggcccctgcctctcacagcagcaccctttcctctcattgtccctgttccctttttgcctgtggatctgtttggccagggtccctggggtcaggaatatttgcaagactcagccagctccttcccagcccagcctcttggggctgggactttctcaccctgcggcaggcacaacagatgctgggacccagtctctgcccaggtcacagcacaagtgcacatcagcactatggggcctatgtcctgcccagagacctctgctccttcctgctcacatccacagtcagggcacggcgcccctcaagaactccagagtcacctgtctcatcggctcccagcaagtgcctctttgtctatgatgtcccccttctctgaggcctggacccacccatctttgtccctggggcctgctcccagccactgaggcccgctctgccaggggagaaggagctgccgtgcgtcttccctgtgccccgtctccctgcttggttctcccctcccttccctggccggctgccatggccaggagctaagtgcctttttgtgtgcaaccacttaccctttctctgaaaaacctgttctcaggaaggatctgataaactcatttactctcaggtgt

SEQ ID NO: 19307 - DNA, 718 bp, Homo Sapiens
gcacgagggcggagcggagcggcggcgggcgcagctagcgggtcggccgcggagcggaggtgcagctcggcttcccccggcacccctccccctcgggcgccagccccacccctccgccggccgggccgaccccgccgtactatcccctgcggcgcgagcccggggcggctccaagcgccccccagcagacccccatcatgggcagccagagctccaaggctccccggggcgacgtgaccgccgaggaggcagcaggcgcttcccccgcgaaggccaacggccaggagaatggccacgtgaaaagcaatggagacttatcccccaagggtgaaggggagtcgccccctgtgaacggaacagatgaggcagccggggccactggcgatgccatcgagccagcaccccctagccagggtgctgaggccaagggggaggtcccccccaaggagacccccaagaagaagaagaaattctctttcaagaagcctttcaaattgagcggcctgtccttcaagagaaatcggaaggagggtgggggtgattcttctgcctcctcacccacagaggaagagcaggagcagggggagatcggtgcctgcagcgacgagggcactgctcaggaagggaaggccgcagccacccctgagagctaggaaccccaggccaatggggcagaggctagtgcagcctcagaagaagaggcagggccccaggctac

SEQ ID NO: 19308 - DNA, 798 bp, Homo Sapiens
gcacgaggaattagtcagccatatttattttccagaggtttaagaaattgctgtttttaactttttgaaaaaacttaaatgccaccaaactcatgtaggttgcactgcttattgaaccaataactgttggtatgcactttgttcagacacactgtgtactttttcaaaaactagtttcatgtaaagtgattggaccccatagattagtggaaaaagctgattaaccagctactcataggctgctaattcattcatgccaatgttttggtttttcagttttgcctccgtgataaattaaagaatggggaggggtgaaggaaggggaagaagattgctttagaacaagtggcatgaaattaccatctttgtagaaaccgcagctaacagtgggagttatctaagcaatcagatgttacagggccagccctttagctgctgtggtgtattctgttgggtagtgaggtagtaggtactttatagacttttaattttggaaattgatgacatccctcaggcatgtattctggaaatggaattcctgtaacttcctgtgtctgcagtatgccctacaattagtaggcagcgtgtaaaaacactagtgtagattataaagatatacattaaaagaggaccagaaatacttggtattcagtggcacagaaagcaggttaaacaaacaaaaagcacagtgttacgcttgcaagtttccatttgttttaataccacgcaatctttcacactcgtgcgtgtgcgcgcacacagagcttacctgacttgctctgcttgagtcatgcagtt

SEQ ID NO: 19309 - DNA, 1256 bp, Homo Sapiens
gcacgaggagacttcattgctgtagtttggattaactcccctcccgcctacccccatcccaaactgcatttataattttgtgactgaggatcatttgtttgttaatgtactgtgcctttaactttagacaactttttattttgatgtcctgttggctcagtaatgctcaagatatcaattgttttgacaaaataaatttactgaacttgggctaaaatcaaaccttggcacacaggtgtgatacaacttaacaggaatcatcgattcatccataaataatataaggaaaaacttatgcggtagcctgcattagggctttttgatacttgcagattgggggaaaacaacaaatgtcttgaagcatattaatggaattagtttctaatgtggcaaactgtattaagttaaagttctgatttgctcactctatcctggataggtatttagaacctgatagtctttaagccattccagtcatgatgaggtgatgtatgaatacatgcatacattcaaagcactgttttcaaagttaatgcaagtaaatacagcaattcctctttcaacgtttaggcagatcattaattatgagctagccaaatgtgggcatactattacagggaaagtttaaaggtctgataacttgaaataggtttttaggagaattcatctacttagactttttaaatgcctgccataaatgaaattgaaatggtagaatggctgaccacagcaatgaccagccctcattagggccctggatgatttttggtctaataacgcatgctagtgttgatgttttttggtcaagagggtatgaacaggaagaattaaatgcagcaggctttattttaaatgccgattcacattactctgttcaagctgcgttgagatgttaaactggcttactatagacttcgtaaaaatggctccagaagagtaacaaactgaaatctttgagatcacacaggttggaaatatgtacataactgcacaaggtgtcaattctgctctacagtgcagttttagtcagttttagttgcataggtttccattgtatttatagtctgtttatgctaatctggccaaagatgagcattgtccaccactaaaatgcctctgccactttgaattctgtgctacttttgtggccagaatgcggtgatcaaaacgctcccatctttttacagtggcataggaagacggcaaaattttctaagtgcaataaattttcaagtgtattgtgccttgttctaaaa

SEQ ID NO: 19310 - DNA, 721 bp, Homo Sapiens
gcacgaggctttgtgagccggatccgggcacagcgctgccagatggtgcaaaccgatatgcagtatgtcttcatataccaagcccttctggagcattatctctatggagatacagaactggaagtgacctctctagaaacccacctgcagaaaatttacaacaaaatcccagggaccagcaacaatggattagaggaggagtttaagaagttaacatcaatcaaaatccagaatgacaagatgcggactggaaaccttccagccaacatgaagaagaaccgtgttttacagatcattccatatgaattcaacagagtgatcattccagttaagcggggcgaagagaatacagactatgtgaacgcatcctttattgatggctaccggcagaaggactcctatatcgccagccagggccctcttctccacacaattgaggacttctggcgaatgatctgggagtatattgatgcattctcagattatgccaacttcaagtaagcggcaacaagggtccgtggaccaggaggattgcctttaatattttgtaatattctgttttgttaatataccccaaattgtgtatatatcttataactgttttagaaattggtacataggcttctattacctattaggtggaaattttatatgtaaatgtgttagcactgatagtcctttttccaatgttttattggggaattaaatagtgtgatgtttg

SEQ ID NO: 19311 - DNA, 928 bp, Homo Sapiens
gcacgagggtggccttggtggttcacatggccccagcatctgtgcttgtggacagcaggtaccagcagtggatggagaggtttgggcctgacacccagcacttggtcctgaatgagaactgtgcctcagttcacaaccttcgcagccacaagattcaaacccagctcaacctcatccacccggacatcttccccctgctcaccagtttccgctgtaagaaggagggccccaccctcagtgtgcccatggttcagggtgaatgcctcctcaagtaccagctccgtcccaggagggagtggcagagggatgccattattacttgcaatcctgaggaattcatagttgaggcgctgcagcttcccaacttccagcagagcgtgcaggagtacaggaggagtgcgcaggacggcccagccccagcagagaaaagaagtcagtacccagaaatcatcttccttggaacagggtctgccatcccgatgaagattcgaaatgtcagtgccacacttgtcaacataagccccgacacgtctctgctactggactgtggtgagggcacgtttgggcagctgtgccgtcattacggagaccaggtggacagggtcctgggcaccctggctgctgtgtttgtgtcccacctgcacgcagatcaccacacgggcttgccaagtatcttgctgcagagagaacgcgccttggcatctttgggaaagccgcttcaccctttgctggtggttgcccccaaccagctcaaagcctggctccagcagtaccacaaccagtgccaggagggtcctgcaccacatcagtatgattcctgccaaatgccttcaggaaggggctgagatctccagtcctgcagtggaaagattgatcagtcgctgttgcgaacatgtgatttggagagtttcagacctgtctggtgcgg

SEQ ID NO: 19312 - DNA, 1480 bp, Homo Sapiens
  misc_feature (1168)..(1182): n is a, c, g, or t
cgcacgaggatcacgctacagcagcagctaaaagaactgacagccccggatgagaacatcccagcgaagatcctttcttataaccgtgccaatcgagctgttgcaattctttgtaaccatcagagggcaccaccaaaaacttttgagaagtctatgatgaacttgcaaactaagattgatgccaagaaggaggagctagcagatgcccggagagacctgaaaagtgctaaggctgatgccaaggtcatgaaggatgcaaagacgaagaaggtagtagagtcaaagaagaaggctgttcagagactggaggaacagttgatgaagctggaagttcaagccacagaccgagaggaaaataaacagattgccctgggaacctccaaactcaattatctggaccctaggatcacagtggcttggtgcaagaagtggggtgtcccaattgagaagatttacaacaaaacccagcgggagaagtttgcctgggccattgacatggctgatgaagactatgagttttagccagtctcaagaggcagagttctgtgaagaggaacagtgtggtttgggaaagatggataaactgagcctcacttgccctcgtgcctgggggagagaggcagcaagtcttaacaaaccaacatctttgcgaaaagataaacctggagatattataagggagagctgagccagttgtcctatggacaacttatttaaaaatatttcagatatcaaaattctagctgtatgatttgttttgaattttgtttttattttcaagagggcaagtggatgggaatttgtcagcgttctaccaggcaaattcactgtttcactgaaatgtttggattctcttagctactgtatgcaaagtccgattatattggtgcgtttttacagttagggttttgcaataacttctatattttaatagaaataaattcctaaactcccttccctctctcccatttcaggaatttaaaattaagtagaacaaaaaacccagcgcacctgttagagtcgtcactctctattgtcatggggatcaattttcattaaacttgaagcagtcgtggctttggcagtgttttggttcagacacctgttcacagaaaaagcatgatgggaaaatatttcctgacaagagtgttcctttttaaatgtgaannnnnnnnnnnnnnnaattattttaaaatatttaaacctttttcttgattttaaagatcgtgtagattggggttggggagggatgaagggcgagtgaatttaaggataatgaaataatcagtgactgaaaccattttcccatcatcctttgttttgagcattcgctgtaccctttaagatatccatctttttctttttaaccctaatctttcacttgaaagattttattgtataaaaagtttcacaggtcaataaaattagaggaaaatgaattttaaaaggaaaacctcgtgccgaattcctgcagcccggg

SEQ ID NO: 19313 - DNA, 1519 bp, Homo Sapiens
  misc_feature (1204)..(1228): n is a, c, g, or t
tttgtattttgaagtgttaaagtacacctgaagactgttagctatttattctctgataaaggtggacactggttaggggtgaaactcatgaaaaatggcatcatatttgtgtttgtggatgtgtgtgtgtcaactttttttcttttatctaggattagtccaaagagtgatattactgacactggcctggcacagagcaacaatttgcaggtccccagttcttcagaaccaagcagcctcaaaggttccacatctctgcttgttcacccggtttcaggagtgagaaaagagcagggaggtggttgtcattcagatacttgaagaacattttctctcgttactcagaagcaaatttgtgttacactggaagtgacctatgcactgttttgtaagaatcactgttacattcttcttttgcacttaaagttgcattgcctactgttatactggaaaaaatagagttcaagaataatatgactcatttcacacaaaggttaatgacaacaatatacctgaaaacagaaatgtgcaggttaataatatttttttaatagtgtgggaggacagagttagaggaatcttccttttctatttatgaagattctactcttggtaagagtattttaagatgtactatgctattttacttttttgatataaaatcaagatatttctttgctgaagtatttaaatcttatccttgtatctttttatacatatttgaaaataagcttatatgtatttgaacttttttgaaatcctattcaagtatttttatcatgctattgtgatattttagcactttggtagcttttacactgaatttctaagaaaattgtaaaatagtcttcttttatactgtaaaaaaagatataccaaaaagtcttataataggaatttaactttaaaaacccacttattgataccttaccatctaaaatgtgtgatttttatagtctcgttttaggaatttcacagatctaaattatgtaactgaaataaggtgcttactcaaagagtgtccactattgattgtattatgctgctcactgatccttctgcatatttaaaataaaatgtcctaaagggttagtagacaaaatgttagtcttttgtatattaggccaagtgcaattgacttcccttttttaatgtttcatgaccacccattgattgtattataaccacttacagttgcttatannnnnnnnnnnnnnnnnnnnnnnnnaacatttagaatattacattttgtattatacagtacctttctcagacattttgtagaattcatttcggcagctcactaggattttgctgaacattaaaaagtgtgatagcgatattagtgccaatcaaatggaaaaaaggtagtcttattaacaagacacaacgtttttatacaacatactttaaaatattgaggagttttcttaattttgtttcctattaagtataattctttgggcaagattttctgatgctttgatttctctcatttagcattgcctttgggtttttt

SEQ ID NO: 19314 - DNA, 1190 bp, Homo Sapiens
gcacgaggcgggccccggcggagcggcgggcaaaggtcccaggaaggtggcgtcagcatctgcagccgcgtcgacgttgtcggagcctccgcggaggacccaggagagccggactaggaccagggccctgggcctccccacactccccatggagaagctggcggcctctacagagccccaagggcctcggccggtcctgggccgtgagagtgtccaggtgcccgatgaccaagactttcgcagcttccggtcagagtgtgaggctgaggtgggctggaacctgacctatagcagggctggggtgtctgtctgggtgcaggctgtggagatggatcggacgctgcacaagatcaagtgccggatggagtgctgtgatgtgccagccgagacactctacgacgtcctacacgacattgagtaccgcaagaaatgggacagcaacgtcattgagacttttgacatcgcccgcttgacagtcaacgctgacgtgggctattactcctggaggtgtcccaagcccctgaagaaccgtgatgtcatcaccctccgctcctggctccccatgggcgctgattacatcattatgaactactcagtcaaacatcccaaatacccacctcggaaagacttggtccgagctgtgtccatccagacgggctacctcatccagagcacagggcccaagagctgcgtcatcacctacctggcccaggtggaccccaaaggctccttacccaagtgggtggtgaataaatcttctcagttcctggctcccaaggccatgaagaagatgtacaaggcgtgcctcaagtaccccgagtggaaacagaagcacctgcctcacttcaagccgtggctgcacccggagcagagcccgttgccgagcctggcgctgtcggagctgtcggtgcagcatgcggactcactggagaacatcgacgagagcgcggtggccgagagcagagaggagcggatgggcggcgcgggcggcgagggcagcgacgacgacacctcgctcacctgagcgccgcaccgcttcagggacggagacaggaccgggcgagccctggggcggcggccgctcctgcactttctcccctcccccacccggcacctggtggcaccgggccaggcccaggcgggtgctgcagcctggctggacagaccccaataaacgatcccacagcctc

SEQ ID NO: 19315 - DNA, 714 bp, Homo Sapiens
gcacgaggtctacagcaagctggatcaagaggatgcgctcctgggctcctaccctgtagatgacggctgccgcatccacgtcattgaccacagtggcgcccgccttggtgagtatgaggacgtgtcccgggtggagaagtacacgatctcacaagaagcctacgaccagaggcaagacacggtccgctctttcctgaagcgcagcaagctcggccggtacaacgaggaggagcgggctcagcaggaggccgaggccgcccagcgcctggccgaggagaaggcccaggccagctccatccccgtgggcagccgctgtgaggtgcgggcggcgggacaatcccctcgccggggcaccgtcatgtatgtaggtctcacagatttcaagcctggctactggattggtgtccgctatgatgagccactggggaaaaatgatggcagtgtgaatgggaaacgctacttcgaatgccaggccaagtatggcgcctttgtcaagccagcagtcgtgacggtgggggacttcccggaggaggactacgggttggacgagatatgacacctaaggaattcccctgcttcagctcctagctcagccactgactgcccctcctgtgtgtgcccatggcccttttctcctgaccccattttaattttattcattttttcctttgccattgatttttgagactcatgcattaaattcactagaaaccc

SEQ ID NO: 19316 - DNA, 816 bp, Homo Sapiens
gcacgaggacctaacaggtttttctccgtgaatcttatgctgagtagtttttcctcataaccaagcatttatgatatattactacttataatactgtggctagtctctagaatggatgttgaaatctttgcctcctcagtcgggaagagtcctgctaaaaatcaggctaaaaatcaggccaaaaatcaggccaaatgacttggcaaataattgacaaagtggttttcacgtgtgtctatctttgctagcagcttgtatacctcaggccaggtgagctccccaaatttcttttttcatttactccagtgagtttctgctgtctttttcaagtatgtaccataggacttaaaggtgatttggatgcgttgtaacactgctaaatatgctaagtacagaattttatctacagtactgtgagacagtcaattattgcctagggtagttcaaaaatatgatgtgagctagttaagcctttgcttgactgatttcagtgatattcagaagtgtgtaccaatcaaggctctttaaaatacggaacgactcacttaataaccagggaaccagccaaatactgtgcagccgcagaatatgcatatcaatgagttggaggtgattattctctgtaactccctaatgattgttttctaagcattgtggcttctcagtggcttgacagcatcttcctggttgtatgtggcctgtttacatgatgtattgaataatgttgtttgttgtgagcatcaatgcctgtaacaccaaactaaacacgtgtttttgggatatgtttcaatctttaaatgaccttgcccctgtcca

SEQ ID NO: 19317 - DNA, 1564 bp, Homo Sapiens
gcacgaggctgaagatggcggctgctgtaggacggttgctccgagcgtcggttgcccgacatgtgagtgccattccttggggcatttctgccactgcagccctcaggcctgctgcatgtggaagaacgagcttgacaaatttattgtgttctggttccagtcaagcaaaattattcagcaccagttcctcatgccatgcacctgctgtcacccagcatgcaccctattttaagggtacagccgttgtcaatggagagttcaaagacctaagccttgatgactttaaggggaaatatttggtgcttttcttctatcctttggatttcacctttgtgtgtcctacagaaattgttgcttttagtgacaaagctaacgaatttcacgatgtgaactgtgaagttgtcgcagtctcagtggattcccactttagccatcttgcctggataaatacaccaagaaagaatggtggtttgggccacatgaacatcgcactcttgtcagacttaactaagcagatttcccgagactacggtgtgctgttagaaggttctggtcttgcactaagaggtctcttcataattgaccccaatggagtcatcaagcatttgagcgtcaacgatctcccagtgggccgaagcgtggaagaaaccctccgcttggtgaaggcgttccagtatgtagaaacacatggagaagtctgcccagcgaactggacaccggattctcctacgatcaagccaagtccagctgcttccaaagagtactttcagaaggtaaatcagtagatcacccatgtgtatctgcaccttctcaactgagagaagaaccacagttgaaacctgcttttatcattttcaagatggttatttgtagaaggcaaggaaccaattatgcttgtattcataagtattactctaaatgttttgtttttgtaattctggctaagaccttttaaacatggttagttgctagtacaaggaatcgtttattggtaacatcttggtggctggctagctagtttctacagaacataatttgcctctatagaaggctattcttagatcatgtctcaatggaaacactcttctttcttagccttacttgaatcttgcctataataaagtagagcaacacacattgaaagcttctgatcaacggtcctgaaattttcatcttgaatgtctttgtattaaactgaattttcttttaagctaacaaagatcataattttcaatgattagccgtgtaactcctgcaatgaatgtttatgtgattgaagcaaatgtgaatcgtattattttaaaaagtggcagagtgacttaactgatcatgcatgatccctcatccctgaaattgagtttatgtagtcattttacttattttattcattagctaactttgtctatgtatatttctagatattgattagtgtaatcgattataaaggatatttatcaaatccagggattgcattttgaaattataattattttctttgctgaagtattcattgtaaaacatacaaaataaacatattttaaaacatttgcattttaccaccatt

SEQ ID NO: 19318 - DNA, 990 bp, Homo Sapiens
gcacgagggcccgagtaaattcttcagccacgaagggatggatgtgcatctgccctaagtcagattgaagcctcctcctaggctccaggaggagcatgtgcaggaagggttggcctgagccagagccggcaccccagctccttcctccagctccccgcacccaccggccctgacctggcttcccctcggctgtgtagggacaaagccgaagcccagtgccatgactgcccgcggattgaaaaacagaaacacaaaactttgacttgacttgcgaagtgaagcagggttttcatttttactctccttggtttaggtctagaaagaagaatactgacctgagaggaggcccagtgagattctgaaacctaattcttcgaaggcgtactggcccttagttcagttattttagttgtataagttgatattttttttctggaatgtagccatttgctgttatctgggaaacaagattctaacaggaaaccagcctaagacacttcaggttgagcgctgcctcggagtctgtgcccgtcgcgtcccctgcttgagttttgcacttggaagaaccctgcaccggctggcgtgtgcgacggcccagtcccatccagagcatggagcccgaccccagccagcgccttccactccatcatttcatttcacacccccgaagggaggggaggccaggaggggagctgctcctgccagaagctggtgggtgaccgttgggaatcggccacacctggtgtccatgggcagcctggtgcaattccattcatttgtacagaaacatttttgaaaaattcttttcaataagatgcaaaatcttccaacttttcaacccaacgtgatgaatatttgattttgttctagatttcctgtagctgtgaattgttaaaatgtatgattcaggataaaacgtaaacacgtgctgttagtaatttcttgtggatttcattgttttgccttcaaataaagcctttttttaaagac

SEQ ID NO: 19319 - DNA, 1059 bp, Homo Sapiens
ggctgcaggaattcggcacgaggcagccccttcccaagctgggagacggcagaagagatagaatcagggctgcccccacagagtgggacccaaggggctaattggaggcacgaggggacccctccccagggccttttcctcctctgcgtcttccatctactgaaatgggagagggggtggggagcttctgttctggtgaagggacccgggcaggcccccagcaccccatgctgacttggagaaccccagatctctggggcccagccaggcagggtgtgggggcagctgtgccaatctacctcacaggcccaccccctgccgggcatgccgtgggatcatgggcagggaaggctctgggggtcggagacaccgctgcttagcacccccagccagaacaccctgagggtctcggggctctggagagagtggggcgggaggaagaattggcaccttcctagggaaggagacgagcgcttcgccttgattctccgagaagcctccgagaagtgctttaagtgtgtttgcatgcgccaggcggtgggcagcgggggcctgtccagccctctcccgccatccttccccaagtgacgtccactgccttgtcaccagcgacctgcctgtcatgcccaccccctgaggaagcatggggaccctaacaccctggtgccctgcaccagacaggccgtggtcaggcccaggccaccggccgggttctgccacagcttcccacgtgcttgctgacatgcgtgtgcctgtgtgtggtgtctgttgctgtgtcgtgaaactgtgaccatcactcagtccaaacaagtgagtggccctcgaggccacagttatgcaactttcagtgtgtgtcataacgacgtcactgctttttaaactcgataactctttattttagtaaaatgcccagagtcctgggaagctacgcggacttgcagaggttttattttttgggctttagaatctgcagaaattaggagcaccgaagcccagcgcagcagcttcggatccggattgcgttgccttaccggatatgttatacagatgaatataaat

SEQ ID NO: 19320 - DNA, 827 bp, Homo Sapiens
cattaattaatatattttctgcattatagttaacatatgtactttcttcgtgtcaccttattttccgttaagtattgatattttgttatattcaaacatgagtacatttcaacagtcttttgcaataaataccataaaataatagagattcgcataataaatattctttacaataaaaaagtttaacagacttttgtcttaaaaatagtcagaattcaactttgtgatttatacataaaatatacaaaaagcaccacaatttgtggttaaggcaaggaaaacacagaagagattagaattactcagctgttaactatccaaggggccaaaaggaccattaaggagccaagatcactttaggcagcatagttctgtgacacatatagattgatcagctataaatatcaacttgagttatccaagtgccctcaatgacaacaaaaatttggtgagaagcatggggtgaagaaggaaggtggctgagtccttcacaaatacgaaggctagagtgaagatgggcaaggtccaaccaatattatctccaatgtgaagatttacattgtaaggcgaatctaaaattacatagaaagaaaaaatacacttggcatctccagagtaagacaacaacaaaactgagggggaaagaaccttgaaggagaaagaaggagagggcagtggttaaaggaaaatttttacgttatagcaaaaaatatatcccccatgctacttaaggggcctatgctaggaagatagctctaactggagacagatttaatacatagcttatttaagcaattaaacagttgctttttaaaaaaccaatttcc

SEQ ID NO: 19321 - DNA, 1539 bp, Homo Sapiens
cgcacgagggagaagatggcggtctccacaggagttaaagttcctcgtaattttcgcttgttggaagaacttgaagaaggacaaaaaggagtaggcgacggtacagttagctggggccttgaagatgatgaagatatgacacttacaaggtggacaggcatgattattgggccaccaaggacaaattatgaaaacagaatatatagcctgaaagtagaatgtggacctaaatacccagaagctcctccgtcagttagatttgtaacaaaaattaatatgaacggaataaataattccagtgggatggtggatgcccggagcataccagtgttagcaaaatggcaaaattcatatagcattaaagttgtacttcaagagctaagacgtctaatgatgtccaaagaaaatatgaagcttccacagccaccagaaggacaaacatacaacaattaattttagtggatctcaaacttgtcttaaatcaacaaccttctactcatgttaatgtcttgattaaatatcacaatgcaaaatacacattaagtaaaagaattccagctggtaaacatgacctggacatttgtaagaatatatttaatatatgtacacccattatgttttcaggtaacaggaggaaaaatgcagcacaattttttttctcttgaaaggcactgtcatttaaacataaacctggagtactcgaaatagaattcaggtttacaagatgaaagcgtgtggagaagtgtcagatggcagtggaagcatgtgtgtttctaaaaagtaaaaatctcaagaaaacagaaatggcatgctttacccatcttacttagtgaaagagagctgcagttgaaattgtttaaaaagtagcaggtacaatgaatattgtcacagatgtgttaatttttgaagcaatgtgggtgctgactactagtagtatcaaaaatatgttcaggattgttttgatacctgtatttataataaaaaatgttggggggagttgatgaattcctgttaaaagctgttcttgtgtgttacatgtaacagacatggtaaatatttgtttacagtctttgtttaacaaaccatgcatttaagtttaagtgaagtcaacaaaaaggaaataggtgtatggatatgtgattttgagattaaagttagtcttaaaatgtaaataaaatgtgaaacgtgtcctcagagactgtgccatttctattatgttgatgtatatgtacagtaccttgccagggaagcaaaaattggaattattgtagcttttcatgtatacacacttttatttaccctattttgtgtacttcttgtgaattataatttgcagactatttcagaaaagaaattatctagtttaatttcttctttggacaaggagtcctaggtattatattttgagtttgatttcaccagaaataataatattaaaaagatctttgcattctggcagttcttttaggattataggttgcaaattatccaaatatatatcccattttttaaagcataatatcttttttagttgttttc

SEQ ID NO: 19322 - DNA, 694 bp, Homo Sapiens
ccccgggctgcaggaattcggcacgaggcatacgtgttgctgccatcgcaggagccttcacggagcagattctgagggacatggcctccttccacgagcgccctatcatctttgccctgagcaaccccaccagcaaggccgagtgcacggctgagaagtgctaccgggtcaccgagggccgagggatttttgccagtggaagtccttttaagagtgtgactctggaagatggcaagaccttcattcctgggcagggaaacaatgcttacgtgttccccggggtggcactgggagtcatcgccggcgggatccggcacatcccagatgagatcttcctcctgacagcagagcaaattgcccaggaagtctctgagcagcatctgtcccaggggagactctacccaccactcagcaccatccgagacgtgtctttgagaattgccatcaaagttctcgactacgcgtacaaacacaacctggcttcctactacccagagcctaaggacaaggaggcttttgtaagatccctggtctacactccagactatgactcctttacactggacagctacacttggcccaaggaagccatgaatgttcagacggtctgaggcagtctcagaggctagtatggggctagatgaagctcagagtaacacccacaatataaatgggttccaaaatggcccaagtg

SEQ ID NO: 19323 - DNA, 799 bp, Homo Sapiens
  misc_feature (278)..(290): n is a, c, g, or t
gcacgaggctataatgtaccctagtagtcgaacatacttttgattgtacaattgtacatttgtatacctgtaatgtaaatgtggagaagtttgaatcaacataaacacgttttttggtaagaaaagagaattagccagccctgtgcattcagtgtatattctcaccttttatggtcgtagcatatagtgttgtatattgtaaattgtaatttcaaccagaagtaaatttttttcctttgaaggaataaatgttctttatacagcctagttaatgtttnnnnnnnnnnnnntagcttggttttatttgtcatctagtctcaagtatagcgagattctttctaaatgttattcaagattgagttctcactagtgtttttttaatcctaaaaaagtaatgttttgattttgtgacagtcaaaaggacgtgcaaaagtctagccttgcccgagctttccttacaatcagagcccctctcaccttgtaaagtgtgaatcgcccttcccttttgtacagaagatgaactgtattttgcattttgtctacttgtaagtgaatgtaacatactgtcaattttccttgtttgaatatagaattgtaacactacacggtgtacatttccagagccttgtgtatatttccaatgaacttttttgcaagcacacttgtaaccatatgtgtataattaacaaacctgtgtatgcttatgcctgggcaactattttttgtaactcttgtgtagattgtctctaaacaatgtgtgatctttattttgaaaaatacagaactttggaatctgaaa

SEQ ID NO: 19324 - DNA, 1310 bp, Homo Sapiens
  misc_feature (190)..(198): n is a, c, g, or t
  misc_feature (1177)..(1185): n is a, c, g, or t
aaaagcaggcataaaatacaattacattactacgaagatgcaacaaaattttaaaaaagaaaaaggggtgcaatttttttcagagaggacagctgatcaaatatttataattttctaaaccatgcagttcattacttattacaattccaaacaaaactcattattatggggatgggagtcagggagaggnnnnnnnnnaagcatgatatccagcgctgtcacacagtgcttatgttcaaagtgcttacaaatggtgtcttcacagcatagggaagctgaagccttattccagggaaggagaggtgagtcagtagcagtgtcaatgcagactcagaagctcggcagtgacttgctcaaatcagattttagacacgatttaaagcatgtttcagtaaggttaatatagtgtccgagtttctctactttaccaccagaatcctagaagagagtaacagcagcagcataacttcttaaaactgtggtgtggcaacctagagtatttctgtttaagatctatatataaatggatgcaaaatagatactttagagccagattcatgtaactctaacacaggttagttttaaaggcactaacctttactttggctttactggtatgcttatccattagttagctggaacattttaaaactttcatatagatttttaaaacttgtttctagagaacatggttttttaaaattaatactttaaaaacattcactgtacattaatttcaacagtaataccggcaccagttttcctttcacttctgtctcgttatccccacaaaacaaaagtaaaaaatccaataagaaaatcccagtattcatgatttcttagttccccataggaggtatttatggttctaggagaaatcaggtgtgaaggaacaagcaaattttagtcttatatttatcttggaagcttcagggcctcaagaaaaacgagaaacgagcacaaaatcaggttgttttatatttaataagtgttgggaagaaaacacattgataggtgcatgcactcatgtatgtacatgaaagcggcaatgcggtaaaaagcgaattcttacccaaggtcagaattttttattaagcgcattttcattagttggacaaacaaccttataaacccttatgtcaaaccatataatgtgaagaatctccatgggagagannnnnnnnncacccttcagaattatctttttcccctaagaccttcatatgaatcttccttgtacagttggtcacaccatgattccccatattctctaatatatacagcattccaaatttaaacttttgcggacg

SEQ ID NO: 19325 - DNA, 810 bp, Homo Sapiens
ccatgagcaaactgaactttaatttgcttacctgaaaggcttgctcttcattattggcataggccacagctatttacacagaatcattgtacaggatttacagcaagatgctacacatagcatcattctggataagcgacaaaggagtaagaacagactggggaataaagctctgaaatcaaagtgtaagcaaaaatctgaaggtaggtgtacaaggaaggataagggccaaatgatgagcgaggttggtgaggtagacataagggaggaaaaggaaacatccaacaacttgtggtgcagagatataagggaagagtccactggcacatagtcttaaaaattatgtttggagtttgaaggaggaaaaatctgccataagccacctctgtgaaaaaaaagaaggcagttagaaccttacaggccaaaccttatacctcccctatcaaaaagtaattctgctgattaaatccctggataggaaaatgaaaaggttgaaaaaagaaagagagagatgcatagacacagaaccttaaacagagttaagagacacaaagtaaatatattcaagagagacacaaagaaagaggaaaagaacagaagctcaggcacatctagaaattaaagacatcctattaacttcacgagtcatctttccttacctcatcttccccaaagctcttcctccacccctaaatctctgaatttctaactttaaccaaagagtagaattcgaatgagggctgggcacatggggggacgatctaagattccatctcaccaatttcaggtcccctccttatcctgtacccg

SEQ ID NO: 19326 - DNA, 1235 bp, Homo Sapiens
gcacgaggcttatatctggcctctgctttctcctttaattgtaaagtaaaagctataaagcagtatttttcttgacaaatggcatatgttttccacttctttgcatgcgtttaagtcagtttatacacaaaatggattttattttttagtttaactgtgtttctccgacagctcacctctccctgaccagccagccatttccttcctgtgctccacgttcttctgtgtgattaaaataagaatattatttttggaaatatgcaactccttttcagagatcaggagggatttatgtagcagctatttttactgcaaaagtaattcactggaaaaaaaatgtaatttgtaagaaagctttatttttatctcagctctatgtaaagttaaagttactgtacagagctgaaggacggggggcggtaggggtcttgatgaaacctcttgaacgaagcacagtttgtcccatctttgttcactcgtgtgtctcaaccatcttaatagcatgctgctcctttttgctcagtgtccacagcaagatgacgtgattcttattttcttggacacagactattctgaggcacagagcggggacttaagatgggaaagagaaagcatcggagccattcattcggagaaaacgttttgatcaaaatggagacttttgtagtcgtttcaaaagagcacctgagtcatgtgtattcccggcctttataaatgacccggtcaagttggtttcaaagtccgacaggcttgtctgtttactagctgcgtggccttggacgggtggctgacatctgtaaagaatcctcctgtgatgaaactgaggaatcgggtggccgggcaagctgggaagagcaaagccagagctgcgctgcctcaatacccacaaaagaccattcccagtatacataagcacaggatgtttttctcaagagggatgtatttatcacttggacatctgtttataatataaacagacatgtgactgggaacatcttgctgccaaaagaatcctaggcagtggctcattgtatgtgaggttgaaccacgtgaaattgccaatattaggctggcttttatctacaaagaaggagtttcatggggttcagcctaacagttatggaaactacagtccttataaaccattggcatggtaataaacagatcttaagtataaaaattttgtaattgggcctttactctctcaataataaagtattttgtttacctcgtgc

SEQ ID NO: 19327 - DNA, 1475 bp, Homo Sapiens
  misc_feature (1104)..(1116): n is a, c, g, or t
  misc_feature (1266)..(1288): n is a, c, g, or t
gcacgaggagcatctcataaagtttgttctatttgaagttttttagagtacttgagaaatgaatttagtctgcaggtagtaagtatgctactaaaatacgttagatctaaatccttttatttggtataaaaatgcaatattgagaatcaaaacttgtttttaagagaactatagattctacacaacctgatttcaagtaattattcatagtatttatagttgtcttggcaaagtgattgtaaaattctgtaggacctattcacacttcttccttcttccatatacttctctggttttccccatagttcccctataatttcaagtttgttgaaacctgttaattttagtgggggattagaagaaaaacttggtggtttcttagcatgatggtgtatgtatgtggtaatggaaagtctgtaaaagtaaatatagtgtagcaaaaaagatttcactgagtattttagatactagtgcaaataaagatagaaaatcttgatcataatgtcttaagtttgggaactgtgatattaagaaaagaaattcccttctagaggtgctggccaaaaagcctttgggctaacttaagtattaaatttatatatttaaataattatattttaagttgtagaggattttcccaaggattttatgcttacttgaatgttctttgaatgttcagatgcatatcctaactggatgcttctcaaggccttactgcatatttgtgttgcatatttatgttagttgcaccagggccatttgtagtttgggcaaccgaatgccttaattggaaaaaaggcattgtggtttcccctatgatctaaattgttacattttaccatttcattccgaagttggttttactttattaaatgaagatttagttttcatatcgtatacatagctgtatagatttcaaaattaggttgttaatttgtgtcacttactatttttgtgttggtaatgctttaaatgcatacttaaaaatgaagtactgttatctaagctactgtgtttagaaaatgttaagaatgagcagaaatttttatagaaaagtataaacggaagaagagataagatactgcgaataggccctcaaacttnnnnnnnnnnnnnctttgccagttttaaggacatattttgattctttcagtattcttaacacctttttaaacaaagttcttgatagtacccactattattgggtttgttttatgccattattgattcttgatattcaagcatttacaatgtagcatatttgannnnnnnnnnnnnnnnnnnnnnnggcatcattaacatttcatttgaaatgcatattgttcttgaagtactttgtttttagcataaatgttgtgcattttatcttagtgtttggatgaaaacatttgtgttgtttagctttcatttgctttgtatatttaataatgtacctttattttccagtatgcctacattttgtattgccctcgtgc

SEQ ID NO: 19328 - DNA, 882 bp, Homo Sapiens
gcacgagggcgatatccagggaggtcaaggccatggcaagtctggataacgaattcgtgctgcgcctagaaggggttatcgagaaggtgaactgggaccaagatcccaagccggctctggtgactaaattcatggagaacggctccttgtcggggctgctgcagtcccagtgccctcggccctggccgctcctttgccgcctgctgaaagaagtggtgcttgggatgttttacctgcacgaccagaacccggtgctcctgcaccgggacctcaagccatccaacgtcctgctggacccagagctgcacgtcaagctggcagattttggcctgtccacatttcagggaggctcacagtcagggacagggtccggggagccagggggcaccctgggctacttggccccagaactgtttgttaacgtaaaccggaaggcctccacagccagtgacgtctacagcttcgggatcctaatgtgggcagtgcttgctggaagagaagttgagttgccaaccgaaccatcactcgtgtacgaagcagtgtgcaacaggcagaaccggccttcattggctgagctgccccaagccgggcctgagactcccggcttagaaggactgaaggagctaatgcagctctgctggagcagtgagcccaaggacagaccctccttccaggaatgcctaccaaaaactgatgaagtcttccagatggtggagaacaatatgaatgctgctgtctccacggtaaaggatttcctgtctcagctcagagcagcaataggagattttctatcccagagtcagggccaaggagggacagaaatggatggctttaggagaaccatagaaaaccagcactctcgtaatgatgtcatggttctga

SEQ ID NO: 19329 - DNA, 852 bp, Homo Sapiens
cccccgggctgcaggaattcggcacgaggagtttacctcctctgctctttgccacccgataactggatatcttttccttcaaaggaccctaaactgattgaaatttaagatatgtatcaaaaacattatttcatttaatgcacatctgttttgctgtttttgagcagtgtgcagtttagggttcatgataaatcattgaaccacatgtgtaacaactgaatgccaaatcttaaactcattagaaaaataacaaattaggttttgacacgcattcttaattggaataatggatcaaaaatagtggttcatgaccttaccaaacacccttgctactaataaaatcaaataacacttagaagggtatgtatttttagttagggtttcttgatcttggaggatgtttgaaagttaaaaattgaatttggtaaccaaaggactgatttatgggtctttcctatcttaaccaacgttttcttagttacctagatggccaagtacagtgcctggtatgtagtaagactcagtaaaaaagtggatttttaaaaataactcccaaagtgaatagtcaaaaatcctgttagcaaactgttatatattgctaagtttgttcttttaacagctggaatttattaagatgcattattttgattttattcactgcctaaaacactttgggtggtattgatggagttggtggattttcctccaagtgattaaatgaaatttgacgtatcttttcatccaaagttttgtacatcatgttttctaacggaaaaaaatgttaatatggcttttttgtattactaaaaatagctttgagattaaggaaaaataaataactcttgtacagtt

SEQ ID NO: 19330 - DNA, 891 bp, Homo Sapiens
gcacgagggcattaaacaatattttttcaatacagttttggacaaaacacaaagacattaagctcatttaacaagagacataagttaacacaatgtgtgctgctttcatgaggaggaaagaggcaagatcttagaggaatccaggatactggccaccaggaatcacaggatctcacaatacaatccacttctttaaaagccacaaaataagctagggaagaaaacccaaaacaaagaagatatgacatccaagtctccaccaaaagtatacaaatggcaagatttggagatgatctgctttctcacatgaggacaaataacagaggagccacacccaagtgccactgtggccacaagcctcatgggtggcgtgtgaggtaagcaccttaggatggcttctaattgcttgtccttgcattttaagcagcagttgggagagagaggcacactccataagtctcatcaccaaatatgacctaattaaattcctgctaagtcagtcagttgtaagacaaatcaccctcaaaaggactcaacgggtgcttccttttggaagaagtgtgtggagggtaaaggaaatgtgttcaatgtattggaatggacaataaaggactgagggagagggctagaaaatgattgatttttctggagaatagtgttttagacactagatagtacagatcatttaaaataaaggataaattctaagtaagtcattaagctaaggaaaaagcagtgatactagtaagccttaatattatactaaggaattgacccacttggagttggacactaattagtgctgagaggtttgtaaattactttaataactcctttctgtttgggggtgtatgctttttccatacctatctttcacatgtttttaacaac

SEQ ID NO: 19331 - DNA, 1387 bp, Homo Sapiens
  misc_feature (973)..(1069): n is a, c, g, or t
gcacgagggaagaatgtaactttgaatccagatcccaatgagattaaaagctattgttatgtgtcaaaggaagaactaaaagaacttctgaaaaaagcagccagtggtgaaattaagataacgccatggtttaaaattattgcagcgacttttctctttaaatggtgggataacttaaatcatttgaatcagtttgttgaccatgagaaaatatacagaatgtgaatatgtaggtaaatgattacagaaaaatttatctgcttaacaaacttagaatgactttttccttttaaatttagttctatcattaatttatcattaaatttagttctatcatttggtactatcattaatgtattatatacactgatactttaaaacttgtgtggaaaaaactaacttataattttgtatcacacaccctggatatgtgttctgtttctaagcgacatttgtgagagattattgtaaaatgagagcgagcaaataaaacttaatttaatctttgcagatacatacttatgggaaatttgaacaaatgagtgaaactctgtgtttttagtaggctgtgataaacatttccggagcacttgcagaggacttgctatttgccaggtgctttatgtatcattaaatttttctcatattcagaaaaaagtgcaaaggaaactattgtctcgctccttcaaaacagtcttaattaactttcatattagcagataaactagcagagcaggttcaagggaaatttaaatgatatggaccctaatttgtatcattctgagttgattgtgtggtttattcattctggaaacatgttgatacttacagtcagccactgcttttgataagtgatattgattaggttgaatcttcttgtaaatagtatttaccagttagcaaagtctgtgttttcagaattacagtgagcacagaggtgttcataaaatgggaattgagtcccactcggtannnnnnnnnnnnnnnnnnnnnnnnnnnnnnnnnnnnnnnnnnnnnnnnnnnnnnnnnnnnnnnnnnnnnnnnnnnnnnnnnnnnnnnnnnnnnnnnnttcatgtgacacccacagttatgccggatgttgccagatgcccctaggggacagagtcaacccccaactgaggaccactgtcctacagagtcaggaaatattgtagggagaaaaaaataacaacaacaaaggcctgtgttaatgttaaatagatgagattatggaatgtgtatattaatgttaaaaattgtaccttgatcaatgtactttttataaacttgccatagatatctcagatttgaaacctcaagacagatttattattcttaaatgctgtatgataatgaagaaaaataaaaatttatttcttgcaaagtt

SEQ ID NO: 19332 - DNA, 896 bp, Homo Sapiens
ccacgttcagtcgcagtttattaaagttagaagtgtctccatccaccccctacagaggcttgcgggggggttccagtctgctaaatatttcaaaagggggacctcattctatctactgatttatcaaatctcattaattaatttcccttgctgatatgaggggttgggagagaagggggacgtgggaatgtaaggaagagcgagagtggtcgggctcatggggtttgatggactgtgacccaggctggcgttgctcctctccggatttcactcctggctgaactggtgccttcggtaaacagctgcttaaagagtgcggggactgctgcagggacttcctttttccatcagtgccgcatggagctcctcggacagcgcaacgtcaaatgtcttcgtatcctgagagctcgctccttgaccagaaatctcatcataagaggccaggagacatactggaaaagtgactttcccagcagacgaggcccgaaacagggagtgggatggggctgaagagtggtgatttggtggccccgatgtagttctgccgcctgcagaagatgacccgggctctgaggttttgttcattttatgattatttttctgtaacaagccccagctcttcatgtcatttttattcatgcttttgaagaatctgttttcatcttttttcctatcagcctggagttggtctttgaatttttttaggctccctgtgatggagtcatgtcttgattttgcttcactgagttttttctccagttccagaggaacaggggttgggttgagaaactgaaactcttcactgcacaagacgactttgatatcctccagcagctgcctgggtggcatgttctgcttggtcttcagggaatcaacgagaaggttgagcctcgtgc

SEQ ID NO: 19333 - DNA, 931 bp, Homo Sapiens
gcacgaggcagacatttatttttaatagccaagtagttctgcaaatagttcttttaacaatttgacctctctccaaaacagagacacatataagtagtgctcatccatgcactactaataatacatggcttattccaaagtttttagtcaacttttgggacttggggtgcattttctcacagaaagaatagtagttaggttccctaacactaccgctgatagctcacctgggaactgaatccacctaaccatgaatgtccttcacttgtaacgtggttcacaggttactaatcatagatcctgaccagcatttgtaacactgctctaactaggacacagcatgcagcagccacactcacaccctgggatgtctgtgtacctctgtccctaggtgtaggaaatggaagaaaaagattcagccaagtggggaggtgacagatgcacaattatgaaacctggttgtacatgttatgaaagtatactaagtaagttagtttttattattaatgtgaaagcaaaaacttgtatgttaacttattttcaatatcttgaccttatttatgatctgctaaagtggtgatttatccattcaaaatatatatttttttccatttaaaactaatttataaactatgtactcctgggaagatttgaaatcttttagaagtttgttgaaatattttcaccatttcagacagacttctgacttagatactgattttaatgccagtatctgctctaaatatttatgataaaaatgcattatttttttaaagagcttgatgagatttgtgataagtgatagtactcaaaaacctgaatccccacccctcgaccaaatcctccacaaacttcatttgttggttaacgtattaactgaacacagacatacagtctgatttagaagtcatcttttcagccgtgtgataat

SEQ ID NO: 19334 - DNA, 445 bp, Homo Sapiens
  misc_feature (209)..(220): n is a, c, g, or t
gcacgaggtgtaagatacggttaataactaaaatttattgaaatggtcttgcaatgactcgtattcagatgcttaaagaaagcattgctgctacaaatatttctatttttagaaagggtttttatggaccaatgccccagttgtcagtcagagccgttggtgtttttcattgtttaaaatgtcacctgtaaaatgggcattatttatgnnnnnnnnnnnngcattcctgataattgtatgtattgtataaagaacgtctgtacattgggttataacactagtatatttaaacttacaggcttatttgtaatggaaaccaccattttaatggactggaattaacatgggtataatacgtacaatccttccctcatcccatcacacaactttttttgtgtgtgataaactgattttggtttgcaataaaaccttgaaaaatatttac

SEQ ID NO: 19335 - DNA, 989 bp, Homo Sapiens
gcacgaggccaacccgagaacacaaagaaacgcactttcgtggcagccgacgggaaatcctatcaagtgccaatgctggcccagctctccgtgttccggtgtgggtcgacaagtgcccccaatgatttatggtacaacttcattgaactgccctaccacggggaaagcatcagcatgctgattgcactgccgactgagagctccactccgctgtctgccatcatcccacacatcagcaccaagaccatagacagctggatgagcatcatggtgcccaagagggtgcaggtgatcctgcccaagttcacagctgtagcacaaacagatttgaaggagccgctgaaagttcttggcattactgacatgtttgattcatcaaaggcaaattttgcaaaaataacaaggtcagaaaacctccatgtttctcatatcttgcaaaaagcaaaaattgaagtcagtgaagatggaaccaaagcttcagcagcaacaactgcaattctcattgcaagatcatcgcctccctggtttatagtagacagaccttttctgtttttcatccgacataatcctacaggtgctgtgttattcatggggcagataaacaaaccctgaagagtatacaaaagaaaccatgcaaagcaacgactactttgctacgaagaaagactcctttcctgcatctttcatagttctgttaaatatttttgtacatcgcttctttttcaaaactagttcttaggaacagactcgatgcaagtgtttctgttctgggaggtattggagggaaaaaacaagcaggatggctggaacactgtactgaggaatgaatagaaaggcttccagatgtctaaaagattctttaaactactgaactgttacctaggttaacaaccctgttgagtatttgctgtttgtcccagttcaggaatttttgttttgttttgtctatatgtgcggcttttcagaagaaaatttaattcagtgtgaca

SEQ ID NO: 19336 - DNA, 1723 bp, Homo Sapiens
gcacgagggacatttgccatgaagtactcacaggcaaatatggatgctcctccactctctccctatccatttgtaagaacaggctcccctcgccgaatacagttgtctcaaaatcatcctgtctacatttccccacataaaaatgaaacaatgctttctcctcgagaaaagattttctattacttcagcaacagtccttcaaagagactgagagaaattaatagtatgatacgcacaggagaaactcctactaaaaagagaggaattcttttggaagatggaagtgaatcacctgcaaaaagaatttgcccagaaaatcattctgccttattacgccgtctccaagatgtagctaatgaccgtggttcccactgaggttagtctcttgtattaaactcttcacaaaatctgtttagcagcagcctttaatgcatctagattatggagcttttttccttaatccagctgatgagttacagcctgttagtaacatgaggggacattttggtgagaaatgggacttaactccttccagtgtccttagaacattttaattcatcccaactgtctttttttccctaccattcagtgattactgtcaaggctgcttagaatccaaacttggatttttgactctggcaaagcttttagaaatactgcaagaaaatgatgtgtacccaaacgtgagcataggaggcttctgttgacgtactccaacagaagaactgtgtttcaagttcaatcctacctgttttgtggtcagctgtagtcctcataaaaagcaaaacaaaaattaggtattttgtcctaaaacacctggtaggagtgtgtgatttttttgcattcctgacaaaggagagcacacccaggtttggaggtcctaggtcattagccctcgtctcccgttccctttgtgcacatcttccctctccccattcggtgtggtgcagtgtgaaaagtccttgattgttcgggtgtgcaatgtctgagtgaacctgtataagtggaggcactttagggctgtaaaatgcatgattttgtaacccagattttgctgtatatttgtgatagcactttctacaatgtgaactttattaaatacaaaacttccaggctaaacatccaatattttctttaatgcttttatatttttttaaaatgttaaaacccctatagccaccttttgggaatgttttaaattctccagttttttgttatatagggatcaaccagctaagaaaagattttaatcaaagttgaattgaggggattaatatgaaaacttatgacctcttcctttaggagggagttatctaaaagaaatgtctattaaggtgatatatttaaaaatatttttgggtgttcctggcagtttaaaaaaattggttggagaatttaggtttttattagtaccatagtaccatttatacaaattagaaaatgttatttaacagctgaattatctatacatatctttattaatcactattgttccagcagttttcaagtcaaattaataatcttattagggagaaaattcaattgtaaattgaatcagtataaacaaagttactaggtaacttcatattgctgagagaaatatggaacttacattgttcaattagaatagtgttctgcaaaaatatttataaaacttctcaagatactgctactgtaattttatatgaagataagtgtatttttcataaagcatttataaatt

SEQ ID NO: 19337 - DNA, 947 bp, Homo Sapiens
ccgcttaacttctctgactactcttgtcttcctctctcatcaatttctgcttcttcatggaatgctgaccttcattgctccatttgtagatttttgctcttctcagtttactcattgtcccctggaacaaatcactgacatctacaaccattaccatctcactaaataagactttctatccaataatgattgatacctcaaatgtaagatgcgtgatactcaacatttcatcgtccaccttcccaaccccaaacaattccatctcgtttcttcttggtaaatgatgctatgctttttccaaccaagccagaaacctgtgtcatcttttcaccccaccttcaatcaacaagtcctcaatcaacaagtcctactgactgcacatcttaaatatatctttatcagtccacaagtccttccaattatatttcccaagtatatctagaacttatccacttatatccccactgctactaccttagtttagggctatattctcttgaaaaaaagtgtccttacttcctgccaatccccaagtcatcttccagagtaaaatgcaaatcccatcaggccacttggatgaaaacccttcaaggattactggatagaattcaggctttcccctccagcccccaatcatagctcacaaaccttccttgctatttgttcttaagtaaaaaatcatttttcctcctccctccccaaaccccaaggaactctcactcttgctcaagctgttccgtccccttaccacccctgatacaactgccaggttaatttccagaattcttgcaagactcagtttcagaagtcaccttctttcgtgaatgttttgattccctgaggctactttattttggtatgggctgaaaaatcctaaattttctaaacaaaccttgtttgaatcttgggttctgatattggactaggagagagactgggtcaagtaa

SEQ ID NO: 19338 - DNA, 770 bp, Homo Sapiens
gcacgaggccctgccctgcctttggggtccaccggcactccagttggatggcacaacatagtgtatccgtgcagaagccgagctggcattttcaccagtgtagccaagggcctttgccaagggcagagcaggtggagccctctgcctgccctatcacacatacgggtacttgcttttcactgtgatgtttaagagaatgtatgaacagtttacattttccttagaaatacattgatgggatcacagttggctttaaaaaccaacaacaatcaaccacctgtaagtctttgtcttcacctattatcatctggaggtaaatctctttatatgatgatgccaaagggcaaattgcttttcaaattcagcaagttctcagcttgtgtgacggaaggtccttcagaggacctgaggaatgcctgggagaggctaagcctcaggcttcaatgcttctggggttgggcatgaggatgtacacagacacccactaccttactactcacacttcatttcactccttttgtaaatttccaatttaaaaatcaagcacgtctttttagtgagataaaatctgagctcttctgtagaaaaatcaatctctaccagtagaaaatgccagggcttgatggaagagctgtgtagccctttctatgccaaagccaggaaatttggggggcaggaggaggttctcagaatccagtctgtatctttgctgtatgccaaactgaaaccactgggaataatttatgaaacataaaaatcttctgtacttc

SEQ ID NO: 19339 - DNA, 855 bp, Homo Sapiens
cgcaagcgaggcagccatgccttatcccgctgatgattatgagtctgaggcggcttatgacccctacgcttatcccagcgactatgatatgcacacaggagatccaaagcaggaccttgcttatgaacgtcagtatgaacagcaaacctatcaggtgatccctgaggtgatcaaaaacttcatccagtatttccacaaaactgtctcagatttgattgaccagaaagtgtatgagctacaggccagtcgtgtctccagtgatgtcattgaccagaaggtgtatgagatccaggacatctatgagaacagctggaccaagctgactgaaagattcttcaagaatacaccttggcccgaggctgaagccattgctccacaggttggcaatgatgctgtcttcctgattttatacaaagaattatactacaggcacatatatgccaaagtcagtgggggaccttccttggagcagaggtttgaatcctattacaactactgcaatctcttcaactacattcttaatgccgatggtcctgctccccttgaactacccaaccagtggctctgggatattatcgatgagttcatctaccagtttcagtcattcagtcagtaccgctgtaagactgccaagaagtcagaggaggagattgactttcttcgttccaatcccaaaatctggaatgttcatagtgtcctcaatgtccttcattccctggtagacaaatccaacatcaaccgacagttggaggtatacacaaccggaagtgaccctgagagtgtggctgggggagtatgggcgcactccctctacaaatgcttggtacctcagcctggtcggggcttctccgcctg

SEQ ID NO: 19340 - DNA, 865 bp, Homo Sapiens
  misc_feature (568)..(627): n is a, c, g, or t
gcacgaggcagcgccccagaggtcccgggacagcccgaggcgccgcgcccgccgccccgagctccccaagccttcgagagcggcgcacactcccggtctccactcgctcttccaacacccgctcgttttggcggcagctcgtgtcccagagaccgagttgccccagagaccgagacgccgccgctgcgaaggaccaatgagagccccgctgctaccgccggcgccggtggtgctgtcgctcttgatactcggctcaggccattatgctgctggattggacctcaatgacacctactctgggaagcgtgaaccattttctggggaccacagtgctgatggatttgaggttacctcaagaagtgagatgtcttcagggagtgagatttcccctgtgagtgaaatgccttctagtagtgaaccgtcctcgggagccgactatgactactcagaagagtatgataacgaaccacaaatacctggctatattgtcgatgattcagtcagagttgaacaggtagttaagcccccccaaaacaagacggaaagtgaaaatacttcagataaaccnnnnnnnnnnnnnnnnnnnnnnnnnnnnnnnnnnnnnnnnnnnnnnnnnnnnnnnnnnnntccatgtaatgcagaatttcaaaatttctgcattcacggagatgcaaatatatagagcacctggaagcagtaacatgcaaatgtcagcaagaatatttcggtgaacggtgtggggaaaagtccatgaaaactcacagcatgattgacagtagtttatcaaaattgcttagcgccatagctgccctttctgtctgctgtgatcccacagctgttgctgttattacagtccactttaaaa

SEQ ID NO: 19341 - DNA, 1391 bp, Homo Sapiens
gcacgagggcataatttaggcattggaggagctgtggttgtaacactctacaagatgggttttccggaagccgccagttcttttagaactcatcaaattgaagctgttccaaccagctctgcaagtgatggatttaaggcaaatcttgtttttaaggagattgagaagaaacttgaagaggaaggggaacagtttgtgaagaaaatcggtggtatttttgccttcaaggtgaaagatggccctgggggtaaagaggccacctgggtggtggatgtgaagaatggcaaaggatcagtgcttcctaactcagataagaaggctgactgcacaatcacaatggctgactcagacttcctggctttaatgactggtaaaatgaatcctcagtcggccttctttcaaggcaaattgaaaatcactggcaacatgggtctcgctatgaagttacaaaatcttcagcttcagccaggcaacgctaagctctgaagaactccctttggctacttttgaaaatcaagatgagatatatagatatatatccatacattttattgtcagaatttagactgaaactacacattggcaaatagcgtgggatagatttgtttcttaatgggtgtgaccaatcctgtttttcctatgctctgggtgaatagagcctgatggtatactactgctttgcggaattgcatacaactgtgcattacaaagttaatatggtaattatggtctggggtaaaattgagtttcagaataaaattaggaacagtaaaatccaaagaactatgtaaacaaaaaagcttttgttttgcttacaaagtatatttaggattattctgctgaagattcagtttaagagttttccttgggagaactaagtaagaaacacaatgccaacagctggccagtaattagtgttgtgcacttcatgtcattaatcaatttctcaatagttcttaaaattagtgagattaaaaatctaaaaattttgcatttcatgctatcagaaacagtattttcttcccaaatcaaaataaaagaaatatgatcagagcttgaacacaggcttatttttaaaataaaaatatttttaacatgggtttccttattgaaaaatcagtgtattagtcataaaacaccatcattaagaataattgaacaataaagtttgctttcagatgcagttttcaaattataatctcatttcaatttataacgttctcagtcctttgttataattttcctttttcatgtaagtttaattatctgcatttatcttttttcctagtttttctaatactaatgttatttcttaaaattcagtgagatataggataaaataatgctttgagaagaatgtttaatagaaaattaaaataactttttctggc

SEQ ID NO: 19342 - DNA, 1747 bp, Homo Sapiens
gcacgaggggagcagtcatacctgaagtctgaattgggcctgggacttggaggaaatgggatttgaaattcctcctggagaaagctcagaatctgttttttcccaagcaacatcagaatcatcttctgtatgttctggtccctctcatgctaacagaagaactggagtaccttctactgcctcagtgggcaaatccaaaaccccattagtggcaaggaagaaagtgttccgagcatcggtggctctaacgccaacagctccttctagaacaggctctgtgcagacacctccagatttggaaagttctgaggaagttgatgcagctgaaggagccccagaagttgtaggacctaaatctgaagtggaagaagggcatggaaaactcccatcaatgccagctgctgaggaaatgcataaaaatgtggagcaagatgagttgcagcaagtcatacgggagattaaagagtctattgttggggaaatcagacgggaaattgtaagtggacttttggcagcagtatcttcaagtaaagcgtctaattctaagcaagattatcattaaacagaaattataggttggcatggatcctattagctgtgtaatactggaattatcaatgatatgcactggtggaggtgttatttgtgctttagaagatacttgctgttgagctgggctactgtatacagtgtacaatgtgtatttcttcaaccatatattttaaaaagacgtacatagaaacttaggcactttgctatttcttttctaaactatcaaaaactctagcagtttgaaaagcctaatatttatttgtatgtcaatatttttcatttgattccctattagaattaattttaaaacttgaagacttccagacttatccaacttataaataacatatttcttcagactaacatcttaaaacactgacctctatgaggtatttactgtgcaataactgattcatttttttcagagcttgaagcatccaatgatttttccctccactgctgttaattaatgtcacttccaagaagaaaaactgttctgttgtaaaaaatataattgctcttaattcttggggaggttactaatagcagtaggatagaattttatgaggttacctacaactacttaatgtacttacactgtaagccttgttgctttacccaagacaaatgtaattttatcattgcttatgtagtatttttcttttggaaatgtgccttatgttaaacactatgtacttttactttttgcattgtccagacttctttattagatggagatgtttctttttctgtcttctagactaaatagagtatcatccaaataatggggcctatgacttgaatgaatagaaatgaataagctggtgtttgttttttcaaaatggaagtaatttagatttgttctcctcatacataaaatgattttagttcagttttaaccagtgaaaactttgtttttatgaaaaaaaaggaaaatggtttcccatttggttttatatgtgttaaataaatgtgtaaagtaaccaccaaatgttattagaatttttcttctagcatttataattttttcaactcctattgtgtttctttgtgtgtgatattttaatcaaagtggttgagttgttaacagtgttctttgaaagaatctctaaaaggcttataaatgtttgaaatatcacacaaaggctgatttctaaaatatatatatattaaaacaataaagtatttattttgc

SEQ ID NO: 19343 - DNA, 1935 bp, Homo Sapiens
  misc_feature (1720)..(1765): n is a, c, g, or t
cccgggctgcaggaattcggcacgaggttgaaacagatataattggttcagaccttttgaagaactctgacccagagacacagtccagcatgcctgatgtaccatatgaaccagatttggatatcgaaatagattttcccagagctgctgaggagcttgatatggaaaatgaatttttattaccacctgtttttggcgaagaatatgaggaacagcccagacctcgatctaaaaaaaagggagccaagagaaaggctgtatcaggataccagtctcatgatgatagttctgacaattcagaatgcagctttcctttcaaatatacgtatggcgtaaatgcatggaaacactgggtcaaaactaggcaacttgatgaagatcttctggtattagatgagttaaaatcttctaaatcagtaaagttaaaagaggatctactctctcacaccacagctgagcttaactatgggttagctcattttgtcaatgagatccgacggccaaatggagagaattatgcacctgacagcatctattacctttgccttggaatacaggagtatttgtgtggaagtaatcgaaaagacaacatatttattgatcctggataccaaacatttgagcaagaattgaataaaatactgcgaagctggcaaccaagcatacttccagatgggtcaatattctctcgagttgaagaagactatctctggaggataaaacaactaggatcacactctccagtagctcttctgaatacactgttctactttaacactaagtattttggcctgaaaacagtggaacaacacttaagactttcctttggcactgtgtttaggcattggaaaaaaaatcctttaacgatggaaaacaaagcgtgtcttcgataccaagtgtcttccttgtgtggaacagataatgaagataaaattactactggaaaaagaaaacatgaagatgatgagccagtatttgaacaaattgaaaacacagccaatccttccagatgtcctgtgaaaatgtttgaatgctacttgtctaaaagtccacagaatcttaatcagaggatggatgttttttatttgcaaccagaatgctctagttctacagatagccctgtctggtatacgtctacttcactggaccgaaacaccttggaaaatatgcttgtacgggttcttctagtaaaagatatttatgataaagacaattatgaactggatgaagacacagactaaaaaggaacgttgcagaagcaatcgggataaaacagcattagatagtcatgctgctagatctttattatggaaaacatttcaagtttactccttctgttttgagttttgtagcagtgtacccacgctgggtattaccatgtaaataatctgtgagtgaaagttgccattattctatgtagtggttttaggatacttaacaaatacattcaaattctttttttattattatttatttgattaggtatgtttgtaactttttacattacagaatatgaatgagaatgtgccatgtataatttttttcttgtagtaagaaacatccatattgcacaactctactgttgcaaagcttccttggaagggggctcttttactgggttcttaaccagatggttgtgtatgggtagcactactaaaagtttagaacttgcagtgtctttcggaatttttaaaataaactgtaaactaataggctgggnnnnnnnnnnnnnnnnnnnnnnnnnnnnnnnnnnnnnnnnnnnnnnagttactgaagccttacaaggttatgtagagagataccatcttctgtaccaaaaatagacaagagaatgctgtcaatattggtgtactgtaatgtgaatctatgctggtgaaaacaattttttgttccccttattaaaaccttagtgtccttttaaaaaaaacctcgtgc

SEQ ID NO: 19344 - DNA, 1477 bp, Homo Sapiens
gcacgagggaagagttttttcagaattcaaagctcctaaagacaagcatgctaaaggcacaccaagtgactacaagaaatttaagccttgcagtatcagactgcttttggaaaatggtacgagagtctgttgaacaacaggctgatagtttcaaagcaacacgttttaaccttgaaactgaatggaagaataactatcctcgcctgcgggaacttgaccggaatgaactatttgaaaaagctaaaaatgaaatccttgatgaagttatcagtctgagccaggttacaccaaaacattgggaggaaatccttcaacaatctttgtgggaaagagtatcaactcatgtgattgaaaacatctaccttccagctgcgcagaccatgaattcaggaacttttaacaccacagtggatatcaagcttaaacagtggactgataaacaacttcctaataaagcagtagaggttgcttgggagaccctacaagaagaattttcccgctttatgacagaaccgaaagggaaagagcatgatgacatatttgataaacttaaagaggctgttaaggaagaaagtattaaacgacacaagtggaatgactttgcggaggacagcttgagggttattcaacacaatgctttggaagaccgatccatatctgataaacagcaatgggatgcagctatttattttatggaagaggctctgcaggctcgtctcaaggatactgaaaatgcaattgaaaacatggtgggtccagactggaaaaagaggtggttatactggaagaatcggacccaagaacagtgtgttcacaatgaaaccaagaatgaattggagaagatgttgaaatgtaatgaggagcacccagcttatcttgcaagtgatgaaataaccacagtccggaagaaccttgaatcccgaggagtagaagtagatccaagcttgattaaggatacttggcatcaagtttatagaagacattttttaaaaacagctctaaaccattgtaacctttgtcgaagaggtttttattactaccaaaggcattttgtagattctgagttggaatgcaatgatgtggtcttgttttggcgtatacagcgcatgcttgctatcaccgcaaatactttaaggcaacaacttacaaatactgaagttaggcgattagagaaaaatgttaaagaggtattggaagattttgctgaagatggtgagaagaagattaaattgcttactggtaaacgcgttcaactggcggaagacctcaagaaagttagagaaattcaagaaaaacttgatgctttcattgaagctcttcatcaggagaaataaattaaaatcgtactcataatcagctctgcatacatctgaagaacaaaaacatcaacgtcttttgtccagcctctttttcttctgctgttccacctttctaaacatacaataaagtcatgggataaaaataaaaaacctcgtgc

SEQ ID NO: 19345 - DNA, 1513 bp, Homo Sapiens
  misc_feature (64)..(74): n is a, c, g, or t
  misc_feature (1248)..(1301): n is a, c, g, or t
aattctagcttctttttaaagattattaggtacccaaataatctttaaaaagaagctagaattnnnnnnnnnnnggatagctgcttttatgatcaatttattagaaactactgtggcaactgtttacaatgtgttcattctttagacctagtcaaaacttattactaattattttgctaaatagaaaaacttcaagccagtaggaaatctcagttttttaaaaaaattgctgttattgtattattagtcagggttactctggcagcaaagcaaaaatgttcagatgccacttctcctagcttttatgtttggctttcagaatgagcagttgggcattatcagtattattataatatgaccagttaataagtctgacaaacattttccaacctgtcatttttgaaaaggagaggatatttttgatacagatacacaatatacaaaaaatcccagagcttgaaatttcatgcatcctgtgcctacaaataagaaactaaacattaatctagttagttatctatgtgtataaagaaaaaaaagctgctaatcaatattcctgctaaaaaataaattattacaaaacataggcaacttcctctccccattataaatgatcaaaaaccgaggtaaaaatctagtgtttccccaatcaatgaaaacaatatataccaagtaaatgactagtcaagtctagaagagagtaacgcaaaaatgagccactcatattttaggtataagtgacaaatatatttctctttattacttttaaggttttctctaatgtcttttggtagtggaagcattttatttgattccactgttgctcatggtttgagccctacatactcccttccctttcacctcaaagggaactcctttgtatgtagccacacactcatcattagtgtgaagatcaggctggatctgctcccaaatcttcttcttaggattcagctccttgtcaggctctcctgggaaagcatcaaaagtaattctgtctccaggaacagacccatttggaggagccaagatttcaattttctctggtgaactagcacacatgaccattgcttgagataatactcccctcatctttgcaggtttcaggttacaaagtaaaatcaccatccgattttgcatctgttcaagaggaacatgattcaccaggccactgacaactgtccttggggctatttctccgacatctacttcttcttagagtcggcacttccagctattgattgctgnnnnnnnnnnnnnnnnnnnnnnnnnnnnnnnnnnnnnnnnnnnnnnnnnnnnnngtctcctgttcctccttttatctgttctttggtaccagaagatacggttgttactgctgtagactgtatcacattttcagaaaccatagaattagcgtgcagtggagtaccagatggaaatggtatttgcttcactccattttgaatttctgcctgaattagctcttgtttcagttcttcaatttctttcttcagtttagcattttcaactc

SEQ ID NO: 19346 - DNA, 837 bp, Homo Sapiens
gcacgagggagaaactgacgaattctctaatgttagaagaggaagaggacataggatgcaacacttgagcgaaggaaccaagggccggcaggtgggaagtggaggtgatggggagcgctggggctccgacagagggtcccgaggcagcctcaatgagcagatcgccctcgtgctgatgagactgcaggaggacatgcagaatgtccttcagagactgcagaaactggaaacgctgactgctttgcaggcaaaatcatcaacatcaacattgcagactgctcctcagcccacctcacagagaccatcttggtggcccttcgagatgtctcctggtgtgctaacgtttgccatcatatggccttttattgcacagtggttggtgtatttatactatcaaagaaggagaagaaaactgaactgaggaaaatggtgttttcctcaagaagactactggaactggatgacctcagaatgaactggattgtggtgttcacaagaaaatcttagtttgtgatgattacattgctttttgttgtccagtagtttagtttgtgtacatatatacacatatatattttgcactacacaaacgataacattttaaggactaatattgctgatacttgaataatcaatctctactaggttataagtagtatacacagatttaccctgcccttgaacttgaaggacattaaattattaatgatcatttggtaacatgtttacctgattatcttccatagagtaacataagctgcttttcaaggtaccattgtgataatgagatcaatttataagttattatttttaattttctaaattaaataaaagaaa

SEQ ID NO: 19347 - DNA, 1317 bp, Homo Sapiens
gcacgagggcggaagaccctggctccgtcatggcctctgccctgaggccaccccgtgtccccaagcctaagggtgtcctgccttcacactactatgagagctttctagagaagaaggggccctgtgaccgggattacaagaagttctgggcaggcctgcagggtctcaccatttatttctacaatagcaatcgggacttccagcacgtggagaagctcaacttgggagcatttgagaaactcacagatgagattccctggggaagctcacgtgaccctggcacccacttcagcctgattctccggaatcaggagatcaagttcaaggtagagaccttggagtgtcgggaaatgtggaaaggcttcatcttaacggtggtggagctccgtgtcccgaccgacttgaccctgcttcctgggcacctatacatgatgtctgaagtcttggccaaagaggaggcgcgccgtgcactggagacaccctcgtgcttcctgaaggtgagccggctggaggcacaactgctcctggagcgctaccccgagtgcgggaacctgctgctgcggcccagcggggacggcgccgacggcgtgtcggtcaccacgcggcagatgcacaacgggacgcacgtggtccggcattacaaggtgaagcgggagggccccaagtacgtgatcgatgtggaacagccgttctcttgcacctccctggacgccgtggtcaactatttcgtgtcgcataccaaaaaggcgctggtgccattcctgttagacgaggactacgagaaggtgctaggctacgtggaagccgataaggagaatggcgagaatgtgtgggtggcgccctccgctccgggcccaggtcctgcaccctgcacaggtggccccaagccgctgtcacctgcgtctagccaggacaagctgcccccactgcccccactaccgaaccaggaagagaactacgtgacccctattggagatggcccagctgttgactatgagaaccaagatgtggcttcctctagttggccagtcatcctgaagccaaagaagttgccaaagcctcctgccaagcttccaaagccacccgttggacccaagccagagcccaaagtctttaatggtggcttgggcaggaagctgccagtcagttcagcccagcctctcttccccacagccgggctggcagacatgacggcagagctacagaagaagctggagaagaggcgggcactggagcactgattcggacacaccagggaccagcgggctagtcccggggcatggcccagcggccagattctttttcccaggattaaaa

SEQ ID NO: 19348 - DNA, 1003 bp, Homo Sapiens
gcacgaggattgaaattacagtagatttttaagaatataatattttgggttttctagatatgaaattatttcacctgaacatatagatcattttatttcctcttaatgtttatactgattactgttacattagctggatttttcaaaacaatgttgaagagtgatgacagacgtgactgtcttgttcttaattttcatggaagtaagaatgcaaaatattaatagggaatagtattccctattagtatgacatttacttttggttattagtaggtagtcattaacatgtttaagagtttccgctattcctgttttatagtgttattgctagaagtggttcctgaattttataaaatgccttttcagcatctattgataaaattgtatgattttttttctctttaatttgttgatgtaatgaattagaatggtaggcatttgatgtggaaccaaacttgtatttctggaacaaatactacttggtcattgtgaaataatgatttgctacatgagtggattttatttaccagtatttaatttagaattattgcattttcattccaaagtaaaattgtattttgtccttctgatgctatctttatcaagttttgttattgaagttgtgctagctttaaaaaaatatgaatatgtgagttttcaatttttttcctgtggtctggaataatttaaatagcattaaaattatttgtttgttaaaagttagctaggacaaagtgtaaaacaatctaatcctgatgacacttttaatagtagatttttaatcacctttgtgatttctttaatagttattggtttattcaggctttttattaaaaagtatatacattctctgtgacatacaagttaaaagttctctattattgctgattgtactggttgttgcttgttgactgtactattcagatggctttatgcttttgtgtattttatgtcacctagatctaattctgaaacattgtaataaataattagctataatggt

SEQ ID NO: 19349 - DNA, 887 bp, Homo Sapiens
  misc_feature (97)..(114): n is a, c, g, or t
gcacgaggattttcttcctttgaaataaatacaaaccagtttgaaaggtgggggaatctatgggaaagagaagggaaatggggacagcccccagtcnnnnnnnnnnnnnnnnnnagtaccaaatgactctggcgcgacccggaaacgcagttacaaatgaaaataatttaaattctccgataattacagtatttacaacagcaggggagggagtcacctagtgcccctcttccaggctggacagatgcccactcacctcacgaccggtaggggccccaggcctctaggcagttatggattctcctggcatgagcaggtagaggtggtgggatggcctgttttacgcagtgtcctaactttggcccaccaccccgccctacaatgctgtgaggtctctggagctttttctgacctgtgggccctccctctccttgcgctgaactgccattggcccttggagtgttctgtacagtccagctgcacttagggcaggagggacctcccccacccagcttcccctgagactggccccaagaccagaaatgagtcagtgcaaaggccggtgccactccaggacagtgagcaaaggggaggagagaagtcacagggcactataggttgggctgtgttgagcagtatcaatcactatcgctggtctcactgctctgctcgccttgcaccttgctgcggtgctgcagagccctgtggtaggcgatctgtactgacttgcggatgttggacttgcggccctccagcatcttctccttgtctaggtcctggttcacacccagaggaaccagcttggtcctgggcagccactgtcaggttcgtttgttgtcaaagaagaggacgaggtagagatgctctcgggctttctggggtcatct

SEQ ID NO: 19350 - DNA, 938 bp, Homo Sapiens
gcacgagggttgagtatgtgttctttattcctagaagccactgtgcttggtagagtgcatcactcaccacagctgcctcctgagctgcctgagcctggtgcaaaaggattggcccccattatggtgcttctgaataaatcttgccaagatagacaaacaatgatgaaactcagatggagcttcctactcatgttgatttatgtctcacaatcctgggtattgttaattcaacatagggtgaaactatttctgataaagaacttttgaaaaactttttatactctaaagtgatactcagaacaaaagaaagtcataaaactcctgaatttaatttccccacctaagtcgagacagtattatcaaaacacatgtgcacacagattattttttggctccaaaactggattgcaaaagaaagaggagaagaatattttgtgtgttcctggtattcttttataagtaaagtttacccaggcatggaccagcttcagccagggacaaaatcccctcccaaaccactctccacagctttttaaaaatacttctactcttaacaattacctaaggcttcctcaactgccccaaatctcttaatagcttctagtgctgctacaatctaagtcaggtcaccagagggaagagaacatggcattaaaagaatcacatcttcagaagagaagacactaatattattacccatatacatgatttcagaagatgacataagattcctcttaaagaggaaatgtcaggaatcaagccactgaatccttaaagagaaaagttgaatatgagtcattgtgtctgaaaactgcaaagtgaacttaactgagatccagcaaacaggttctgtttaagaaaaataatttatactaaatttagtaaaatggacttcttattcaaagcatcaataattaaaagaattattttcctcgtgc

SEQ ID NO: 19351 - DNA, 1662 bp, Homo Sapiens
  misc_feature (235)..(275): n is a, c, g, or t
gcacgaggaagacatttgctcagtgaccaaacagatccctttaaccgtagtcccctcaccatggaccagatccggccaaacacagaactaaaagaaaaaatccaacggtggcttgcagagaggaaacaacaaaaggagcaacttgaatagatactgtgaactaaccaaaccaaaaccaaccccagagtgcagataaacaattgtttgtggtttctctctttctggttctgttccnnnnnnnnnnnnnnnnnnnnnnnnnnnnnnnnnnnnnnnnnactaaattagagaactgctcttgctgaaattatgatagttaagattcctaagaacttgacaatgctcccctggcttgcaggaaattatacttattatagcatcaccaagtttagaaatcatcactaattttcaccctctgttgtctcttcatattcttcttccttttcctaaatgaaattatattatttcaactactaaaacttcccgccaccctgctatttctcttccaattactgttcaaacatttttggtgagtgctgcttttataaatatgtgatgtcacatatttcagtgacagctgatgttatcagaaaaatcctgttatcctgtgtatttactagtcctcatgatctagacttaaccccttttctgtgttacagagtaacctcacataaaagcagatacctttaagtttgtgtagacttctgaataagatgatagacgagaattttttttaaaaaaggaatttaaaggaatcttgtgcaacttctgttgatagctcttaattttgttatacagtctttttaatgaggattggtagggcaatcctaccaattgatgggggtgaggagactgttgggcccttattctcttatgaaaatctgtttctacaaggactaggcctaagtagatttaggcaacgggtatcatatccatgaaaaatgtcattttaagacactaatatcaacagtatatctcagtgtgtgagatatataaatacacatacaccccatgtgcttttttgttggtttagtgtaaactgagtaccactttatattttctcttccatagtgagatgtatgcagtatgtggccatgtttactaacatactcattcttcacaaaattctgagattataaaatgtatatagttaatatttgtttgagcttgtgacctgacttctaagagctacttctaacacagccttaggtcttcaattaacaaagtaggaagttgagcacaaccttgtccacagccattttaaatatccacttagccctgtgtagttggtaggtggacaccactttcataagtgaacttgagctcactactcaattgtgcagcttaatatgctgactagggacattcccctatggattatctttatatcactgtctttctaagcccagagatgtcataagtgacaagaaaagtgataggatcaagaaatgggtgtcactgcttcatttggaacatgttattaactatggtctctttcaaataaatagtagttttatattttcaacacaaagttgctataaccagtcccttgatgggttttttgattgcaacagctggaaagcctcaaatctagaggctttcccatcctagatataaaatagtgttgcctattgctgtgcttataaaatgaaaaggaatttgaag

SEQ ID NO: 19352 - DNA, 1461 bp, Homo Sapiens
  misc_feature (75)..(94): n is a, c, g, or t
gcacgaggccgactcgccctcgcccccactccccggcggggtggcggcggccgggcccccacggcggcggccggnnnnnnnnnnnnnnnnnnnngagcccgcctctatgatgaagttcaagcccaaccagacgcggacctacgaccgcgagggcttcaagaagcgggcggcgtgcctgtgcttccggagcgagcaggaggacgaggtgctgctggtgagtagcagccggtacccagaccagtggattgtcccaggaggaggaatggaacccgaggaggaacctggcggtgctgccgtgagggaagtttatgaggaggctggagtcaaaggaaaactaggcagacttctgggcatatttgagaaccaagaccgaaagcacagaacatatgtttatgttctaacagtcactgaaatattagaagattgggaagattctgttaatattggaaggaagagagagtggttcaaagtagaagatgctatcaaagttctccagtgtcataaacctgtacatgcagagtatctggaaaagctaaagctgggttgttccctagccaatggaaattctacagtcccttcccttccggataataatgccttgtttgtaaccgctgcacagacctctgggttgctatctagtgtaagatagagagaactgggtaggcctctcccaccatgtgcagtctcatggggagaggcttctttcgtttcctcgtcaaacatctgattgacgcttgcaaactgtctgaatttgccatgcaaggttttcaaacaatttgcatgtttttcagatgctttcaaatctttttttaaaaaaatagtgtaaaatattttaataagccaaagccatgtggaatttttgtttagatgccttaactgtgccacaccccacaaccccctatattattttggttgtctatttctcacagcatattttcagttttttgtccatttgacatcagtctgtggtttattttgtcatcagattacttgtgggtatacctaccccaaaattgttttctcattcacagcattagcatattcagcaaatccatctgtggtgggaattaaaaatattattggtattaaagaaatccattcaccccaaaacttgttttacaggattacaattttaattcaaaatttccagatttgggctatttctgtatgatccaataacttattttgtcacagggcttaatttgccatttttggggatttgtcgactcattttgtctgaattttcacaactggtattatgtcactagctacctgatatggctatttcccttataactcaatagtaccttaacacaaagtataactctgtagagttggtgaatattttagggaaatattagcaaaatgcatgtagtaaagacatcttatgaaaactgtattcatggaatttgatttagcatgctcagttgccagttcccattatcgatactccttctttgc

SEQ ID NO: 19353 - DNA, 968 bp, Homo Sapiens
gcacgaggatggaactaagtacagtggcactgtttgaggaccagtgttcccggggttcctgtgtgcccttatttctcctggacttttcatttaagctccaagccccaaatctggggggctagtttagaaactctccctcaacctagtttagaaactctaccccatctttaataccttgaatgttttgaaccccactttttaccttcatgggttgcagaaaaatcagaacagatgtccccatccatgcgattgccccaccatctactaatgaaaaattgttctttttttcatctttcccctgcacttatgttactattctctgctcccagccttcatccttttctaaaaaggagcaaattctcactctaggctttatcgtgtttactttttcattacacttgacttgattttctagttttctatacaaacaccaatgggttccatctttctgggctcctgattgctcaagcacagtttggcctgatgaagaggatttcaactacacaatactatcattgtcaggactatgacctcaggcactctaaacatatgttttgtttggtcagcacagcgtttcaaaaagtgaagccactttataaatatttggagattttgcaggaaaatctggatccccaggtaaggatagcagatggttttcagttatctccagtccacgttcacaaaatgtgaaggtgtggagacacttacaaagctgcctcacttctcactgtaaacattagctctttccactgcctacctggaccccagtctaggaattaaatctgcacctaaccaaggtcccttgtaagaaatgtccattcaagcagtcattctctgggtatataatatgattttgactaccttatctggtgttaagatttgaagttggccttttattggactaaaggggaactcctttagggtctcagttagcccaagtttcctttgctatatgttaatagtttacc

SEQ ID NO: 19354 - DNA, 1096 bp, Homo Sapiens
cccccgggctgcaggaattcggcacgaggcatccacgcgctgctgatcatcggtggattcgaggcctacctgggactcctggagctgtcagccgcccgggagaagcacgaggagttctgtgtccccatggtcatggttcccgctactgtgtccaacaatgtgccgggttccgatttcagcatcggggcagacaccgccctgaacactatcaccgacacctgcgaccgcatcaagcagtccgccagcggaaccaagcggcgcgtgttcatcatcgagaccatgggcggctactgtggctacctggccaacatgggggggctcgcggccggagctgatgccgcatacattttcgaagagcccttcgacatcagggatctgcagtccaacgtggagcacctgacggagaaaatgaagaccaccatccagagaggccttgtgctcagaaatgagagctgcagtgaaaactacaccaccgacttcatttaccagctgtattcagaagagggcaaaggcgtgtttgactgcaggaagaacgtgctgggtcacatgcagcagggtggggcaccctctccatttgatagaaactttggaaccaaaatctctgccagagctatggagtggatcactgcaaaactcaaggaggcccggggcagaggaaaaaaatttaccaccgatgattccatttgtgtgctgggaataagcaaaagaaacgttatttttcaacctgtggcagagctgaagaagcaaacggattttgagcacaggattcccaaagaacagtggtggctcaagctacggcccctcatgaaaatcctggccaagtacaaggccagctatgacgtgtcggactcaggccagctggaacatgtgcagccctggagtgtctgacccagtcccgcctgcatgtgcctgcagccaccgtggactgtctgtttttgtaacacttaagttattttatcagcactttatgcacgtattattgacataatacctaattggcgagtgcccatctgctccaccagctccagtgtgtgctgtctgtggagtgtgtctcatgctttcagatgtgcatatgagcagaattaattaaacattt

SEQ ID NO: 19355 - DNA, 1357 bp, Homo Sapiens
ccccgggctgcaggaaccttgaatagctctgcttggacaatggggttggggaatagggttgtctttcctatgaaaatgccatctgtagaccttgtgagtcagccgtccagatgtttgcaggtgaattcctctgcttgacatcctccctgtcactttggaccctatgggagtgggcatctccacgcacctgtgtatgtgaaagtcattttacatttcaaagcagtgtgtgtttcttatttttatatttttaactctttattcttggatgtataaagtgaactttttggcttctgtaagtatgctctatgcacctctaatgttttatcatgtatttatatgttgtacacagtactggctgattctgtaaatggatgtattgtacagagaacatgaacgtctcttcctaattttacatcttcagcatcattgcattaaagtggtgtaatctccttctctacatctgttgtcagagccactgagtgctgtgctgctcgacgtgagggtgaaatgattgacttgtgacctgccaggttgcccgatgccctgttgggtcaccggctggacctgctgcagcctgcagagccacagtcagcctgcccacatgccaccgagcaaacgcatcttgcttttcacatctctcctcctacagccttaatggctgcttgctgccatatgtgacaaatcaccaccaccagtgttaagtgcttctggattcatgggtgagttccctgggcagcccccaggaaggccttccagatctggctccagggtcaccacctgtcacagcaatacctgggaccatgctctcctgggactgtgaggctccttttgacgtacttttgacatcaggcaggtttgggaagaaacaaagccatgcctgctcctgcctctctcccaacatgtttccagcaagtagatgcccctgtgtgtgttttcccttgccttgtttcctgccttatatcttgtatttcgacttattacagagttgagggttcttgcttaatttagatcaagtataaaatttgtatgacttcaagtctcattttatctgaaaggtttttttctcatttaatctgatgtggcattttcgtcatctgaagcatgagtgacaagttgggaatgatgtggtgatttagaatgcagtattggccaagtccaagttgtcaacttaagcgtctgtttaccaagaccggaaacaggggcccaaacatgtccagtcctcttcttccctctgctggaacctttggggacactcaagggtacagtttgacactgatctggtccatgaggctgcccagagaaagcactgcttctgtatgtctcttgtggtattggaacataaacccgtaccacctgc

SEQ ID NO: 19356 - DNA, 880 bp, Homo Sapiens
gcacgaggtctttttctattttagtgtttcatttatgtgcggtctccaatttaggacttttccatagtgccaaagccatacatattcagtagaacatcaataaattacatcagaaattcaacactttattataaaacgggcttcgtgttagataattttgctaaacagtaggctactgtaagtgttctgagcatatttaagacaggctagcattttcaatttacaatattttcaactgatagtaggtttattgggatgtaaccctatgataagttgagaaacatctctttttgtgtgtctactgtgatttaagtatttttaatcatcagccaagcattgttagtagtataaatatgattaataaaaatgtgcatggctttcctgaaggagattttttaattgcctttgagaataaactcataaggtctaccaagaaaataaatgttatgatgtttcagttggcttctaggaaataattaaattagtgatattttaatcaggttttactatctgctaggccccttccatcaattcttattaaattctcaaaataatcctttgaaaagggagtataattacattttacagtgactcgaaccttacccaaacaagtgggagagccaggagccaaactatcaggctccaaagcttttttttagtgcatcacaatgacaaaggggtggttttctttcacccaagaatgtgctttcctggaaatttttctagatagaatattatgtaatttgttttgaaggttttttttcctgactgtcttaaagattatgctagctttagaacacatgcaaacagctgcagctctgtgattaaaatgttaaggtcactagaatagtgttaggaaaatgttaatagataattctgc

SEQ ID NO: 19357 - DNA, 888 bp, Homo Sapiens
gcacgagggttttttaaattcaggcgatttattgtaaacaggataaccctagcactccaccatactggctgtgtcacatgctccctctttcacatcaactggtcaaaaaagaagactttcttaagaagcctcaggtaactaataacttagttccacaaatctcatttactaagcactgcgtaaactgcagtatctggggtagtctgttattgctcatggactgcagcttggacccatctaaatgaatccattagtatgcctgagtgatcaacagcagctctagatccaacctggaaattggaaaatgctgacgcataccaaacaattgcaggttcatggaagactacatgagattgctctcagatctcttcatgtgtcattctcataaaaaagacacttaaatttcacccattttttaaaaaagagctaaaagttactcaatagcacataattttccacataaaaggtaggtggatttttatttactagtacagtggtggatcggaacactcaggcctaatttcagatctgtcttgtatatacttggcagtttaatgaaaagctgcatagtctacaaatacataaaaccagaaggaagtgatgatttcacacaccttctgatggataaagacaggcttcatataaggaggttcttgaaggtagggataaaaagatggttacagcaccacattgatctgacagtagaaatggagccccgcttttgaaagcagccccatagttgtgactatatcgttcttgcccaaattgagatttggaaaatggcaaatgtaaaaacttaagatgtgaaaaggtatgatttacagaagaaagtcctaaccaatcaaatcatatggggaggtaaaatgtccttcaaaatgccattcttta

SEQ ID NO: 19358 - DNA, 967 bp, Homo Sapiens
gcacgaggtctcagtccacgtgcttgcactgcgatggcaatggcctcttcttcaaaatactaatttgtgtgccaatttgtttaaaattatttgaaggcagttcagcctaatctcagtgttctctttctggggtagatgagatggattcttaatatttctgggagtactttttaatgagagaattgtcaaatttggaaagatttattgagccttaggttacatggacagttaagcttaagtaaactgtatattgattatcaaacacaagctgtaattggaaaagttgagaggaaaagcatgagatcacaaattagggggaaaaaagaaaagggatttttaaatttggtgtattaaattcattgtccaagggggaaaatgaataatgtttcattagattccttatatgcaaaagtatttattttgaacatgtgtcctaaaatatatgcactaactgatgtgattaaaattgtccaagaaataaacttgagcataacatactttgtgtgcaccacagtaagctattctgcattgaagtggtcttttataactaaggcctggactttgctccaacagagtcgtggtcttctgaatagtgacttaaggagttttgtttgcttaagtcagataatagcacattcacagggaaacaaagagagttggtggatagaattttctgactattaatttttcttccatgaaattttattatgcctttggcactttctgccactcttacagcatatcacaagatatctgtttagcagaagattatgtagttactttaattttaatataaaagtagcttgtgatacattaccaagagatctctgattctttagtaagtttgagacacctattctacagagatgataggtacttagaaatgaagactttaaagtacatttaatctaatataggccagtaattgggggaaggggctttgagcagtacaattttaagatgattt

SEQ ID NO: 19359 - DNA, 904 bp, Homo Sapiens
gcacgaggccggagttcttcagctagggaaaatgctcactgaaaaagcaatggaagttaaagctgtaagaatattagttcccaaagctgctataactcatgatatccccaacaaaaatacaaaggttaagtctctgggacatcataaaggagaattccttggtcagtcagagggagttatagaacctaataaggaactctcagaggtaaagaatgtattggaaaagctcaagaattctgaaagaaggttactacaggacaaagaaggtctttcaaaccagctccgtgtacagacagaggtaaatcgtgagttaaaaaagttactggtggcttctgttggggatgatcttcagtatcactttgaacgtctagcccgtgagaaaaatcagcttactttagaaaatgaagccctaggtcgaaacacagctcagctttctgaacagttagaacgtatgtcaatacagtgtgatgtatggcgaagtaaattccttgcaagcagggtaatggcagatgagttaaccaactcaagagcagctttacagcgtcaaaaccgtgatgcacacggggctatacaagatctcctaagtgaacgggaacagtttcgtcaagaaatgatagctacccagaaattattggaggagctcttagtttccttgcaatggggaagagagcaaacttactcccctagtgtacaaccccacagcacagcagagctagcattaacaaatcacaagttgggaaaagcagtaaattctcatcttctgggaaatgttgggcattaacaatcaaaaaaagattccatcaacagttgaattctgcagcaccccagctgagaaatggctgaaacggttctaagaattttagatccagttacctgcaaagagagttcactgatatccattttt

SEQ ID NO: 19360 - DNA, 799 bp, Homo Sapiens
  misc_feature (493)..(514): n is a, c, g, or t
gcacgaggccccactctaaatcctggcagcccagtcacagagtatcccacacacactggtgcccagagccggcttctcatgacatgaaattgcatggtcgagggagtctgtggggaaggaagcccaggtcctggctgcaacctgcacggatgctggattccccctcaccccacctctgcatggccaccccctcccagccctgtggggaaactgttccctggaaccactccactccctgcatccccacacttcacagcatcttccatccccctcccaccttctaggcgaatagtccccagagctgtgttcctccaaggggtccgaggaatcactcactcctggaggctggcaaggagacagtctgaggccagggacacatgaagggatgtccccaccccagcactatcagggcctccccaggcttccagagttgaaagccaggagaaaatcggcaaagaccacccttccctaaacccaagcacccaatgatgcnnnnnnnnnnnnnnnnnnnnnnccaccaaatccccaaattcattccagatctatttttctaccagagagaggagcaaagtcctcctcccctgcgcccttacattctgcacttcatagttggattctgagcttaggatcatctggagaccccatggagggacttggaaaggggaactgggatttggggaggggctggaggacttccgcacgcttccacctccttcgacctccactgcgccccacctccctgcctgtgtgtgttatttcaaaggaaaagaacaaaaggaataaattttctaagctcttt

SEQ ID NO: 19361 - DNA, 1744 bp, Homo Sapiens
gcacgaggctggctcgcaggcggcgcggccggcggacccgttcgagacagcgcgggcggctcgggtcccctggggctccgcagcaggaggacgccatggacgacaaggagttaattgaatactttaagtctcagatgaaagaagatcctgacatggcctcagcagtggctgccatccggacgttgctggagttcttgaagagagataaaggggagacaatccagggtctgagggcgaatctcaccagtgccatagaaaccctgtgtggtgtggactcctctgtggcagtgtcctctggcggggagctcttcctccgcttcatcagtcttgcctccctggaatactccgattactccaaatgtaaaaagatcatgattgagcggggagaactttttctcaggagaatatcactgtcaagaaacaaaattgcagatctgtgccatactttcatcaaagatggagcgacaatattgactcacgcctactccagagtggtcctgagagtcctggaagcagccgtggcggccaagaagcgatttagtgtatacgtcacagagtcacagcctgatttgtcaggtaagaaaatggccaaagccctctgccacctcaacgtccctgtcactgtggtgctagatgctgctgtcggctacatcatggagaaagcagatcttgtcatagttggtgctgaaggagttgttgaaaacggaggaattattaacaagattggaaccaaccagatggctgtgtgtgccaaagcacagaacaaacctttctatgtggttgcagaaagtttcaagtttgtccggctctttccactaaaccagcaagacgtcccagataagtttaagtataaggcagacactctcaaggtcgcgcagactggacaagacctcaaagaggagcatccgtgggtcgactacactgccccttccttaatcactctgctgtttacagacctgggcgtgctgacaccctcagcagtcagcgatgagctcatcaagctctatctgtaacctgtgagccctttcctgccaaggtgcagcttacgtagttgaggcagggtgagtagctgcttgacaccccagtgagtcaggccaaaactgagatgtgtttaatgaagatttatggagtaaggacttaaaatcatacatcttggagaacctttcttactcatttcagtcccatctaaaaatgtgtcagctattctaaatcccaacttaaattgttcttacggtttctagaaactttccttttcagtttccagaaatacaagttagataattggctacttaactgatgaaagatgagcccaagtccacctgtcttcatcctcccctgcactccagactgatctgcctaaagcacgcgagatgcaggcgaaaagcagccacacccctctgccacaaatgaccaacagctggtcaggacgttacacgcggtgccttgtaagaggcaagaaacacttgccgaatctgcgtctggcttccagtggtaagcacattcctcagcaggatcaagccaaacagtaaaaactaccaagagaacacgaggaaggcagaaacgatgtttagcaacagtattctgcatggttcactgcttaagaaaatgccttctggaatatttgtaaactgaaattctgtatgtgtaagagatgtttaaatatgtttgggtcctaaatagctttttaaaattatacttgggaataaattcagcatcttttcaaataaactctatgaaagacgct

SEQ ID NO: 19362 - DNA, 1066 bp, Homo Sapiens
gcacgaggcaaactttgttttacagcgtcctccacaaaacctctagaatgcactagatatatttttcttggagtcataatcatgatgcataccaacacaacactactcaaattatatttcattgagatgcatgttgcattgaggagtcaacttgacatagagtggagactttttcaaaatggcttttacatcctaatgaaagtttgggaagtatatcctctctgccttttcatcagtgctttgtggtccagctggcaccctttctgaggtttgtgttttgtgctaaatggttttgtccttaaataggagaggctcaaaaacatcaagatttcaggaaaatggcgacagctgcataatggaacccccctgcttctattttgttcttttaattactatttatagccccagttaccttctgaattctgaagtgtatatacctccatgttcctgaaaacaagaaaactcttacttcctgatattccatagactgccttcccaggtgattgagaacatagagaatgttacacatttattttactctaaatgatcttttacccctgttagctaatctttgtgttttcctcaactttattaattacagtgattgcatttttagcatccagttgtaagatgaatatattaaacagctaccagtgttggtgatacctcatccttgaaaggcttagttcatttgtgttttatacttcagtttttccagcatagcagaaaatgccgcttataatttttgtgcacacaaaccttggattcccctgtaaagttgctattgtttcatagcatgcggcactggccttttttcatcctactcattacaggcaaaactcatgtcttatttatgaggattttatagatcattttctgtaacaggtgacaaaagcagaaaagaatgaagaggctgaagtatgaactacccttggagcccatatacatgatataggcaatttcttttgtatgttattcggtcaaaaatactacccacttgatgttttctaatctgatgtgagctcatgttacacagacttttagtaagtaacccgtgactagaaaa

SEQ ID NO: 19363 - DNA, 1116 bp, Homo Sapiens
gtccgaactaattcttgaataaaccccaaagttcactctcttgtttaagtagcagcagctttttacttaaaatttaattttaactacattgatactttacacatcctagtttggtaacacagctttaactatgtcatgcaacatatatatgttggtaggatgttattagagagatatgtgtgcatatatatttttttgcacctgaatcacccagcttttcataagtggtatgtttaattggtcattcagccaaccatcagtattttccccccacaacatgtgtaacacttttcagtctgtggatatctgatacattaagatttctttttataagtattcattttgaatgtgcatatagttatttgaccccttccaaatacttgtagccaaacattggctagaacatcccaagatatgctgacactgtcctgttagcttcatattatacttgctagtttaggtctctatagaagccctatataatttagaatatgcccactgaatatctttaatagaaagtaacataaagctagtattcaatgtagagtattttcatatgtttttcacagcccgttacaaattggcaatgtttggttaatgtttgtattacttggaaatcgctacagcttggactatttttttctaaatttttagcattagtccatttctgctgctaacaattgaatccagaaatctactttctccatcttccactgttagtgccagtgagcaatactgttgtgcaacaaaaatgtcactttatctcagtgtgaatgagtagtctaaattccctttctaccattgatttaaatatatatattggtaagagagactgcccatgtgtttagaatagaattttttaaatgaaatgatcaacaggtggaatttgaaatatattcttctacaaaagagatttctttcccttttatattttgatgattgttttcttaagattaagatatgttcttgctcttttataagattatttaaattatgtttccctctgattttttttcaccattgtatttactaagttattggatttacatgaaatctggcactttagggtgttctttttctcacagagtatatttaataaaaatgctgtgtatatag

SEQ ID NO: 19364 - DNA, 2584 bp, Homo Sapiens
  misc_feature (2196)..(2209): n is a, c, g, or t
gcacgaggatttaagggtgtttaagttatatttttcttgatagagggtatgctttgtgacaaaattagatttttgtccttgaaaggattaatattagcatcagttatgtatagctctatttttctagaaacaaggtattctgactacttttatagctgactacttttgggatggctacgttttgggatttaaaatagttcattgtttaatgggttgtaagaggaaaaagtgttaggatttgacagttactttttaaagggatgatcttttgtggtgtgtgtttttcctagtataagcctattgctggcgatgggcctatttaagaacagctgattttttccagtgaaaatatggtaattttaggaacacagtttgtaagttcacatttactataatgggccaaaaccataacctgccagtttgcaatacatcttgatcttttaatattcttatctgatattgtgtaattcaattcctaaactgatagttaccttgaattttgcgaaaaggtttgggtggttttttttaaacatgaaattgagggatctcatctgggcgaacaagaagagaaagctgtgaattgtactgtatcatgtacattcctgatttaatactttacagaacattttattcagatatcaatttgttacataaacatttcagcaatgatacaaagataactgataaaatatattacattcaatgaggttttctttacaaatgctctacttgaggtctgtgtcttaaagatggcatgacacctaagtacaagacatcaactgaatgaggattttaaaaatggtatataagcataggacaagggctatgtttgtttgtttttcaaagtgctttgaagataacagcctttagtttgagttatttcacttttcataatttttaagtagcttatatataatggtggtaccataggattttcttttttcaaatgactgtcggcagaaacagtgggcactgactcaccttttgagttttagcagagaattatttatttctttacaatgcactttctaacccattgtagctatattagcattatcttttaaaaaagacatgcttttgtatttaaatattgtaggatttaagtgtctttctcaaaatagcttattcctttctgaaagaaaatgagggaaatactctgaattattaggagacttaaacccaatatttaaatatgctattttataacactgcatcagttttaggagttgcatctctcctgctggctcttttatatttgagcaagatcagtgtagaatatgtgtttagaaacttgtctgttgtctcagtttagtgaaaaggaggtgctgcatgtgcctgaattaaaaccaagaaatttttccaagccaaatgcagccttagtgatgagagatttaattctccattgtcaccttttagcttttatgattgcttagttttttctgaaggatgtctgcattgtaaaactatggactaaaacctaaaaaacagaatcctcaaaaactttgctgtatgtgttttaacattttagagaacagtatgttgaataactaaggtatgtaacttgaataggaaaaatgtccatcaaatgcaccttggaaaatcacagtagtagaaggctgtgttaccgtttgtgtcttattaacatccttaagttaattttgaatttttgacagttttgagggaaagacctatggaacctaatgtgaagtatttcgtatgttaactggtgttgagttgaagatttttactgtgtataagcagatatcattgaaatgataaaaatgtcattaacctgctgtcttaagatgttcacacaaatatggagagtaattctacaatataaaaatatttattttaatactgagtttcagttaagtcataaacagtgttaaaactcttgggaaggtgtaggggttttttgtttgtcatttttaaaattgaaactgtgtcatacagtgtttcacgtctctgaaattgggattataatagcactattttgatgtagctctaccgatactatgtggtaatgctattttgttttactaacaagctctggaatatttagcagtcattttcactggcacaagagccttttgtatgttattcaatttaaacttttaaaccaaaaattttatggtccagtgtctttggcaaaaagatgctggagggaatgtaacatacaattaatatgtggtnnnnnnnnnnnnnnaaaagacacaaattgccatgttatggttctgccttgaaacagcacaatgaagtgtatcagtatattctgtgattatgaaacttatatgttgtgttgttttgtgtcttctgttgcctgtcctttgggccagatgtggcccagttaaatgcagttatcatctcattaaatacagatgcagataaaatatctttagtgctgcaacattttacctaactttttgtatgttttcatgactgtgtgttattttccaaagctgttcctacctcaccatgaggctttatggattgttatgtattataaatgttctatatgagacagactactgtgtttcttctcatttattaaaagttaagtagaaaaataaaaacctcgtgc

SEQ ID NO: 19365 - DNA, 2750 bp, Homo Sapiens
ccgggctgcaggaattcggcacgaggttatctctggcggccttgtagtcgtctccgagactccccacccctccttccctcttgaccccctaggtttgattgccctttccccgaaacaactatcatgagcgcgaggctgccggtgttgtctccacctcggtggccgcggctgttgctgctgtcgctgctcctgctgggggcggttcctggcccgcgccggagcggcgctttctacctgcccggcctggcgcccgtcaacttctgcgacgaagaaaaaaagagcgacgagtgcaaggccgaaatagaactatttgtgaacagacttgattcagtggaatcagttcttccttatgaatacacagcgtttgatttttgccaagcatcagaaggaaagcgcccatctgaaaatcttggtcaggtactattcggggaaagaattgaaccttcaccatataagtttacgtttaataagaaggagacctgtaagcttgtttgtacaaaaacataccatacagagaaagctgaagacaaacaaaagttagaattcttgaaaaaaagcatgttattgaattatcaacatcactggattgtggataatatgcctgtaacgtggtgttacgatgttgaagatggtcagaggttctgtaatcctggatttcctattggctgttacattacagataaaggccatgcaaaagatgcctgtgttattagttcagatttccatgaaagagatacattttacatcttcaaccatgttgacatcaaaatatactatcatgttgttgaaactgggtccatgggagcaagattagtggctgctaaacttgaaccgaaaagcttcaaacatacccatatagataaaccagactgctcagggccccccatggacataagtaacaaggcttctggggagataaaaattgcctatacttactctgttagcttcgaggaagatgataaagatcagatgggcgtctagatgggactatattctggagtctatgcctcatacccacattcagtggtttagcattatggaattccctggtcattgttctcttcttatctggaatggtagctatgattatgttacggacactgcacaaagatattgctagatataatcagatggactctacggaagatgccccagaagaatttggctggaaacttgttcatggtgatatattccgtcctccaagaaaagggatgctgctatcagtctttctaggatccgggacacagattttaattatgacctttgtgactctatttttcgcttgcctgggatttttgtcacctgccaaccgaggagcgctgatgacgtgtgctgtggtcctgtgggtgctgctgggcacccctgcaggctatgttgctgccagattctataagtcctttggaggtgagaagtggaaaacaaatgttttattaacatcatttctttgtcctgggattgtatttgctgacttctttataatgaatctgatcctctggggagaaggatcttcatcagctattccttttgggacactggttgccatattggccctttggttctgcatatctgtgcctctgacgtttattggtgcatactttggttttaagaagaatgccattgaacacccagttcgaaccaatcagattccacgtcagattcctgaacagtcgttctacacgaagcccttgcctggtattatcatgggagggattttgccctttggctgcatctttatacaacttttcttcattctgaatagtatttggtcacaccagatgtattacatgtttggcttcctatttctggtgtttatcattttggttattacctgttctgaagcaactatacttctttgctatttccacctatgtgcagaggattatcattggcaatggcgttcattccttacgagtggctttactgcagtttatttcttaatctatgcagtacactacttcttttcaaaactgcagatcacgggaacagcaagcacaattctgtactttggttataccatgataatggttttgatcttctttctttttacaggaacaattggcttctttgcatgcttttggtttgttaccaaaatatacagtgtggtgaaggttgactgaagaagtccagtgtgtccagttaaaacagaaataaattaaactcttcatcaacaaagacctgtttttgtgactgccttgagttttatcagaattattggcctagtaatccttcagaaacaccgtaattctaaataaacctcttcccatacacctttcccccataagatgtgtcttcaacactataaagcatttgtattgtgatttgattaagtatatatttggttgttctcaatgaagagcaaatttaaatattatgtgcatttgtaaatacagtagctataaaattttccatacttctaatggcagaatagaggaggccatattaaataatactgatgaaaggcaggacactgcattgtaaataggattttctaggctcggtaggcagaaagaattatttttctttgaaggaaataactttttatcatggtaattttgaaggatgattcctatgatgtgttcaccaggggaatgtggcttttaaagaaaatcttctattggttgtaactgttcatatcttcttacttttctgtgttgacttcattattcccatggtattggccttttaaactatgtgcctctgagtctttcaatttataaatttgttatcttaataaatattataaaaatgtc

SEQ ID NO: 19366 - DNA, 1742 bp, Homo Sapiens
gcacgaggcaagaacgaccagtgctatgaggacattcgcgtgtcccgtgttacctgggacagcaccttctgcgccgtcaaccccaagttcctggcggtgattgtggaggccagtggagggggtgcctttctggtgctccccctaagcaagacgggccgcattgacaaggcctacccgacggtgtgtgggcacacgggacctgtcctggacatcgactggtgtcctcacaacgacgaagtcatagccagcggctcggaggactgcacggtcatggtgtggcagatcccagagaacgggctgacctccccgctgacagagccggtggtggtactggaggggcacaccaagcgagtgggcatcatcgcctggcaccccacggcccgaaacgtgctgctcagtgcaggctgcgacaacgtggtactcatctggaatgtgggcacagcggaggagctgtaccgcctggacagcctgcaccctgacctcatctacaatgtcagctggaaccacaatggcagcctgttttgctcagcatgcaaggacaagagcgtgcgcatcatcgacccccgtcggggcaccctggtggcagagcgggagaaggctcatgagggggcccggcccatgcgggccatcttcctggcagatggcaaggtgttcaccacaggcttcagccgaatgagcgagcggcagctggcgctctgggacccagaaaacctcgaggaaccccatggccctgcaggaactggactcgagcaacggggccctgctgcccttctacgaccccgacaccagtgtggttctacgtctgcggcaagggtgactccagcatccggtactttgagatcacagaggagcctccctacatccacttcctgaacacgttcaccagcaaggagccgcagcggggtatgggcagcatgcccaagcggggcctggaggtcagcaagtgcgagatcgcccggttctacaaactgcatgagcgcaagtgtgagcccatcgtcatgactgtgccaagaaagtcggacctcttccaggatgatctgtaccccgacacagccgggcccgaggcagccctggaggctgaggagtgggtgagcgggcgggatgccgacccgatcctcatctcactgcgggaggcctacgtgcccagcaagcagcgggacctgaagatcagccggcgcaacgtgttgtctgacagccggcccgccatggccccgggctcctcccacctaggggcccccgcctccaccaccactgctgctgatgccacccccagcggcagcctggccagagccggggaggctgggaagctggaggaggtgatgcaggagctgcgggccctgagggcgctggtcaaggagcagggcgaccgcatctgccgcctggaggagcagctgggccgcatggagaacggggatgcgtagggccacagccacacgccaccttcatctcctccgccgcccccttcccactcagcttctgccagcgggtcgcaccgggctagctggctgcccagagcctctgaggcagcgcaggggtcagttcccacccccacccgtcccaggcccaggccgaagccagcgcccagcttttctcactgttcctgtggaggatgtctacgcccaggcgagctcctcgacctctgagggaccatctccccgaccactgcccagcctctgctccctccccagaggaggcgggagggtgggcttctatattttcattccaattaaattctctttcta

SEQ ID NO: 19367 - DNA, 989 bp, Homo Sapiens
gcacgaggggaacaacttgatacagagacaagtacaactcaatcagaaactattcagacagcggcttctctgttggcctctcagaaaacatccagtacagacctttctgatatccctgctctccctgcaaatcctattcctgttatcaagaattcaataaaactgagattgaatcggtaaaaacaacctcaggggtccataaacaatatctgccaactcaacctgttgtcttcaaatgctaaaaaaggagaatggagggtacaagactagacatgactgaaatggatttgggttttttggtgacctcccttactgggctaatcagcacttgatcggaagtccaggttagtatgtgaagccaggagtactattattattgtgttagcaacagttgcattaactatttcaaaaattactgcctttaaaaaaaacaacctcaagctatatttgtattcataattgacatctggattgggtttatgtttgatgcattgtttggaaaatttgcaatacaaactggcataagaattacttattctgatgatgcacttttatgtatttttcattagaaagtagaactaattttagattttcagcttgatggattttcagtttttcctgaagaattttctttaccattagtcttcaaattggatactgttgtgcagtggtgtactgttatacttcagaaaaagggtaagagtacatctagttcagttcctatgaggtagctgtaacccttaaaaatgaaacgtcaactctagggtacatttgacattgaaagaatagttaggaaataacttggttttgatagggtcatgattaagaaatgatatattggttttatttatggaattgttttatagtgcatacaaatcagcgatcagccagcaaatatttttctttgagcttgtgaaagctctgtgttcttttgccttcaatctgttgtcttcaaacaacaaacaaaaagctgctgcctttccctcccc

SEQ ID NO: 19368 - DNA, 869 bp, Homo Sapiens
gcacgaggcgcaggtcccacgcagcagcaggtggagggccggctcggcgagctcctgaaatgccggcagcccgcgccgccgacctcgcagcccccgcgggcgcagccctttgcgcagccgccgggaccctggcccctgtcgagtgcccctctcagctgaggaggaaccgagagcggcgctggggcacctgagcccaggaaggcaacaggccggccgggaccgcgagtgcctggcggagcaggcgcagcccaggactcccggctcccacctccggctgtagtccagggccaaggcttgtgttcaatcgtgtgaatggccggcgggccccctccacgtccccatccttcgaggggacccaggagacctacacagtggcccacgaggagaatgtccgctttgtgtccgaagcctggcagcaggtgcaacagcggctggatggtggcccagccggtgagggcgggccaaggcctgtgcagtacgtggagaggacccccaatccccggctgcagaactttgtgcccattgacctagacgagtggtgggcgcagcagttcctggcgagaatcaccagctgttcctagtggctgctgggagggggcgctgctacacggccgacctgtcgccaggagagaagcatggcgccctgcccacccactgcgcctggctgggtgccggccacacctgaagtgccagcatttggacttttgcacctttttttcccttggccggctgtcccaaccaagctgccatggccaaggccgaacccgtctgacctcagccctgctcactgtgcccagggaccagcgaccagcccctggggctggcagggaggagctccggctataaagtggaaccgcccgaggggggcc

SEQ ID NO: 19369 - DNA, 418 bp, Homo Sapiens
gcacgaggtaaaaacatttattctgatacattctatcataagttagtacaagttccactctgctacagatgcgtctgtgaagagccttgtgccatccaactagtgactgaatgatgtcccatctcttatccgagccagagcacacatcttccatgctgtccgctgattgcctccaaatccagaagaccaaataatcctttatccccaaagtaggctcaaaacagttggttcaggcattccgggatctgcacccctcttaaatcccaggtaaatcacaagagggataaagccccagcgaatggcaaactggctccccttgaagagctgctgtagtctctgcttggcctctttgctcagcttcaccatggcgacggccgtgtggcgcagggaggaccccttacagcaaccaccggacgcg

SEQ ID NO: 19370 - DNA, 1602 bp, Homo Sapiens
  misc_feature (1279)..(1298): n is a, c, g, or t
gcacgaggcagactatagctttatttatagaatcttacaaataaaacatttacagtccacataagttaattttcttttctaatttcttctcatacacctgagttatttaaaaaaatactgtgatggaactgcagaactgtaaagggaaataagaacaataaaatcctaacctctcttgcaaaaatcagacaactttgttttaaagtagatgcccagcatattgccatctctttggaagaggacttactatactcagctcttacgctacccaaacagagaagccttctttttaaaacccaaggttaaggaccagtgaagaatagctccaatttgacactagacacaaaatacctttgggggcaaagacaggggcaagctgtgtgccggtggtgaagtgagaaggagcagaacccctgtccctgcctcactgttcctgcacgtgacatacactttccttgctaacttattaataggagctggtgcatctggaaaatgaggtcgaagctgctaatgccaggggtgaaaaagtcctcccactgacttgctactccttagacttctaatatgtacaaatgcttgaaacagcaaattcaacaactaaaaatcaaaagaaattgccaatttttgactcatgaggcaaagctgttgccacaatcagtggcgactcaagtcagacgatgtgagcgtctccgcctctcctaagctccgactaggactgacctctgcgccaactacggtttaaagaggatttccctttgaggcagctgtctatggaaggaaatttcttaaggtaatataggtgtgcacaaaagggaaaacaccctatttcattttcaatttgtaaagatatagttttgagctcctctcctaaactagaaatccactaactctaacttagtattctactccaagacaaagggtattatgtttaaggaatgataggatctattgggaatgctaaaattataaatttaatacatcaatgcgagttaggttaaagcaaaatcttccagagtcttcaactttgagttattttctgctagctcctgaaagcagcttgagaaaaataaaacagaaaagacaaagaaccgtttaaaaacaacaataataatgacaatataaaaagttagattccaacattcaaggaattggttctttggtaaaactggaccataatcccaccaggaaatcagtcctgatatttaatctagaatctccatcactgaaattttccctcttcagcgtattctcaaatgtattgaagccaacaggcaagatnnnnnnnnnnnnnnnnnnnngtatcaccagcagtttttcctgctcacgttcttttcaagaatattcctggtttgacagatgtctcccaagaagagaaaacaaaacggatgctgcttgtgattactgagagcggacagtttttctatgtaagagaaaagctcaggcattggtagtgaaccagtactcctgtcagccatgcacatgaatcagtttgcaaacatggcccctgggctccaactgtgggcaccactaagaaaggcttctggagagacaggctccccaaagtggctaaagaatctcacattatcaatatgatcctcgtgc

SEQ ID NO: 19371 - DNA, 1186 bp, Homo Sapiens
ttggtgccgtggtgatggctgcagtccagttttgtgatgctgcttttacgtgtccctcgataacagtcagctagacacactcaggaggactactgaggctctgcgaccttcaggagctgagcctgcctctctcctttagatgacagaccttcatctgggaacgtgctgagccagcaccctcagatgatttccctccaaactgctgactaggtcatcctctgtctggtagagacattcacatctttgcttttattctatgctctctgtacttttgaccaaaaattgaccaaagtaagaaaatgcaagttctaaaaatagactaaggatgcctttgcagaacaccaaagcatcccaaggaactggtagggaagtggcgcctgtctcctggagtggaagaggcctgctccctggctctgggtctgctgggggcacagtaaatcagtcttggcacccacatccagggcagagaggtctgtggttctcagcatcagaaggcagcgcagcccctctcctcttcaggctacagggttgtcacctgctgagtcctcaggttgtttggcctctctggtccatcttgggcattaggttctccagcagagctctggccagctgcctcttctttaactgggaacacaggctctcacaagatcagaacccccactcacccccaagatcttatctagcaagcctgtagtattcagtttctgttgtaggaagagagcgaggcatccctgaattccacgcatctgctggaaacgagccgtgtcagatcgcacatccctgcgcccccatgcccccatgcccctctgagtcacacaggacagaggaggcagagcttctgcccactgttatcttcactttctttgtccagtcttttgtttttaataagcagtgaccctccctactcttctttttaatgatttttgtagttgatttgtctgaactgtggctactgtgcattccttgaataatcacttgtaaaaattgtcagtgcttgaagctgtttcctttactcacattgaagggacttcgttggttttttggagtcttggttgtgactccaagagcagagtgaggaagacccctcaagcatagactcgggtactgtgatgatggctgcagtcccagttttatgattctgcttttatgtgtcccttgataacagtgacttaacaatatacattcc

SEQ ID NO: 19372 - DNA, 713 bp, Homo Sapiens
gcacgaggaagactcagcaccttgcctgataaattgtcttataatataatggtaccatttggcccttttgccttcatgccaggaaaacttgtccatactaatgaagtcactgttttactgggggacaactggtttgcaaagtgctcagcaaagcaggctgtaggtttagttgagcaccggaaagaacatgtaagaaaaacaatagatgacttaaaaaaagtgatgaaaaattttgaatccagagttgaattcacagaagatttgcagaaaatgagcgatgctgcaggtgatattgttgacatacgagaagaaattaaatgtgacttcgaatttaaagcaaaacaccgaattgctcataaaccgcattccaaaccaaaaacttcagatatttttgaagcagatattgcaaatgatgtgaaatccaaggatttgctagctgataaagaactgtgggctcgacttgaagaactagagagacaggaagaattgctgggtgaacttgatagtaagcctgatactgtgattgcaaatggagaagatacgacatcttctgaagaggaaaaggaagatcgtaacacaaatgtgaatgcgatgcatcaagtaacagactctcatactccttgtcataaggatgttgcaagttcagaaccattcagtggtcaagtgaatagtcagttgaactgttcagtgaatggttccagttcttaccacag

SEQ ID NO: 19373 - DNA, 964 bp, Homo Sapiens
gcacgagggtaatattttgatgatttattttgtttgtaattagttattataagaagatctagatcctagatattagaataaaatttattttctactgtatccatttcaaatgttaaaatattgtttaatatttttgaaatccctgagtatcaggccttgttataaataagctgcataatcaataaatagaacaagggactttttgttgataatccaaatactcaaagtttacgtaatgaaaattatagcgtgtgtgcaaactcttgagggttgattatgctgcaatttagcatgttggaatgtctagggagaaggttgactttttgcacttctgtatatagtcaaaagagagaaacctgtataatagtaagatcttattttgaataaaaacgtctataattacaaggagttttgttaaggctaatacaatgacagactgagcaaaattgcttgcaaaagtggcacagagttagcactccataccccttcaaacatgttgctttgctttcttgtggacagcttgtagtttgccaggattttttcagctggaaagatacgccatcctttcaaaccctcatgactgacaaaaactccatggggccaaatctgcctgaagatcattaccaaaaatagcaggtacttctaccattaaggtgaaatcatggatcagatattccttacatttttcaaaactactgcatgtttaaaacttcaacaaaaaaagagagaaagaactatactaagaacatatattattcagatcagtttctgccaatttcagtggtttattgttcacaaaaaaatcttcaaacaagtattgactttcacaaaatttaaatcataaacaggcaaaccaaacagcacactgtagctatagttgttatgtgattgtttttaattgctgtagatcctgtctttcagcaggtgaaaaataaacgcagttcaaattcatggtttaatttca

SEQ ID NO: 19374 - DNA, 1585 bp, Homo Sapiens
  misc_feature (965)..(974): n is a, c, g, or t
  misc_feature (1114)..(1122): n is a, c, g, or t
  misc_feature (1144)..(1159): n is a, c, g, or t
  misc_feature (1232)..(1246): n is a, c, g, or t
gcacgagggaaaacatttaaaatttattgacaacagaaatattttatagcccaacctggtatgcaaaaatgctggctatgtcccactgagttgatttcatggctcactaatgaaatgtgagccacagagggacaattacattgcagggtattaaatggcctggagaatcaccagaaaagaacactcttgcctgtgcttccacaaactgggtggtcaagtgggctgatagttccagaagcactccatgtgtgtaacccacatcctcaaaacgatgcctggtgtctcacagaatctgatggacaaaacctaagtgacacccaaaaccctgatacaaaggaatctgagaaacatagtaaagaaaggaaagcacactagcaaaacttccaaaagatgttaatcaaggtaagccacagaatcagtcccatatctgcaatgaaatgctgcttatgtatgtgagacagaaaaacctggtggctgaagtattatttcatttatcttatctctataaatggcatattttcttgattacagcctattgctacttcactgagggaaaactcgtaactacaactagtacaatttgcctgatgagatgaaattcaagggaacaaacctaaagtaacaaatccccaagttacatgtctttcacaaacatacctctacccagtcaatagaggatttatcaaaagaaagattaatagtggaaaaataaactgaggattctttttctcaccctcatcacaaagaatcttaagattaaaaagaagtttttagactagtgaagagaagggaagaacaaggaatacctttaatctctccttttcatttttattttagttcagcttatgcaagattttgtaccttgtgaaagaatttgtttactgaataaaaaatattgcttaagatttaaagcaattaaagcaaataagttgctgaagggagatcatatgagttaaatacaggcnnnnnnnnnnaatctgtaattgatttacatttgattttaagaagacactgtttacatcaggtcaccacaaagcagatttacatacaaccttcaattgcggaaaaacaaagtttctttttgatccaaacacaaagaaaaacttctttgtgnnnnnnnnnaatgatcttttccttgatcatnnnnnnnnnnnnnnnntgcagtacttttagaaggtaaagctagtaagtttacagaagtgcaaaacaccaaaacacttgaagcaaaaacnnnnnnnnnnnnnnnaagaaaaaggtatgacttcttgttttctgttcttggcataaattttaattctttccagtggaaccaaaacctcctgaacccctttcggtgtcatccaaggcttgaacttcttctatttctggataaaaaatccgttcgcaaatgagctgtgcaattcgatcaccttttttgacttcaaacttttctttgccaaaattaaacagctcctacatttcctctataatcttcatctatgacaccagctcctacatcaataaagtgttttgcagccaagcctgaccgtggagccactcttccataacacccagaagggagcgctatctgaatgtcccctcgtgc

SEQ ID NO: 19375 - DNA, 1146 bp, Homo Sapiens
gcacgagggaaatatgcaaaagaggcttggccaggcaagaagcccacaccttccttgctgatttgatatttttggtcatggagaagggtgggattgggtgggaatggggtggaagggtgatggggagctaatgaactagggagaaaaactttccatgtgtgcggtatcgtctttcagaatgtctcctggcatcctaaccatgtaatatgacaattgggggtggggttgaaatagcccataaagacctgtcttcacaacacttgcattgtagagaaaggcttcttatatccttttcaatagactgccctggctctttcctaggccttccactacctcctttctttctcccactttctaggatcatttttatgtaaagtcacatatcccaggcctcaggttgaatccagagctgtagaggttacagtagcatcaccagccttgggggtccagagcctaatttatattcactatccttccaagtcccgggtagcagaagggttgccatagatctcagtttgatcaaaaagaaggcttagaattctgcagttaagctgaggtttaaactaaaaaatgtttccttgggtcagtggttttgaggtccagtagctaggcttttctcttttgtccttcctgttggaatgaaaacatttcgattttccttcatctgtgactggtgccatagacacaggtttatagttttaacttacagtattgtttgaaatttacctgtttttcttgtcaaacctgagcactcctcctgctgaagtttcttatttaattccagagtactgtcctctactctaaggcattacttttaagtgtattatgaaggcagttttcaaaggatatgaccagttggggtaattcaaattaaaaaggaaaagatttgtttggaagtaactggtgtctctaagaggaatttttagatgtcagtttggaggctctttcccccctcaattgagagctcttgttattcagagctccaagactagacctggctaacaaacataggagacaaagttaggaaacattgatacaagctttgtacagagatttgtacatttgtgtaataggccttttcatgctttatgtgtagctttttacctgtaacctttattacattgtaaattaaacgtaacttttgtc

SEQ ID NO: 19376 - DNA, 593 bp, Homo Sapiens
  misc_feature (416)..(432): n is a, c, g, or t
  misc_feature (484)..(504): n is a, c, g, or t
gcacgaggtttcctttttaatagaaaaaatatacactttattttcaactagaaaggtgcaaacatgtaacttttggtcacactctcaacaaataaactgtccgaaaaacagtcatatcaaagtagaaacaaatgcttccaggtgaaaaaactgatcagctatatagagtcactcagtttttaataaaggccatttgttcattaaaagtgaggctaccacatttcctacctagaaatcagcctgccaaggacactgatgcctcccctttgcaaacaatctgttttgacggactgtcattctatctgagcagaatttccatataagtatccatttcatgctttgaacgatcagacaagctttacattctacctatggtgttcagaaattgaggctaacattgaaatatcaaagcattnnnnnnnnnnnnnnnnnggcacaaacaactttaaattaacttagataactgtacatatatatatatatnnnnnnnnnnnnnnnnnnnnnatatttacaatataaattttaaaaaatctggcttgttacaggcaaattcacttgccacaagctgtccagtataatcgacaggattccga

SEQ ID NO: 19377 - DNA, 1663 bp, Homo Sapiens
  misc_feature (1073)..(1081): n is a, c, g, or t
gcacgagggcttgctgtcccagcggcgccccctcatcaccgtcgccatgcccggaggtctgcttctcggggacgtggctcccaactttgaggccaataccaccgtcggccgcatccgtttccacgactttctgggagactcatggggcattctcttctcccaccctcgggactttaccccagtgtgcaccacagagcttggcagagctgcaaagctggcaccagaatttgccaagaggaatgttaagttgattgccctttcaatagacagtgttgaggaccatcttgcctggagcaaggatatcaatgcttacaattgtgaagagcccacagaaaagttaccttttcccatcatcgatgataggaatcgggagcttgccatcctgttgggcatgctggatccagcagagaaggatgaaaagggcatgcctgtgacagctcgtgtggtgtttgtttttggtcctgataagaagctgaagctgtctatcctctacccagctaccactggcaggaactttgatgagattctcagggtagtcatctctctccagctgacagcagaaaaaagggttgccaccccagttgattggaaggatggggatagtgtgatggtccttccaaccatccctgaagaagaagccaaaaaacttttcccgaaaggagtcttcaccaaagagctcccatctggcaagaaatacctccgctacacaccccagccttaagtctcttggagaagttggtgctgtgagccagaggatgtcagctgccaattgtgttttcctgcagcaattccataaacacatcctggtgtcatcacagccaaggtttttaggttgctataccaatggcttattaaatgaaaatggcactaaaagtttcttgagattctttatactctctgccttcagcaatcaattccattcatacatcagcactctgctggttctgtttgaaatatgttctgtatttaaaactcaaatcttgttggatctctgcagggcttgtgaccaatgaagtcatatttgttgatggttgacaaagcttgcttcactccatcagagaatgactatcaannnnnnnnnaactgtcctatcacgtcctctcctgtcacccattttgaagagtggcagaacttgaagttcaacttcctctgtaaatatccaagtataaagcccaggaacttctagaataacccagatgcgctttaattttttttaatatgttttgatcacagaacttctagaataacccagatgctctttcatattcttttaatacatcttgatcacagctgggggaaaaaaagctttttaattctataccttcctagtagataagtgaagagcagggaaagagacctttaaatattttgctataaaaaaatttgtgataagtttctatcaaaatggggagattgcagaaaaggcttcccttggctcccaaggaggtgtagcaggtgtgagcaatattagtgccatgtgcctttcacacagggtttgcatttatcagtctgttttccgatgatgtgtacatgaaagagtacaccatgtgaagagaagagagaatgattgaaaatgttttagtatagaactcttcttgcagtgggttgctattttctagattttactttttagggaacaaaataaaatcctttgttaaaactg

SEQ ID NO: 19378 - DNA, 921 bp, Homo Sapiens
gcacgagggcttccggtgctaggtggagggaaggaaggagggagccggggaggtgggccagggcagcagccgggctgaagtcggcttggggagccagagggagcggagcggaacctgcggggcagaggcggcggccgcagcggcgcagctgatagcaggaacaggatcaagtcttccataccagggaccaggccaaaaccagactgccactgcccctacttgggccccactgtccccagaaagcagctgctgtgatcatgggcaatatctttggaaaccttctcaagagcctgattgggaagaaggagatgcgcatcctgatggtgggcctggatgccgcaggaaagaccaccatcctatacaagctgaaactgggggagatcgtcaccaccatccctaccattgggttcaatgtggagacagtggagtataagaacatcagctttacagtgtgggatgtgggtggccaggacaagattcgacccctctggagacactacttccagaacacccaagggttgatatttgtggtcgacagcaatgatcgggagcgagtaaatgaggcccgggaagagctgatgagaatgctggcggaggacgagctccgggatgctgtactccttgtctttgcaaacaaacaggatctgcctaatgctatgaacgctgctgagatcacagacaagctgggcctgcattcccttcgtcaccgtaactggtacattcaggccacctgtgccaccagcggggacgggctgtacgaaggcctggactggctggccaatcagctcaaaaacaagaagtgaaagccagacagccctaacaaagcaccccacccacccctgacatacctactgtcaccctgccccagtcctaccctttcctctccatgcaagtgtggccagggccctgggtatcatgtcc

SEQ ID NO: 19379 - DNA, 1730 bp, Homo Sapiens
  misc_feature (1177)..(1188): n is a, c, g, or t
atcccccgggctgcagggaaaaacgtcgcttcaggaaattcctagtgtatgttgccaacttcgatgaaaaagatccaagaacttttgaaggcattgatcctaagaagaccacaatgcgagatgtgtataagaaatttgatttgggtcaagacgttatagattttactggtcatgctcttgcactttacagaactgatgattacttagatcaaccgtgttatgaaaccattaatagaattaaactttacagtgaatctttggcaagatatggcaaaagcccatacctttatccactctatggccttggagaactgccccaaggatttgcaaggctaagtgctatttatggaggtacctatatgctgaataaacccattgaagaaatcattgtacagaatggaaaagtaattggtgtaaaatctgaaggagaaattgctcgctgtaagcagctcatctgtgaccccagctacgtaaaagatcgggtagaaaaagtgggccaggtgatcagagttatttgcatcctcagccaccccatcaagaacaccaatgatgccaactcctgccagatcattattccacagaaccaagtcaatcgaaagtcagatatctacgtctgcatgatctcctttgcgcacaatgtagcagcacaagggaagtacattgctatagttagtacaactgtggaaaccaaggagcctgagaaggaaatcagaccagctttggagctcttggaaccaattgaacagaaatttgttagcatcagtgacctcctggtaccaaaagacttgggaacagaaagccagatctttatttcccgcacatatgatgccaccactcattttgagacaacgtgtgatgacattaaaaacatctataagaggatgacaggatcagagtttgactttgaggaaatgaagcgcaagaagaatgacatctatggggaagactaacagcagtacatgttattatgtaattaggacacatttaaaatttggcaaataatgcatataatgaaatcaatattgtaaggcctgcttttgtaatgaaaatggagagaatgaagagcgctgtgccagtaaatactccccttcacctttctaattattaacttgttttcatggagtggctattcagcattggcagttaccacattctgttcaatttaaccaaactggcnnnnnnnnnnnnctagtgaagttaaacaaacattgggataccgacacagacaacttgagacagtttttttaatcttttaatcagtgtagctatgtgctgctgctgctcaagagctggatccatacaggttgtgtgtcatctgtcctcttgaggttcaggagattctaaattgaatattccacggtttgggacagcatccggaagttttccctatgactttatattttgtattatgtcaaatgttatggcagggcccaaatagcatagccacaagtttggtttatgtgggcataaaattctaaccaaaccccagacatagggagtcatttggagaaagcctgtatgtggtgttttaacctaataaagttgatgagagagaaggggagaggaagcgaacataaagcgggtcaagtgtagtgcatcttttgtatctcaggcgtggcttcttcagtggaccaagctgcaatgcagtattgacttgacagagcctctacttctgtctcaaaatggctccaaatgatttctgtactgcaaaataaagccaaacctcgtgc

SEQ ID NO: 19380 - DNA, 939 bp, Homo Sapiens
gcacgagggaaatcacatattttatattcagcataaaggagaataaattccagaaaacacatattctgaaaatggagtgtttgttccctgccatttttcacacctctcttaactttagttctgtttagttgagaggctgtgattttactcttgcctgtgaacctcatgcatgaaagcagcacattaaattgtaaaaatacaaacagatcgtgtgatcattcaaggagccagacatgaggtcctgcacgagggtgttgggaggacaccacagattcatctcagacagtgatcaggactgaggatggagttaaatcactcagcccctgggtggggtggggtggttcaaatggatgactgatctcctgagtacactgaagccacaggctggtggccatgttctctgaattgggtgcagaagacaagggcagagtggctgcggcccctattacctttgtagcagccacatcagaaagcagaagaaaacagtatttctgaaggcattgtttgaggttgatctcagcactgaacgatttcaagccctacgcaccagaacagaaggagggtggaggaagtgatcagagggaacgagctgtaggtttgcagaaatgtgtgaaaccaaaatgatcactgcctacttgtgattcaaatcttcagagttttcctagttcttctagaaatacatgtcaggtttgtttgttcatcctttctgtcagcatggatcaagcccctaaaatgtggtaagtgttgtcagagcagggcaatatctctactctcaagtatgagggaatagaaacaagcagcagttttagccagggttcaatgatagagtggaggtaaattaagagcctccaggctgtgattcaccatttgagacattatacataatttgtttttgttataagccatttgaatttttaaaaaatttcatacatgcaatgg

SEQ ID NO: 19381 - DNA, 848 bp, Homo Sapiens
aactgcagcagcaagtcaagctgtataagttgaacttggagtcctctaagcaggaattaattgactacaagcaaaaagctactagaatactgcaatctaaggaaaaattgattaacagcttgaaagaaggctctggttttgaaggcctagatagcagcactgccagtagcatggagctggaagaacttcggcatgagaaagagatgcagagggaggaaatacagaagctgatgggccagatacatcagctcagatccgaattacaggatatggaggcacagcaagttaatgaagcagaatcagcaagagaacagttacaggatctgcatgaccaaatagctgggcagaaagcatccaaacaagaactagagacagaactggagcgactgaagcaggagttccactatatagaagaagatctttatcgaacaaagaacacattgcaaagcagaattaaagatcgagacgaagaaattcaaaaactcaggaatcagcttaccaataaaactttaagcaatagcagtcagtctgagttagaaaatcgactccatcagctaacagagactctcatccagaaacagaccatgctggagagtctcagcacagaaaagaactccctggtctttcaactggagcgcctcgaacagcagatgaactccgcctctggaagtagtagtaatgggtcttcgattaatatgtctggaattgacaatggtgaaggcactcgtctgcgaaaatgttcctgttctttttaatgacacagaaactaaatctgggcaggaatgtacggaaaagttcgcaagctgctagttcaattgatcagtttagtattccgcctgggatttttc

SEQ ID NO: 19382 - DNA, 2027 bp, Homo Sapiens
  misc_feature (1610)..(1632): n is a, c, g, or t
  misc_feature (1658)..(1688): n is a, c, g, or t
gcacgaggctccttagctcttagtctctttggtaggagttttgttccagaggagctctcccccttggatttgaacttgctctttttgttgttgttgttctttctcttctttttcttacctcccactaaaggggttccaaattatcctggtctttttctaccttgttgtgtttctatctcgtctttacttccatctgtttgtttttttctccatcagtgggggccgagttgttcccccagcctgccaaattttgatccttcccctcttttggccaaatcctagggggaagaaatcctagtatgccaaaaatatatgctaagcataattaaactccatgcgggtccataacagccaagaagcctgcaggagaaagccaagggcagttccctccgcagaacaccccatgcgtgctgagaggcgagctccttgaagaaggggctgttcttccaggaggccttattttgaactgcctcaggaccccactggagagcacagcatgccttactactgggtcatccttggtctatgtgctctgtactggaggctctgttctgcctcttatcagccaggtcaggggcacacatggcttaagtgacaaagccagaggagaagacaaccctgacagcatcacgctgcatcccattgctagcaggattggcaactcttcagacggagctgcgcttccctgcagtctagcacctctagggcctctccagactgtgccctgggagctctgggactgaaaggttaagaacataaggcaggatcagatgactctctccaagagggcaggggaattttctctccatgggccacaggggacagggctgggagaagaaatagacttgcaccttatgtcatgtaaataattgattttctagttcaagaagataatattggtagtgtgggaattggaggtaggaaggggaggaagtctgagtaagccagttggcttctaagccaaaaggattcctctttgtttatctctgagacagtccaaccttgagaatagctttaaaagggaaattaatgctgagatgataaagtccccttaagccaacaaaccctctgtagctatagaatgagtgcaggtttctattggtgtggactcagagcaatttacaagagctgttcatgcagccatccatttgtgcaaaatagggtaagaagattcaagaggatatttattacttcctcataccacatggcttttgatgattctggattctaaacaacccagaatggtcatttcaggcacaacgatactacattcgtgtgtgtctgcttttaaacttggctgggctatcagaccctattctcggctcaggttttgagaagccatcagcaaatgtgtacgtgcatgctgtagctgcagcctgcatcccttcgcctgcagcctactttggggaaataaagtgccttactgactgtagccattacagtatccaatgtcttttgacaggtgcctgtccttgaaaaacaaagtttctatttttatttttaattggtttagttcttaactgctggccaactcttacatccccagcaaatcatcgggccattggattttttccattatgttcatcacccttatatcatgtacctcagannnnnnnnnnnnnnnnnnnnnnnagttatatagtttcttgtcttggacnnnnnnnnnnnnnnnnnnnnnnnnnnnnnnngctttaaaacaagtgtgatgccatatcaagtccatgttattctctcacagtgtactctataagaggtgtgggtgtctgtttggtcaggatgttagaaagtgctgataagtagcatgatcagtgtatgcgaaaaggtttttaggaagtatggcaaaaatgttgtattggctatgatggtgacatgatatagtcagctgccttttaagaggtcttatctgttcagtgttaagtgatttaaaaaaataataacctgttttctgactagtttaaagatggatttgaaaatggttttgaatgcaattaggttatgctatttggacaataaactcaccttgacct

SEQ ID NO: 19383 - DNA, 1958 bp, Homo Sapiens
  misc_feature (1412)..(1437): n is a, c, g, or t
  misc_feature (1479)..(1502): n is a, c, g, or t
  misc_feature (1578)..(1586): n is a, c, g, or t
  misc_feature (1668)..(1676): n is a, c, g, or t
gcacgaggctccagtccgcggtgccatggcccccgcccgtctgttcgcgctgctgctgctcttcgtaggcggagtcgccgagtcgatccgagagactgaggtcatcgacccccaggacctcctagaaggccgatacttctccggagccctaccagacgatgaggatgtagtggggcccgggcaggaatctgatgactttgagctgtctggctctggagatctggatgacttggaagactccatgatcggccctgaagttgtccatcccttggtgcctctagataaccatatccctgagagggcagggtctgggagccaagtccccaccgaacccaagaaactagaggagaatgaggttatccccaagagaatctcacccgttgaagagagtgaggatgtgtccaacaaggtgtcaatgtccagcactgtgcagggcagcaacatctttgagagaacggaggtcctggcagctctgattgtgggtggcatcgtgggcatcctctttgccgtcttcctgatcctactgctcatgtaccgtatgaagaagaaggatgaaggcagctatgacctgggcaagaaacccatctacaagaaagcccccaccaatgagttctacgcgtgaagcttgcttgtgggcactggcttggactttagcggggagggaagccaggggattttgaagggtggacattagggtagggtgaggtcaacctaatactgacttgtcagtatctccagctctgattacctttgaagtgttcagaagagacattgtcttctactgttctgccaggttcttcttgagctttgggcctcagttgccctggcagaaaaatggattcaacttggcctttctgaaggcaagactgggattggatcacttcttaaacttccagttaagaatctaggtccgccctcaagcccatactgaccatgcctcatccagagctcctctgaagccagggggctaacggatgttgtgtggagtcctggctggaggtcctcccccagtggccttcctcccttcctttcacagccggtctctctgccaggaaatgggggaaggaactagaaccacctgcaccttgagatgtttctgtaaatgggtacttgtgatcacactacgggaatctctgtggtatatacctggggccattctaggctctttcaagtgacttttggaaatcaaccttttttatttgggggggaggatggggaaaagagctgagagtttatgctgaaatggatttatagaatatttgtaaatctatttttagtgtttgttcgtttttttaactgttcattcctttgtgcagagtgtatatctctgcctgggcaagagtgtggaggtgccgaggtgtcttcattctctcgcacatttccacagcacctgctaagtttgtatttaatgnnnnnnnnnnnnnnnnnnnnnnnnnncttgaaaatgagagaagagccggagagatgatttttattaannnnnnnnnnnnnnnnnnnnnnnnactatttatagctttaaatagggcctcccttcccctcttctttctttgttctctttcattaaaccccttccccagnnnnnnnnnatactttaaaccccgctcctcatggccttggccctttctgaagctgcttcctcttataaaatagcttttgccgaaacatagnnnnnnnnnagcaaatcccaaaatataatgaaggggatggtgggatatttgtgtctgtgttcttataatatattattattcttccttggttctagaaaaatagataaatatatttttttcaggaaatagtgtggtgtttccagtttgatgttgctgggtggttgagtgagtgaattttcatgtggctgggtgggtttttgcctttttctcttgccctgttcctggtgccttctgatggggctggaatagttgaggtggatggttctacccttttctgccttctgtttggga

SEQ ID NO: 19384 - DNA, 1189 bp, Homo Sapiens
ccccgggctgcagggtgaaaaaaagctgtatttttataccaaatggaactttagcaacacgttggactactttgtcgggcagagtggtcttcagacaggtgatgctgttggcttaagagatgaacacgtcttctctctgaatttgtttttattggttggtttcacttgaacagaaacgtttgaatggtgtgaagattctttagaaaagtgattggatccatctcaattgtgcacttgaacagcagtgatgtaaatgtgcttatttgtgttttcatttttaactgtgcagccttaccacacctattttgaaagctgatcttttgtcctcttcagggcttttcccttgtgccatgttgtctccagcaatatatgtggcttctggctcagagcttctgctgaggcagggcctcgcgctgagtcacatggctccttggaacaagaaaactttctcagaagtccccacacgggtgggtgacagaaacagtttgtggcaacacaaatctctctccatggtggagaaacctttgcttatccactgtattctactcagtgtatagtgatgacagatgtactagaattaaaccagtcaagtgtactggcccagggtgagtgttaaatgtgtatctcgcctgtggaacctactcagcagcttggtttctggggttgggggcatatttatttcttaaagccaaacctctccttcattggtttagtgtacataagtctatttagatacacttatcccactttaatctccaccagcccctaaactctctcctgtaccctctgttgctgaagtggcctcttcacctgggccctggaaaagccgatggaaaaagtctgttcctgcagccaaggcctgggtcccaggtgactaggagtagccataggaaggtgaggaaggagaagtgggcatgtggtgtcatctgtagtccaaggtctctgcgtctcgtcagtgggtgcagtgccttccccctcaggtgtgagcgtgatggactctagactgccttccatgagtgttggtcatgctatgatgtcatcatttgccattaaaacccattttgtatgatgccaaaaggattaattgtgccagtgactgattcatttaaattgtaatcacatcccttttctgcttcaccaacctgaactgtttttaaaatatcattaaaagtctgttctctttcaaaaa

SEQ ID NO: 19385 - DNA, 1233 bp, Homo Sapiens
ctgtgtcctaatttattatgactacatagcccacattcctctgcccacgcatccgtggagtccaaagcccaaaaagcctcctgctgccctgccaaaccgttgagctcctcaaaagcgaagtgtggcacaggctgatcagctcatgcaaaatggcagggcttcagctgcccaagtgtgtgcgtagccagagcacagcattcatgaagctgtctgactccacctccacctctgataatgcgtgggtgcttttgggatagagcaggagccgaacaggcacattccgggtcttgagggcacggtaatactccatgccctgcttgaagggcacacgccggtcctcctggcccaacatcagtaacagtggtgtcttcacctgagggatgtatctgatgggcgatttgtccagcatctcagcccacacgctgaggtctggcaggcagtcactgctgaaaggaaagccagcctccaccacgcaccagtcagggatgtcagtggagcccaacatggaggcgatgttgatcacggggttccgggccacgcaggccctgtaggtctctgggtactgaccaatcaagtggcaggaaatgaagccaccatgggaaccacccataagggccacatggcttgcatcaaagtgttcctcctggagcacctgttccactgcaaactagtagtaccgcaaagcccatcttgcaaagcatggctgggaacagcatccaggcagtgacaaaggatgaatggggccccccgtggggcatgaccaccatgggcacttgggtcttatctggagggctgccaggctgcagcaggattgcttcaaagtcaaggccagcatactgcacattctcttgctctgggggtggctgtagcacccggatgccccagtggatgtcgggaatgggctcggcctcctccagggacacccacaacactgactgctccttccctgcagaaggcaggaacccaactttcagggttggaggtaggctgggtgtggaaaactgtgccaccatgaggtcctggtcaattgtgagcaacttccagctcccacctgaccctccagctgtgagggaggtcacagtgcccacttgggtgtccacagcaaacaggtcctgccggctgcgctgagccgagtcaaagaccactctctggctgtcagctgaccagcatcccaaaggcagaaggctgcagtagatcccagagaagttctctcccagctgccgagcctcgtgc

SEQ ID NO: 19386 - DNA, 690 bp, Homo Sapiens
ggggtttcattcagtttgatcaatcttcttccccttcttcctcaccctgcagtagcagggtggcagcggcggtctcctcctgctgctgctgttgctgctggtgaagctgctcacaggcagcccgcttctccctctgcttctcttgaatcttcttcatctcctccgagtacttgcagaaggtgtgtccgaacttggcccacaccttgtagggcacggtgatggagttgcgataggtgggcttcacctcgctcactcgcataaacacgccgtacttgttggagcccacatcgaagaagaagcgcttgttgtccacagtcaaggaggtgccctcgggcagctcggccggctcctcctccactccgtagtcgtcgatgagcttggccagagcgtcacggaactcgatgagcccctgcgcgggcagcgcaatggtctggccctgcgtggagcccaggccaggcccccggttgaccgtctggcggatgcgcaggaagcggccgcgctggttctccttgagatccatgtagtacttgcggttctcgcgcaccaggaactcgcttttgagcgcccggcgcggctcgtcctgcgcctgggccaggtccggcggctggctggggcccagctgcgcgtagtgctcgatgaagtcgcccaggtagtcgcggaactccacggccactgacatggaaagagtaa

SEQ ID NO: 19387 - DNA, 764 bp, Homo Sapiens
gcacgaggtggcactcggcggtcgaaaggggagttcaaggagacgggggcgacgcggctgagggcttctcgtcggggtcggggctgcagccgtcatgccggggatagtggagctgcccactctagaggagctgaaagtagatgaggtgaaaattagttctgctgtgcttaaagctgcggcccatcactatggagctcaatgtgataagcccaacaaggaatttatgctctgccgctgggaagagaaagatccgaggcggtgtttagaggaaggcaaactggtcaacaagtgtgctttggacttctttaggcagataaaacgtcactgtgcagagccttttacagaatattggacttgcattgattatactggccagcagttatttcgtcactgtcgcaaacagcaggcaaagtttgacgagtgtgtgctggacaaactgggctgggtgcggcctgacctgggagaactgtcaaaggtcaccaaagtgaaaacagatcgacctttaccggagaatccctatcactcaagaccaagaccggatcccagccctgagatcgagggagatctgcagcctgccacacatggcagccgcttttatttccagggccatctgaccatctcctagattgctgcacagtgcagactcctgagccccagccatacctaaaaataggctctgaggaatgggacagcacatctgcatttttcattttgcacagcttcccaggagatcattactcccattaaagttggggatctttgct

SEQ ID NO: 19388 - DNA, 1249 bp, Homo Sapiens
gcacgagggtacggatcctgggcagcctggtggccatcctgctggtgtttctgatcactgccatcctggtgaaggtgcagctggatgctctgcccttctttgtcatcaccatgatcaagatcgtgctcattaattcatttggtgccatcctgcagggcagcctgtttggtctggctggccttctgcctgccagctacacggcccccatcatgagtggccagggcctagcaggcttctttgcctccgtggccatgatctgcgctattgccagtggctcggagctatcagaaagtgccttcggctactttatcacagcctgtgctgttatcattttgaccatcatctgttacctgggcctgccccgcctggaattctaccgctactaccagcagctcaagcttgaaggacccggggagcaggagaccaagttggacctcattagcaaaggagaggagccaagagcaggcaaagaggaatctggagtttcagtctccaactctcagcccaccaatgaaagccactctatcaaagccatcctgaaaaatatctcagtcctggctttctctgtctgcttcatcttcactatcaccattgggatgtttccagccgtgactgttgaggtcaagtccagcatcgcaggcagcagcacctgggaacgttacttcattcctgtgtcctgtttcttgactttcaatatctttgactggttgggccggagcctcacagctgtattcatgtggcctgggaaggacagccgctggctgccaagcctggtgctggcccggctggtgtttgtgccactgctgctgctgtgcaacattaagccccgccgctacctgactgtggtcttcgagcacgatgcctggttcatcttcttcatggctgcctttgccttctccaacggctacctcgccagcctctgcatgtgcttcgggcccaagaaagtgaagccagctgaggcagagaccgcaggagccatcatggccttcttcctgtgtctgggtctggcactgggggctgttttctccttcctgttccgggcaattgtgtgacaaaggatggacagaaggactgcctgcctccctccctgtctgcctcctgccccttccttctgccaggggtgatccctgagtgtctggcggttttttcttctaactgactctgctttccacggcgtgtgctgggcccggatctccagggcctggggagggagcctctggacggacagtggggacattgtgggtttggg

SEQ ID NO: 19389 - DNA, 1293 bp, Homo Sapiens
  misc_feature (218)..(293): n is a, c, g, or t
gcacgaggtgacgagctagagttggataagtggaaaactaccatgaaatctagtgtgcaagaagaatgtgtttcaacaatctcaagcagtaaggatgaagatcctctagctgccaccagagagttcattgagatgtggagattgcttggcagagaagtaccagaacacatcactgaagaagagctcaaaacccttatggaatgtgtttctaacacagnnnnnnnnnnnnnnnnnnnnnnnnnnnnnnnnnnnnnnnnnnnnnnnnnnnnnnnnnnnnnnnnnnnnnnnnnnnngcagcagcaagggaagaagcaaaaaatatcaagctgctagaaaccactgaggaagataaacagaaaaactttctatttttacgactttgggataggaatatggacatagcaatgggctggaagggtgcccaggccatgcagtttggacaacctttggtttgacatggcttacgaaaattatatgaaacgaaaagaattgcagaatactgtttcccagcttttagaaagtgaaggatggaacagaagaaatgttgatcctttccatatttatttctgcaatctaaaaatagatggtgctttgcacagagagttagttaaacggtatcaagaaaaatgggacaaattgcttttaacatcaacagaaaagtctcatgtagatttatttccaaaggacagtattatctatttaactgcagattctcccaatgttatgactactttcaggcatgacaaagtttatgtaattgggtcttttgttgataagagtatgcagccaggcacatccctagccaaggcaaaacggctgaacctggcaactgaatgccttccattagataaatatttacaatgggaaattggtaacaaaaatctcaccttagatcaaatgatacgtattttgttatgtctgaaaaacaatggtaattggcaagaggctctgcaattcgttcccaagagaaaacatactggttttctggagatttctcagcattctcaagagtttatcaacagactaaagaaggcaaagacttaattcattttcaaaaggttctctgaatgtgcacagaacacgtggctcaaatgagaacatttgatggcttaaaaagtaaatgcgttagaaatacagttctgttaatgtatttcttcccaaacaattcatttttctcttctaaaggtagtctttcccaactgactgtagggttgtgtcttttcccaattaaatatctgcagaactttgggattatactttgtttactgtagaaagataataaaaagagttgtc

SEQ ID NO: 19390 - DNA, 1098 bp, Homo Sapiens
gcacgaggctcatcctcagaccctgcggcagcagcggctgcaactgcggctcctggccagaccccggcctcagcgcaagctccagcgcagaccccagcgcccgctctgcctggtcctgctcttccagggcccttccccggcggccgcgtggtcaggctgcacccagtcattttggcctccattgtggacagctacgagagacgcaacgagggtgctgcccgagttatcgggaccctgttgggaactgtcgacaaacactcagtggaggtcaccaattgcttttcagtgccgcacaatgagtcagaagatgaagtggctgttgacatggaatttgctaagaatatgtatgaactgcataaaaaagtttctccaaatgagctcatcctgggctggtacgctacgggccatgacatcacagagcactctgtgctgatccatgagtactacagccgagaggcccccaaccccatccacctcactgtggacacaagtctccagaacggccgcatgagcatcaaagcctacgtcagcactttaatgggagtccctgggaggaccatgggagtgatgttcacgcctctgacagtgaaatacgcgtactacgacactgaacgcatcggagttgacctgatcatgaagacctgctttagccccaacagagtgattggactctcaagtgacttgcagcaagtaggaggggcatcagctcgcatccaggatgccctgagtacagtgttgcaatatgcagaggatgtactgtctggaaaggtgtcagctgacaatactgtgggccgcttcctgatgagcctggttaaccaagtaccgaaaatagttcccgatgactttgagaccatgctcaacagcaacatcaatgaccttttgatggtgacctacctggccaacctcacacagtcacagattgcactcaatgaaaaacttgtaaacctgtgaatggaccccaagcagtacacttgctggtctaggtattaaccccaggactcagaagtgaaggagaaatgggttttttgtggtcttgagtcacactgagatagtcagttgtgtgtgactctaataaacggagcctaccttttgtaaatt

SEQ ID NO: 19391 - DNA, 1607 bp, Homo Sapiens
gcacgaggatcacttcagcagcaactgcttttgtcaaaactgggagcagctctggtggtgactgtaaccaagacaagtcaagagatttggggactcagcaggattcaagcgggaaaagaacactgtcaacgtctacactgagaagtgctaaaagactgcgcctggacactgggtccccagaaccagaaaccaggggagtcactgcagaaggaatccacaaaaacctcccagggaacctccctccagctgaagttgcaacaacaaatgaggaaagaagttgttctagtccagccgtcagtgcagtttcacagttgcctttaagcccaaaagaaactgtggagtcccatgataaagccatagctaatgccctgaagaaaattgcagagttttcttttgatctgttacctgtcattcgtagtcatgtgtatgtgggaaatatctccaaaaagcccgtaatgagagatcaagagaaggaagttgtttatgaatttagcacaacaaaaaagcatttagcagagtgcttgcttcactctattctctcagaactaaaaattcagaagatatctatggaccacaattacattcacgccctctgcagggtgtatgtgggtatttgtcggcaactcggagacttggaaagagctcgtttgttttgctacagcctacttaaagaagattttccggagtctgaaaaattaactttgtttattgcaaacatgtggcatgatatatttctctctcaatcggtgattaataaagcaatgcagttagttgccaggcaacgtgctaaaggagaggttctgaactgcttgagagcttttcttaattgggaaaagaatgccccggtagatgttggcttcatggtttctaagctgcttttgaccatacagttatgtccaaaaacagaatttcaacctagtgaaaaatttggtgaagacctaagtgataacacttgggaatacatatttgccattgatctgctctgctgccatcagaaatggatctggacgcatgataacatcataagtaaggagctgtggcctgtgatggataaatggataaaatacagaaaaggacatgcaaacattgcgtatactcctgatattattatagcctcaatactgaggctgattggtcgtttaggccaattgggtttgaaagaaggatttccatctgctgtgaaaaatattagttcggttattggtatgtttatacagcatgctcacgatgaagatataccatggggtatacagttagcagccgtgtatgctctttgtgacttgagtcccagcaatccagcagaaatttccaagatcctggaagcttggcggagagaggcctccaaaagcgttccgtctgcgattgtcagctgcctagaggaagtcagtgccctgagcacagaggagcttggctgacctgggatgccactgaggcttgagaagtgccttgacacattttgaacacaaatagtttgatcagctttcagaatacaaagggaggtttcaaaacaaaaagacataaaatagataaaacagaccagaggctctccttattgtttggcaaggagacaggagaaacaagcagtcgcatagtcgtttttccctaaa

SEQ ID NO: 19392 - DNA, 1506 bp, Homo Sapiens
gcacgaggtagacgcccgcccctgcctcagagaagataccacattgaatgaacaaagactgaactttgtttacagataccttttataaaagatgtctgtggagtagtgttacagttcaaataacaaaggattttgcattatgagatgagtgagagtggagaattggacaaaaattgatttttgatctctgaattgtggtttttagctcaccagttattgtgtagtctcactatttgaaaattcatgctgaaaaactgagtgaatatgatcagatttctccaccaaattctcagcctgataaggaaaatcccgttttgtcaacctaatgaagcattcaaagaagacatatgactcttttcaagatgaacttgaagattatattaaagtacagaaagccagaggcttagagccaaagacttgtttcagaaagatgaaaggggactatttggaaacctgtgggtacaaaggagaggttaattccagacccacgtatagaatgtttgaccagagactcccatctgaaaccatccagacctacccaagatcatgcaatattccacaaacagtggaaaatcggttgcctcagtggttaccagcccatgacagcagattgagactagactctctgagctactgtcagttcacgagggactgtttctcagaaaaaccagtacccctgaactttaatcaacaagaatatatttgtggctcacatggtgtagaacatagagtttacaagcacttctcctcagataacagtaccagtactcatcaagccagtcacaaacagatacatcagaagaggaaaaggcacccagaggaaggcagagaaaaatcagaggaggagcggtctaagcataagagaaaaaaaagctgcgaggaaattgacttagacaaacacaagagcatccaaagaaagaaaacagaggtggaaatagaaaccgtacatgtcagtacagaaaagcttaagaatcgaaaggagaaaaaaagccgagatgtagtctctaagaaagaggaacgtaagcgtacaaaaaagaaaaaggaacaaggccaagaaaggacagaggaggaaatgctttgggaccagtctattcttggattttgaagctttcaaagttggttctcccaaagttaaattgaaaaaataggtgagagcttggttttatgatatccgtgttcataccacttttcttatgtgaataggttctttaacttctaacaaaggcctagtaaacaaagtgtttagcatgcttgctctccaacacagaaattgcttttcctcattttctaaaagcattattacattttttgaacatatagtgtaatttcctttaatgaaagtgactctgcttttattcatcaaattgctttgatggtggaaatattttctgttgggaggttatttattttaaattggaggataatgacctttgcacaatctgtttcttgattgggttttgttatagttttgagttgggtattttatgttcattggtttttctctgt

SEQ ID NO: 19393 - DNA, 1189 bp, Homo Sapiens
gatgatgatggcgatgatggcggcactgatggccccaggcacagtgcaagtgatgactacttcatcccaagccaggcctttctggaggccgagagagctcaatccattgcctatcacctcaaaattgaggagcaaagagaaaaagtacatgaaaatgaaaatataggtaccactgagcctggagagcaccaagaggccaagaaagcagagaactcatcaaatgaggaggaaacgtcaagtgaaggcaacatgagggtgcatgctgtggattcttgcatgagcttccagtgtaaaagaggccacatctgtaaggcagaccaacagggaaaacctcactgtgtctgccaggatccagtgacttgtcctccaacaaaaccccttgatcaagtttgtggcactgacaatcagacctatgctagttcctgtcatctattcgctactaaatgcagactggaggggaccaaaaaggggcatcaactccagctggattattttggagcctgcaaatctattcctacttgtacggactttgaagtgattcagtttcctctacggatgagagactggctcaagaatatcctcatgcagctttatgaagccaactctgaacacgctggttatctaaatgagaagcagagaaataaagtcaagaaaatttacctggatgaaaagaggcttttggctggggaccatcccattgaccttctcttaagggactttaagaaaaactaccacatgtatgtgtatcctgtgcactggcagtttagtgaacttgaccaacaccctatggatagagtcttgacacattctgaacttgctcctctgcgagcatctctggtgcccatggaacactgcataacccgtttctttgaggagtgtgaccccaacaaggataagcacatcaccctgaaggagtggggccactgctttggaattaaagaagaggacatagatgaaaatctcttgttttgaacgaagattttaaagaactcaactttccagcatcctcctctgttctaaccacttcagaaatatatgcagctgtgatacttgtagatttatatttagcaaaatgttagcatgtatgacaagacaatgagagtaattgctttgacaacaacctatgcaccaggtatttaacattaactttggaaacaaaaatgtacaattaaagtaaagtcaacatatg

SEQ ID NO: 19394 - DNA, 1384 bp, Homo Sapiens
  misc_feature (877)..(898): n is a, c, g, or t
gcacgaggagacatttaaagagggtaccataccctttgttttgaaaatgctgttcagaatcatagtgtaatctttgggacctatgccatgttcatttcactccttcccatattttttgtgtttcttttggtaaaactataatggttttcattttttacttaatatcacacagttaaactgtccatatttgagctttattttagcttatcagtgataaaaaacaggtagtaactgccattgtttgtttgttttcctaataaggcctgaaaacagccattccttgttaagaaagtgtacaatgtaacatatttgctagagttacatggattatatatttcttaaagggaaaaatttgagagtatcatggactaccaccagcattattattacagtagttactcagatttggttaaggaagcccaagcaatgtatagtgaaaggattattatctctctgctaagattcagatattgtttcagaaatctcagctccagtaattccacaacatctaaaaacaaatgtttgtgatcatgtgtaagcatgaaattgttccaagtaagtgaggatattttagttatgtgaaagacagtttcatggaaggtatttgttttataccagtggctgggatggtggaattggggttatttctacaattattcttagacgattactaaactgttaagaaatgccccatatcatttttgtatctaggaaagaaaaaaatcagtttcatactgttgtcatctgtcagaaatgctcattttattttgaattaaatgtggcttttgaagtacctagttaccttgaattcctggtgaccacatgtttttatctggaaaacctggagaaagttatctgtcccatctcccctgcttgnnnnnnnnnnnnnnnnnnnnnnggttggagctgctgtttaaatgatgcttttactatgcaggaaaaagtttttgttaaggatatatttgaaaattggcttttccatattgtccttcattctttgaccgtggcaaagtgtacagtaaattttcatgatcattgcatatttcttgtcattgaaatgtatcttttatgtttttaaatgcattcattttacacttgtgagtttatcattgactttaagaggtagaaatgaaaaatgaaaattaaagctaaagcctttttatctattaatgcagatatattaaaataagaatattttgggtttgtgtttattttttaatgaatttatgtttacttgatatggaaaattacgctttataggtggaaaagtagcaaataaagattaagtaaaagtaagtgaaaatgatggggaatatagtattggaattttatagctagtttaaacaataagtatcatctaaatttgggtgtttattttgcagat

SEQ ID NO: 19395 - DNA, 1085 bp, Homo Sapiens
gcacgagggaccaaaccttaccactgtgactgggacggctgtggatggaaattcgcccgctcagatgaactgaccaggcactaccgtaaacacacggggcaccgcccgttccagtgccaaaaatgcgaccgagcattttccaggtcggaccacctcgccttacacatgaagaggcatttttaaatcccagacagtggatatgacccacactgccagaagagaattcagtattttttacttttcacactgtcttcccgatgagggaaggagcccagccagaaagcactacaatcatggtcaagttcccaactgagtcatcttgtgagtggataatcaggaaaaatgaggaatccaaaagacaaaaatcaaagaacagatggggtctgtgactggatcttctatcattccaattctaaatccgacttgaatattcctggacttacaaaatgccaagggggtgactggaagttgtggatatcagggtataaattatatccgtgagttgggggagggaagaccagaattcccttgaattgtgtattgatgcaatataagcataaaagatcaccttgtattctctttaccttctaaaagccattattatgatgttagaagaagaggaagaaattcaggtacagaaaacatgtttaaatagcctaaatgatggtgcttggtgagtcttggttctaaaggtaccaaacaaggaagccaaagttttcaaactgctgcatactttgacaaggaaaatctatatttgtcttccgatcaacatttatgacctaagtcaggtaatatacctggtttacttctttagcatttttatgcagacagtctgttatgcactgtggtttcagatgtgcaataatttgtacaatggtttattcccaagtatgccttaagcagaacaaatgtgtttttctatatagttccttgccttaataaatatgtaatataaatttaagcaaacgtctattttgtatatttgtaaactacaaagtaaaatgaacattttgtggagtttgtattttgcatactcaaggtgagaattaagttttaaataaacctataatattttatcctcgtgc

SEQ ID NO: 19396 - DNA, 1543 bp, Homo Sapiens
gcacgaggcttgatagatcctgtatatggacatggcagccaaagtttaattaatctcctgctgacgggacatgctgtttctaatgtatgggatggtgatagagagtgctcaggaatgaaacttcttggtatacatgaacaagcagcagtaggatttttaacactaatggaagctttaagatactgtaaggttggttcttacttgaaatctccaaaattccctatttggattgttggcagtgagactcacctcaccgtattttttgccaaggatatggctttagttgcccctgaagctccttcagaacaagccagaagagtttttcaaacctacgacccagaagataatggattcatacccgattcacttctggaagatgtgatgaaagcattggaccttgtttcagatcctgaatatataaatctcatgaagaataaattagatccagaaggattaggaatcatattattgggcccatttcttcaagaattttttcctgatcagggctccagtggtccagaatcttttactgtctaccactacaatggattgaagcagtcaaattataatgaaaaggtcatgtacgtagaagggactgcagttgtgatgggttttgaagatcccatgctacagacagatgacactcctattaaacgctgtctgcaaaccaaatggccatacattgagttactctggaccacagatcgctctccttcactaaattaatttgtctaagtatttataaggaagatcttaataacagatgttgaaagaggagtcaagactggcaattggctggattaagctaaacactggtatcactgattaactgtaaataacaattaaaaacacattttcagtgtttatgatatgtttaaattatttgtcctaaagctttatgttaaagattatcctattttaccccttcgtgtgaaatttactagcaaaattaagctttcatcaaagttcatcacttttgcattcagatacttggtcatttacttaccaaattacaaacgcaatactacagcatttgtatattaagtatcacagttactattgataaactacttttgggttttatttcattgaggcactttttttattgtttgaatgattccggcttgtaatatatcagcctctacaatgaaatgcagaagagttcatttttctaagatctgtttttcattagaaatattgacaaataacacattgtcaacctggatcctttgacaatttacttaactctggcatgttcacaaaaagtagaaactctaagagaccattaccatttattcacagatgtataggggatgtattctaaaaactgacagaaaagagaatctgatagtcaacactgttaacttttactgtgtaattgccaaatacacttttccaaatttgtcccaacagccctgtaagccagctttcttctatatttataaacacgataaatgcatgagaagatctgttattacattagtatattacgttatttattatgatcctagttgatggcctaaataaacacctttcctcgtgc

SEQ ID NO: 19397 - DNA, 979 bp, Homo Sapiens
gcacgagggtccccccggaattgacaggcagccgccagtccttccagaaggctatggggaacccctgcgagttcttcgtggacatcatgtgactcgtggcgcatgccccagccctgcctgaggtggggagctggcggtcctgccgcatgcagagctcgcgtgggcttgccttcgtgggggccaggacgggaggcagggtggggggcaggtggaccaccaccatctgccctggcagcctggctgctccagctcctgacagcacctgtgtctgagcagccgtgttgggggcgctccctctctgcccctcagcgagagcctcggacctcccaaccccttgtgtctggtggggatccctcctgggatgaggaagaccccctcgggctctcggctgacccccacctcctgcacagctgtgcccaggcccccagggtggtccacgcggggcaaccccctgcggtgcacaggccccctgtctggagtagggatctaatttatttatttattgcctggccggtgactcgggggaggaggcgaccctgtcatctgtcccacctgctgctgccccttggagcagcctgcaccttctctcctcccatccggcaacagtctgaaagtacgtggaggacgggaccggaagacgagagagggctggacatcctgcccaccgtgtcccagccagggcagggagggaccatggcccgcagggtcaaggggccccgatgtgcacagctgccacagggagggaggtcttggggagatgggcagtcaggtggcccgtccttggtgagtgcacacactgcgcgcacacatcgcggccttcctggcttctctggcccccacgtgtctgtgctgtagatactgtatcaaagtcccagcgtttagatggttaacatagagctgcttctgtgtaaatgctgcttattttaaacactaaaaagcgtttaattttatgggaaaaaaaacctgcagcccgggggat

SEQ ID NO: 19398 - DNA, 1430 bp, Homo Sapiens
cccgggctgcaggaattcggcacgaggccatcatccttctgacagatggaaagtccaatatgggtggctctcccaagacagctgttgaccatatcagagagatcctgaacatcaaccagaagaggaatgactatctggacatctatgccatcggggtgggcaagctggatgtggactggagagaactgaatgagctagggtccaagaaggatggtgagaggcatgccttcattctgcaggacacaaaggctctgcaccaggtctttgaacatatgctggatgtctccaagctcacagacaccatctgcggggtggggaacatgtcagcaaacgcctctgaccaggagaggacaccctggcatgtcactattaagcccaagagccaagagacctgccggggggccctcatctccgaccaatgggtcctgacagcagctcattgcttccgcgatggcaacgaccactccctgtggagggtcaatgtgggagaccccaaatcccagtggggcaaagaattccttattgagaaggcggtgatctccccagggtttgatgtctttgccaaaaagaaccagggaatcctggagttctatggtgatgacatagctctgctgaagctggcccagaaagtaaagatgtccacccatgccaggcccatctgccttccctgcacgatggaggccaatctggctctgcggagacctcaaggcagcacctgtagggaccatgagaatgaactgctgaacaaacagagtgttcctgctcattttgtcgccttgaatgggagcaaactgaacattaaccttaagatgggagtggagtggacaagctgtgccgaggttgtctcccaagaaaaaaccatgttccccaacttgacagatgtcagggaggtggtgacagaccagttcctatgcagtgggacccaggaggatgagagtccctgcaagggtgggtctggtgagctggggtctttacaacccctgccttggctctgctgacaaaaactcccgcaaaagggcccctcgtagcaaggtcccgccgccacgagactttcacatcaatctcttccgcatgcagccctggctgaggcagcacctgggggatgtcctgaattttttacccctctagccatggccactgagccctctgctgccctgccagaatctgccgcccctccatcttctacctctgaatggccacccttagaccctgtgatccatcctctctcctagctgagtaaatccgggtctctaggatgccagaggcagcgcacacaagctgggaaatcctcagggctcctaccagcaggactgcctcgctgccccacctcccgctccttggcctgtccccagattccttccctggttgacttgactcatgcttgtttcactttcacatggaatttcccagttatgaaattaataaaaatc

SEQ ID NO: 19399 - DNA, 909 bp, Homo Sapiens
ggccttcaaaagatcctttattcccaaagctgaggtcacaaatacaaaacttgctccttcatggcctctgtcccctgccccccaccaccagacaattccccagccatggtaagatgccttctgaacctgcaatccctttcgcaaaagaccccagtctttgctcctccaggctcccaaggccggctggatcttcattcacagctctatgtgttctgtctggggtggcttctccactgccttcttggcaaagaggttggtccagaaagctacttctttgtccttcagcttctgggccgcctgggtgttggcaccaatctgcagatacccttccttctggttgtactctggccagtggggcagcccttccccattggggtttccattgcgagcaaagttggcccagaatttcatcaccatcttgctaagtctgatctcctcttctgaggcaccctcttttaaaaatggggccccaaagacggagaagagctcatccccgtggtctcctatcaccgtcttgggtttcatgtctgatgagaagcttggacggtactgaaactcatacatgtaggtgggtgctccagcatctctgtggttccgggccacaatcacagatgggacaccaaacatcacatctgctatcaagtccaggaacaggtctttctttttgacagtgtcgtctgttcctcctaagtatttctcagtggcttctggaatcagttccttagcaatgcaaacaagggggataggacttccacaggagtgacatggctgtcttctggtccagttgcccttcggagagtggatagctcatcaactgcattggaatcaactagcaaactcctgcttgttaattccgaccatgtagggggacatgtggaaattcctttcacttgaactcttcaggtgttt

SEQ ID NO: 19400 - DNA, 1618 bp, Homo Sapiens
  misc_feature (860)..(912): n is a, c, g, or t
gcacgaggcttaaatgtaatctttaatgaaaagatataagcattataaaagaaggggtcataatgagtgatgtggagatggctacatatactttcttaagaatgccacatcttttatcatacagatttcaaatgctttttggctacataagtactttaaaagaattgagctacatcaattaaataacaaatataattagttcttcatcatcacaataagataacaatgattaaaatgttttacctcatatggtgaaaatactaatcttttcattcacaaatttgtaggcaaatgtgtaattaccaaacaacgtatagtacagaaacaagaaaaatattgtaagtctagttatgatagttttttctaatagacaaaattgtcaacaatttattataaaaaacctatacaattaatacttgatcaaaagtctttaaaaatatattcataatgaaatgtatagaaagagacatttcaaagtcatagcagttactactattacaatatttaatcatttttacaataggtctgctggtctatttcaattaaattcattctcagaaccatcacatatcttgctgaatttcatttaaagcaaaagcaagttgcttaatttttgcttccattgtttttttgttcttgcatgtttcttccaaaagttcacgcatttctttttcaatttgatggacctttaaatttgcagaatcaatacacttctgcttttcattggccagctgtgctatttcagcctgatgagcttcaacattgcatcaacttgtcttttaagggcatcatccatactatgaagtttttccattgcattcttttgtagttcaatacttttgtctctttccgctttaagnnnnnnnnnnnnnnnnnnnnnnnnnnnnnnnnnnnnnnnnnnnnnnnnnnnnngatgacatagaagttctcctttatcatgccacttccgattcagtgtactgtaagcttttctgatttcttcaagttctacttcctttcctttcaactgttgttttagtttttcttttctttcattgtgcctttccaacttctcaagtacctcatccagttgtgaagatttttcatcaagttgttcttgagtgcatttttctatttctgtgatcttttcttgtaatcttttgatgtgttcatctttttcttgtaaacaatcttttaattttctaatagtttcagtttggtcgtctatgattttgcactttattcttaatgcatcactatcactttcatttgtctttcgcagacattcattctctctagataaactctcaatttgagcctccaattttccacgattttgggctagagaagatccttgttgtgccagctcatgtccccatacttttctttctgtccttaaaccaaatattagtgattccttggctgctagctcagaaataagctggactttttcgtgcttgagaagttctatttgaatactcttctgcttgtcatcttcaattaaaatttcaagggtgttgatttgattctgtaaatttgctgctgtttcttgtttcaatttagaaacttctgccagttttgttttttgttcctttaccatacaggtcagatctttaattaaagaggaagactcattttc

SEQ ID NO: 19401 - DNA, 1209 bp, Homo Sapiens
catctccaaaaaagtttattagcatgattaaaaacattttcttgaataataacagaaagaatttctaaacatgaaagaatatcagtggctataccttaaaaccagtatttggaattgaatggacagctttattgccagtcttcaaaaaacaatccattgattggttccatgaagtcgtgactattgctttgtctgggaatgagtccctactgcaattaagtataaaaaatatcttccatcataattggagtgtgacctgcattggaaagtggctctgagtaaagagttgataaaaatccacaaagagttgggtttttgtcttttaaaaacattcctttacacactacaaagaaataattagtattttggctttttaaattcctacatgatatttaaaatggcggtccccaagggtcctcccttcacgtaattgtgaacacagaccctcttccaagggcacatcccggagggtgcggactctgaagacttcgacctccacgtgtttatactggtttgagaacaaagacagcgtcatccagaacgtagtagtcattatacatgtcgccttcacacaggtatggtagtctggtgaaagcttcgataacaaaaccagcttttctgaaaacttcaggcagactattcacttgttcttcccagttctgtcctttgatttccaaaatttctgatggtttctcccacttgccacctacgttttccacatagggatgaaaggggaggacaagggcaaggatgaccctgcctctagttggctccaagacacttctgatatcttttaacaaagtcaggggctgatcacagcggtccagcaagttcaggcagctgatgacatcatactggaaccccgtattctgccattcatttataccaaggactctgtatttctttttctgaagctgccatatcatagtttcagaaagctcagtggcatagatttcttcaaaatgagggctcatgatttttgtgacttctccatctccagcacctaaatcaagaagtctgtgggttttccagtctggattaattttaagcagtctctgaaactgatctggtgaaaacacaaacattgagcctcttcctagcaacccattgatagatgttctagacataaacaggctaaaaacagatgacacaaaagaatgatataattggataaatagccagcccgatttctcaaggggtgcctcgtgc

SEQ ID NO: 19402 - DNA, 1568 bp, Homo Sapiens
  misc_feature (695)..(703): n is a, c, g, or t
gcacgaggctggttttcctttttatttaatcaaagactggtgaataaacataaatacagcacaattacttcagatcattcttcatattgtatacacacaaacccatgaacataatctgaaagaaacctgtagacagcaatgaaatgcatacagctttttcttccctcgctcaaaaaaaggtttaaacacacaaacttacaatctcatcagcacacactctcttgtgacaaatgattcagacataaatagtgggtgcaaagaaactatatgctaacatatgaataacctttgttaatgaaaaaacagaagcagccataatgattaagatacattcagttactgataactagttgtgccctaaagggcattatcaaaagagaaatcgtgctgcagagaaaagcgatatatacatacacaatgagaaaataaactgcaagattaatgcatgcatgtttaatactggaaaaatcacagccctccaaaatttctgcacgtttgttataaaagccctctgcactcaactaaaattaaaatgatcttaaaaggataatacttgtaaagtttaagtctcctcagccacagaaattgcaatggaaataaatgttcagagtcattttcaaaacaaaaccaaaacaaaaatctattcttccgatgacatgcaagatacactgctctacattcccaatgactagggnnnnnnnnncctcaagtcaatttttagtttgcagatgctcaagaattttgtattccagcaggagttcaaatcttttggatcttttcaccaacaactactggattttcttttctgattttctcagcagcatcggctttgtaattgtaagagcaattgtgtacatctgagtaacggtgtacaccacagtaaacatttccacaccggcattcaaacccagtaagtcccactttcttcctgcacatgaaacagcgattctttttttgtttcggtttttcaagagacttgctttgctcttcagatggctgctgtgctgtgtctgatactgaagcctgcacatcttctgtttcaggtactgctttgtccacagatgtactgtccaattgagaagatgctacagattctgataaaagtgactgatttgatacagggctgggctgcatagatgaagatgtagagtctaatgctgactgggcttctggcacactgccatctgtgcattgaactggtaaagattcagacagactactgacagaggttgcaggtgggcttattctaccattactactattctgtctttgaagatgttctttatagcatactgaacacatgccatttgtacgagggtttccataaaatccacagccagtggaacaaagcataggcacttggctgtgattagtttcttgagccatgttcctcagttgcacacacagttgaggttgatgagcaaacagctgtcctgtatcttgagacagacattagctttctgccttccctattctcataagcagctacttaaaagttttgaattttatgcaagaaaacattttaaagccttctgtgttttactgcagcagacttcagatcctcgtgc

SEQ ID NO: 19403 - DNA, 748 bp, Homo Sapiens
gcacgagggtcccatccgtggcaagggacggagaggtcccaacaggagtcaggaagaggtttgattataaccaagaaaactcactatgctaggaatagactgtgtgcaccagtcccagacacttggcagaagtgtagcagcgttacacatgtgtgcgaagcagatcacaggttccacgccatctgcatggcctgcaggagcttctgctgctgaccccatgctgagtggccagtggggagtggcgcccggcaggctcttctggggtcgtctgtcctatccgtggattgtatatactcttctctgttaaggagtttttcccaagaagaaaagtatttaaaagaaataccagtgagtgccttaaagttggagaagtaactgcccatgcccagaaataaggatgccagtgcccagaagcagtgagattagtctgtgtccacaagcagaggccccctcgatgggagggagtggcaggcaggagaaggtggcgctgccaggtgcccgggtctattggaggcgccccatctcagacttcctaacacagcctgtgtggaaggcagaacaaagaatgcatgcccagtcagaaatctgttctattctgctccaggaaaatcggaaacctgtgagtcagagtcagagaaacttacccaagcaacgtaattcctgttttcatgggtcctgtagatgtttgagtcaggaaggtaaggcggggagtgactgaataaactctgccttttaaattgagcatctg

SEQ ID NO: 19404 - DNA, 895 bp, Homo Sapiens
gcacgaggggaagaccaggcagcccagctgaaggcagtaagctcggctcacagtcgcaggagagttctggggtacacgaggcaaaggggcttgagaaggcccggaggcgaagccgaagagaagcaactgtgccccggagaagagaagctcgcccattccagactgggaaccagctttcagtgaagatggcagggccagaactgttgctcgactccaacatccgcctctgggtggtcctacccatcgttatcatcactttcttcgtaggcatgatccgccactacgtgtccatcctgctgcagagcgacaagaagctcacccaggaacaagtatctgacagtcaagtcctaattcgaagcagagtcctcagggaaaatggaaaatacattcccaaacagtctttcttgacacgaaaatattatttcaacaacccagaggatggatttttcaaaaaaactaaacggaaggtagtgccaccttctcctatgactgatcctactatgttgacagacatgatgaaagggaatgtaacaaatgtcctccctatgattcttattggtggatggatcaacatgacattctcaggctttgtcacaaccaaggtcccatttccactgaccctccgttttaagcctatgttacagcaaggaatcgagctactcacattagatgcatcctgggtgagttctgcatcctggtacttcctcaatgtatttgggcttcggagcatttactctctgattctgggccaagataatgccgctgaccaatcacgaatgatgcaggagcagatgacgggagcagccatggccatgcccgcagacacaacaaagctttcaagacagagtgggaagctttggagctgacggatcaccagtgggcactagatgatgtc

SEQ ID NO: 19405 - DNA, 643 bp, Homo Sapiens
ccacgcgtccggaaaaactgtctgggagcttgacaaaggcatgcaggagagaacaggagcagccacagccaggagggagagccttccccaagcaaacaatccagagcagctgtgcaaacaacggtgcataaatgaggcctcctggaccatgaagcgagtcctgagctgcgtcccggagcccacggtggtcatggctgccagagcgctctgcatgctggggctggtcctggccttgctgtcctccagctctgctgaggagtacgtgggcctgtctgcaaaccagtgtgccgtgccagccaaggacagggtggactgcggctacccccatgtcacccccaaggagtgcaacaaccggggctgctgctttgactccaggatccctggagtgccttggtgtttcaagcccctgcaggaagcagaatgcaccttctgaggcacctccagctgcccccggccgggggatgcgaggctcggagcacccttgcccggctgtgattgctgccaggcactgttcatctcagcttttctgtccctttgctcccggcaagcgcttctgctgaaagttcatatctggagcctgatgtcttaacgaataaaggtcccatgctccacccgaggacagttcttcgtgcctgaaaaaaaa

SEQ ID NO: 19406 - DNA, 1033 bp, Homo Sapiens
  misc_feature (726)..(817): n is a, c, g, or t
  misc_feature (859)..(870): n is a, c, g, or t
cccccgggctgcaggaattcggcacgaggggaaccgagctacgagtagccgccgagaggccgcggagccagcgacgaccgacccagccgagccgccgccgccgccgcgcccccatggcggccgccaaggacactcatgaggaccatgatacttccactgagaatacagacgagtccaaccatgaccctcagtttgagccaatagtttctcttcctgagcaagaaattaaaacactggaagaagatgaagaggaactttttaaaatgcgggcaaaactgttccgatttgcctctgagaacgatctcccagaatggaaggagcgaggcactggtgacgtcaagctcctgaagcacaaggagaaaggggccatccgcctcctcatgcggagggacaagaccctgaagatctgtgccaaccactacatcacgccgatgatggagctgaagcccaacgcaggtagcgaccgtgcctgggtctggaacacccacgctgacttcgccgacgagtgccccaagccagagctgctggccatccgcttcctgaatgctgagaatgcacagaaattcaaaacaaagtttgaagaatgcaggaaagagatcgaagagagagaaaagaaaggatcaggcaaaaatgatcatgccgaaaaagtggcggaaaagctagaagctctctcggtgaaggaggagaccaaggaggatgctgaggagaagcaataaatcgtcttannnnnnnnnnnnnnnnnnnnnnnnnnnnnnnnnnnnnnnnnnnnnnnnnnnnnnnnnnnnnnnnnnnnnnnnnnnnnnnnnnnnnnnnnnnnaagggacgttatataaagaactgaactcaacattcaggttgnnnnnnnnnnnngtttctaagtttttgccctattgaagatgacttcagaaaatccattccccagtcatgaaaatgtactgtgctaactttcttttccatagtggaaacacttatttatagtcatcaaaaatagtgaataaaaaacacatttggaacctggaaaaaaacctcgtgc

SEQ ID NO: 19407 - DNA, 977 bp, Homo Sapiens
  misc_feature (804)..(814): n is a, c, g, or t
gcaacgaggagttatttgagtaagcctctagttgacttttctcttagcctgaatgtggacgttgaaacatatcacttcagggcttggaaaagtcagtcaacttgacgtacatttttagtgacattttaaaagcagtcagattctataaatggcaagtaagcctgaagtgaggatactgcaattttcggagaaaagaacagcagctctttaagtgtttgcattttctatttggggggcagggaactgtcattcattttgcacaattcttgaactgatgtcagcacccgagtggctcctgaatttaagtctgggacgacatcttttatttttacatgaatctttaaacaattctgtgagcaaagtttgtagctgctggattattgtctgtctttatagcaagttccagtaaaccacaagtatggcaaagcttatccaattttatgcttggagcagtcagtacataccagtttctgatgtttcaggcaggagtggggtaaataagtgtgaccacttaaagctgctcgttagcatggaagacttctccattctatctttgtaaaacagacaagatatgcacttgacatagtagcaaattggttctgaattatgcaactgtttgctatttagtaaactagcaaatgatgcatgtattttgtttttcatgtactgggcaatatgagtaaaatctgtccctttttccccctttgaatgaggtcttccatgtttgagggaaagtcttgcactattgcatatattttggggacacagattttcatagtttccatttttggggggcttaaggannnnnnnnnnnctgtttgaaacagttttatactttctgatatagtacttgaaattcttaccagaaaattactttggagttttgaagcctttattaatactacttttaaagaagcagttgttttattgtcaatgttttttttcccccacgcatattttcttgtatttctgtttcc

SEQ ID NO: 19408 - DNA, 697 bp, Homo Sapiens
gcacgaggccttggctcaaacaatattttccctataacaaaggcaataggacacaaaattcacatcctgctgggccttttttcatcaagtcagggtgatataaaaacattggaagtcttttcaccaaaccctgactttattgaatgctagtagaagatgtagaattagagacatctgatttgtttatcaccttagcagaaaaaccacagtccaaaagacaagcaaattaagaatggagcttaaccatgcctccattgggaagtctagactttgagccaggtacagtaagaaaaattagcctctgattcattaagtttgccacatgacttattttgatattttggatacattaactcacttaggagaattcagaaaagaatgggtgattaaagttcattacagctgaataaatgtgtctaaaacagactcttgtattctgaaagtacagtctacaactgataaaaccttatgattcttttctcccccattatgcccctatatatatcaagatttgggtactttattttagtagaaaatatatatcttttacatatgtatgtatttataaatgcatagatatatgtataaaaatttgtaagcgttagcggcattaattcaccaatgcatttggacaacttgatgtaactgactttattttatgtgactataataaaaagcataattttctcattctgtc

SEQ ID NO: 19409 - DNA, 877 bp, Homo Sapiens
gcacgaggcagcagctgagaacaaatgagtcattaatacaaagaaaggacataatgacacgaattgctgatttgacattgcagaattcagctatcaaggcacatatgaataatattattgagcccagaggagagcaaggggatggactccgggagttgaacaaacaagaaagtgcaagtgacatgacttctacttttccagtagcacagtctctaacaccaggtagtatggaggaacggattgcagaattgaatcgacaaagtatggaggctcgtggaaaactactgcagttgatagagcagcagaaacttgttggtttgaatctttctccaccaatgtcacctgttcagttacctctcagagcatggactgaaggagcaaagaggacaattgaggtatctattccaggagcagaagccccagaaagctcaaaatgtagtactgtctctcccgtcagcgggataaatacaagaagatcttccggggctactggtaattcttgttctccactaaatgccacctcaggaagtgggagattcacacctcttaatccaagagcaaagattgagaaacagaatgaagaaggctggtttgctctttctacccatgtatcataagtgaagtcaagtctcactgagtttgttcttaataatttattacttccctttccctgctctgacttttaagtttttatatccttctttcagataaaacctacaaagatcctgtgaattagtactaatgaaacagagaaataaagcaattattttttgactttctcaaataagttttcaacaaccaactgacctacagctccctgtgaatgaaactttgactgtagagaagttaaagttttgtattttaatactttcttaag

SEQ ID NO: 19410 - DNA, 908 bp, Homo Sapiens
accaataatagaaaagaatatgacattttattttcacttatggacatacagtacatgaatttagaaataaaatcgtcgcaggattctgaaatactgataccttaagatctaacacactgatattagtccattccctacaaagcagccacattagcagttcagatttggtctttgttgtagctgttgacattaagttctttaagtgaaatgcccagcagcatttaaataatattttacagcagacatgaactaagtttcaatattccatctttggaacaaattatgcttatttacatgttaacaggtggctatatttacttaccctattgtgagtttaatgactgattttaaactacagagggttttccagctattatttcctttagtttctaaaagtaacgacttatattaatgttttataaaagatagtgatgaaaaaaaggtaatgctgaaataaaggcgcttttagaaatatttaaggacaacataaggtattaatattggaaaaaaactgtacatattttcaagcacaacactgaaatattgcagcagtgtttaactgaattgttttaaaatagtggtaattatactaccttacataccgttctaatatttaaatctcttaattacaatttgaatatacaatctgacttacaattagaactatgcacagtttccgaagcatatttttcaggtttgtttttgcacaaaaattaacgtttaagttggtccttgatttggagtactataactacctggaagcactaagttttagacacattcattgatagccaacaaaatccttgacagagtgaaaaacatcaagagtaccatgcgtgaaaaagcagctgttaccctccaagtgcaatatgaaatctagaacaagaccctctcagaggccctcgtgc

SEQ ID NO: 19411 - DNA, 1280 bp, Homo Sapiens
gcacgagggccaggcgtccctctgcctgcccactcagtggcaacacccgggagctgttttgtcctttgtggagcctcagcagttccctctttcagaactcactgccaagagccctgaacaggagccaccatgcagtgcttcagcttcattaagaccatgatgatcctcttcaatttgctcatctttctgtgtggtgcagccctgttggcagtgggcatctgggtgtcaatcgatggggcatcctttctgaagatcttcgggccactgtcgtccagtgccatgcagtttgtcaacgtgggctacttcctcatcgcagccggcgttgtggtctttgctcttggtttcctgggctgctatggtgctaagactgagagcaagtgtgccctcgtgacgttcttcttcatcctcctcctcatcttcattgctgaggttgcagctgctgtggtcgccttggtgtacaccacaatggctgagcacttcctgacgttgctggtagtgcctgccatcaagaaagattatggttcccaggaagacttcactcaagtgtggaacaccaccatgaaagggctcaagtgctgtggcttcaccaactatacggattttgaggactcaccctacttcaaagagaacagtgcctttcccccattctgttgcaatgacaacgtcaccaacacagccaatgaaacctgcaccaagcaaaaggctcacgaccaaaaagtagagggttgcttcaatcagcttttgtatgacatccgaactaatgcagtcaccgtgggtggtgtggcagctggaattgggggcctcgagctggctgccatgattgtgtccatgtatctgtactgcaatctacaataagtccacttctgcctctgccactactgctgccacatgggaactgtgaagaggcaccctggcaagcagcagtgattgggggaggggacaggatctaacaatgtcacttgggccagaatggacctgccctttctgctccagacttggggctagatagggaccactccttttaggcgatgcctgactttccttccattggtgggtggatgggtggggggcattccagagcctctaaggtagccagttctgttgcccattcccccagtctattaaacccttgatatgccccctaggcctagtggtgatcccagtgctctactgggggatgagagaaaggcattttatagcctgggcataagtgaaatcagcagagcctctgggtggatgtgtagaaggcacttcaaaatgcataaacctgttacaatgtt

SEQ ID NO: 19412 - DNA, 742 bp, Homo Sapiens
gcacgaggccttcgccgccaagctctggagcttcttcatttaccttttgcggaggcagatccgcacggtaattcagtaccaaactgttcgatatgatatcctccccttatctcctgtgtcccggaatcggctagcccaggtgaagaggaagatcctggtgctggatctggatgagacacttattcactcccaccatgatggggtcctgaggcccacagtccggcctggtacgcctcctgacttcatcctcaaggtggtaatagacaaacatcctgtccggttttttgtacataagaggccccatgtggatttcttcctggaagtggtgagccagtggtacgagctggtggtgtttacagcaagcatggagatctatggctctgctgtggcagataaactggacaatagcagaagcattcttaagaggagatattacagacagcactgcactttggagttgggcagctacatcaaggacctctctgtggtccacagtgacctctccagcattgtgatcctggataactccccaggggcttacaggagccatccagacaatgccatccccatcaaatcctggttcagtgaccccagcgacacagcccttctcaacctgctcccaatgctggatgccctcaggttcaccgctgatgttcgttccgtgctgagccgaaaccttcaccaacatcggctctggtgacagctgctccccctccacctgagttggggtgggggggaaagg

SEQ ID NO: 19413 - DNA, 953 bp, Homo Sapiens
gcacgaggcacagcccggcgggagtccttgtgccgcttcaaggactccatgttggcatctatgttcagtggtcgctttcctctaaaaacagatgagtcaggggcttgtgttattgaccgtgatggacgtctatttaaataccttttggattaccttcatggagaagttcagattcccacagatgagcaaacccgcatcgccctacaggaagaggctgattactttggcatcccttatccatacagcctgtctgaccatttggccaatgaaatggagacatattctttaaggtcaaatatagaacttaaaaaggctttaacagacttctgtgattcatatggcttagtctgcaataaaccaacagtttgggttctccactatcttaacacatctggtgcaagctgtgagagtagaattattggtgtatatgccacaaaaactgatggaacagacgctattgaaaagcagctgggaggaagaattcacagcaaaggcatttttaaaagagaggcgggaaataatgttcagtacatttggagctattattcagtagcagagttgaagaaaatgatggatgcctttgatgcttgggaaggaaaaggtgttagctactggcgggtgcctcatgagctgatagagtgttggactctagaagaacggcctttacttggaagcctgcgtcacatggctcccattcgaaagaggcgactgataacgttcaatgaagcggacgaaagtgtgaactataagactggtcctaagccagttagatttttgggcccttccacagtacccaaattaaagtcaagaactcggcctcagtcacggtgtctccagccagtgccatccagacgtcggctggggcgacagcaaaccggtttcaaagtggtagccgcaaaaggcagctcagcgctctgcaccttccagagccacggccctggtgggcacggggg

SEQ ID NO: 19414 - DNA, 597 bp, Homo Sapiens
ccaagcaaacttcaaactcattcatgagatatttattaaaataacacatttagggaaaaaaatcaatacaatgtatacatcattactgaaaactgtataccatcatacaaaaaaggattttattttgggaaattgttttctaatttatggcaagttttactttcagaaataaaaccacaacaacacaatctaattcaatcttaaaggctggcatgctgagcaaggaatgttcttattctttgtaggagctccttctttacactgtcaggtaccagggctctgccttttggagtgatttcagccaccaagtcatcaacagtaacgtgttctagtcctttttctttaattacctctttacagtgtgccttcaactgatccttccagccacattcaattaatttagctctcagcaactctttgaggcgttctctttctccagtttctatcaacttttggttaatcgctgctctcatctgcgcatctttgttcatcttgctaaccaccatcaccgcgggcgagggccgtcccttcccagcgacgaaatgacccttgcgctgaggaccgttaccctcgtgccgaattcctgcagcccggggg

SEQ ID NO: 19415 - DNA, 663 bp, Homo Sapiens
gcacgaggtcgtgtcgccatggggcagatcgagtgggccatgtgggccaacgagcaggcgctggcgtccggcctgatcctcatcaccgggggcatcgtggccacagctgggcgcttcacccagtggtactttggtgcctactccattgtggcgggcgtgtttgtgtgcctgctggagtacccccgggggaagaggaagaagggctccaccatggagcgctggggacagaagtacatgaccgccgtggtgaagctgttcgggccctttaccaggaattactatgttcgggccgtcctgcatctcctgctctcggtgcccgccggcttcctgctggccaccatccttgggaccgcctgcctggccattgcgagcggcatctacctactggcggctgtgcgtggcgagcagtggacgcccatcgagcccaagccccgggagcggccgcagatcggaggcaccatcaagcagccgcccagcaaccccccgccgcggcccccggccgaggcccgcaagaagcccagcgaggaggaggctgcggtggcggcggggggacccccgggaggtccccaggtcaaccccatcccggtgaccgacgaggtcgtgtgacctcgccccggacctgccctcccgccaggtgcacccacctgcaataaacgcagcgaa

SEQ ID NO: 19416 - DNA, 717 bp, Homo Sapiens
ttgaacagggataattttaatataaaaactgttaactgataatggtattaacttttaagagggatgaaagagagctatgatgtcctaggactgagagtaccccaggaaagaatacccttgaaagggtctccccttccccatggtgaagtcaggcctaatggagagagtggctacagcctactcagtgattgggaaattccctgtcttgccctgggccagagctggtgtaccgctggtggatcaggtcttacaagcaaagaacctcacactcccaactggtaagccagaagcctcttgctagggtgtgagcaaaacttggacaggaactctcagtagatgtttgtgtttgtcaagattctccagacaaacttccttaaaaggattggcttgtgttgttattattaagtctaacaagtccaaaagctggagtgtgaggcaggaggctggaaacccaggaaagctgatggtgcaaggtccagtccaaaggtatctgttggaggattctcttgttctgggaagaggacggtctttttttctcttcagaccttcacctgactggatcaagcccactaacatcgaggaggacagtctgcattactcagagttcactgattgatttaaatgtcaatctcatataaaacaccctcacagaaacacctagaataatgtttgaccttataattggaaaatcagagcaaaagttaaatctcaaaaaaa

SEQ ID NO: 19417 - DNA, 922 bp, Homo Sapiens
gttatcttacattccacccaggacacaagaaactccttcacatctggaagaacttgaaggatctgccagagcatcttttggagatcgaaaggtagaactttccagttcatcccagcacggacctagctatgatgtgtataacccattctatatgtatcagcacatttcacctgatttgagtcgacgctttcctccccgttcagaagtgacgagactgtatggatcggtttgtgatttaaggacgaacaaacttcccggttcccctgggctaagcaaatctatgtttgatcttacaaactcatctcagcgattcatccagagacatgattcattgtccagtgtacccagtagttcttcttcaaggaaaaattctcaggggagtaacagaagcctggatacaattactctatcaggagatgaaagggactttgggagactgaatgtgaaattgttttataattcttcagtagaacagatctggatcacagttttacagtgcagagatttaagttggccctctagttatggagacactcctactgtttctataaaaggaatacttacattgcccaaaccagtgcatttcaaatcttcagccaaggaaggttccaacgctattgaatttatggaaacgtttgtatttgctattaaacttcaaaatctacaaactgtaagacttgtatttaagattcaaacccagactcccaggaagaaaaccattggagaatgctcaatgtcactcagaacccttagcacacaggaaatggattactctttggatatacaccaccttcaaaatttctgtttgccatgcagaacttgaattggggacttgttttcagcagtaaatagcagatttcagttacaattcttgaggcacggtaccttccaagctcatcaacacctctgacttgagtttttc

SEQ ID NO: 19418 - DNA, 1061 bp, Homo Sapiens
gcacgagggagaagtctgaggctaattcccccaatagaatatgcatccctcatgcatgaataaataagagtgatcacaggctgtcattgattaagactactagacattttaaaggaagcggaagaaagacagtctcaggaataggtcgaactgaagagacaatatacctgcagcaaacagctacaggactgtttaaagccaagcaagtgcagaattcagtttttcttctttcggggacgtggcctgcatggctatctgctcctgccagtgtccagcagccatggccttctgcttcctggagaccctgtggtgggaattcacagcttcctatgacactacctgcattggcctagcctccaggccatacgcttttcttgagtttgacagcatcattcagaaagtgaagtggcattttaactatgtaagttcctctcagatggagtgcagcttggaaaaaattcaggaggagctcaagttgcagcctccagcggttctcactctggaggacacagatgtggcaaatggggtgatgaatggtcacacaccgatgcacttggagcctgctcctaatttccgaatggaaccagtgacagccctgggtatcctctccctcattctcaacatcatgtgtgctgccctgaatctcattcgaggagttcaccttgcagaacattctttacaggttgcccatgaggaaattggaaacattctggcttttcttgttcctttcgtagcctgcattttccaggatccaaggagctggttctgctggttggaccaaacctcgtgagccagccacccctgacccaaatgaggagagctctgattctcccatccgggagcagtgatgtcaaacttctgctgctggggaaatctcatcagcagggagcctgtggaaaagggcatgtcagtgaaatctggggatggctggattctgaaacatctgcccatgtgtattgatggcagagctgttgcccacaagcgccttttatttagggtaaattaacaaatccattctattcctctgacccatgcttagtacatatgacctttaaccctta

SEQ ID NO: 19419 - DNA, 1674 bp, Homo Sapiens
gcacgaggaaaaagctctgcagatttctgaagaaatacaaggagaaagacacccacagaccattgtgctgatgagtgacctggctactaccctggatgcacagggccgctttgatgaggcctatatttatatgcaaagggcatcagatctggcaagacagataaatcatcctgagctacacatggtactcagtaatctagctgcagttttgatgcacagagaacgatatacacaagcaaaagagatctaccaggaagcactgaagcaagcaaagctgaaaaaagatgaaatttctgtacaacacatcagggaagagttggctgagctgtcaaagaaaagtagacctttgacaaattctgtcaagctctaaatccatttttgtgtagggagaataatgtctagtaatgtggaagaatagctatcattcctgtctctgtggcacccgatcaatggcttaaatctgtcgtttttgatattcaggtttcctcaatttagccttagtgaaggaggggttgtacacactgccatttttgtattttaaaggaaaaatgactttcattcccaactgattatgacctttcaggatgtcgtcaagtgatgctttcagttgtaacacgtgacttggtgctgtccctgctggtctaagtagaactgtagattcatatgggctggtgttcctgtgcgctgtgggtgtggtgattcagcctggcatttctaccataagtttttggtctgctgatttgctgccctgtcttctcttactttactttatcaatacctggcaaactgaccagaattaccttcctcatggcaaagggggattatggtgaattgttgttcttatagtctgtttcatgaagcacaagtggaatttaatacataaaagagaaaaatatcttagtttgctaccagcatccagcatgaagttgtaaagtggggattaggcacgtgacagtatagcacccatttgaatttaaataaaagtgaaccatatttatctggttatataaaactaaaaatgggggtgtttatataaaactaaaaactaagaatgatgtaaccttttgtctgtgttatctgaacactctacttcctttgcagccttagtcacacaactgagtcatctcaagtactctttaaggacacacagcccaggctgttctgagtcagaataggcccctacaggtatattttaaaactcttcgtaattctaatgtgtactgctggtatagctgaactactgacctggatcttagtcctagcctttttgcttttgcaatttcagtatcttcatctctaaactagggaaacactgggattctttcttagctgtgggggaaggtatttggttagatgactttgaatgaatagactgctgtgctgaaagagctttatcacactgtctcaaagtatgtaaagatacataggtggatgctcttactgcagcagtcatgaatacatttttagccatttacctaaggaaaaagacagtttttctaggtaccatgaaggaagattgaccctgttggtatgcctgtgggggtgggatgtgagtgggactgataaactgatacttttggttcgtatgtacatactggaagaatcttttcataataaatgagactacacaacaatattgtatgtatcccagtaatctttgcatttccctcgtgc

SEQ ID NO: 19420 - DNA, 1060 bp, Homo Sapiens
gcacgagggccctttcccctgccggtgtcctgctcgccgtccccgccatgctgtctctagactttttggacgatgtgcggcggatgaacaagcggcagctctattatcaagtcctaaattttggaatgattgtctcatcggcactaatgatctggaaggggttaatggtaataactggaagtgaaagtccgattgtagtggtgctcagtggcagcatggaacctgcatttcatagaggagatcttctctttctaacaaatcgagttgaagatcccatacgagtgggagaaattgttgtttttaggatagaaggaagagagattcctatagttcaccgagtcttgaagattcatgaaaagcaaaatgggcatatcaagtttttgaccaaaggagataataatgcggttgatgaccgaggcctctataaacaaggacaacattggctagagaaaaaagatgttgtggggagagccaggggatttgttccttatattggaattgtgacgatcctcatgaatgactatcctaaatttaagtatgcagttctctttttgctgggtttattcgtgctggttcatcgtgagtaagaagcctgccttgctgttcctgggaagatgccatagttttcgttactggatgtttggagtagatactggtctgtgattggtggaatggagaacacacgtgttggtgcttctgggtagcactggtttgcattagtttatgtttccatgccagagtttgtgtgggcgggcgcatgtgcaccacagagtgcactcgaggggactttcagtcacaggatttcataattgtcattgtcacactttcaaatttttgtacatcagtgaatttttttatattaaaaggttgagccaaagcccccagtgtttgtattttgaagccaagcttcacttctaaagtgcctacagagacttgtaaatgaaaatgcagctctgcacgagtttgaaaccgtcatacctccttctattaggaatggcatatactgaggtggtcgtaagtcttaacttctaaaattttaaataaaagactttgcacattg

SEQ ID NO: 19421 - DNA, 942 bp, Homo Sapiens
gcacgaggctctcctgaacctttaggcttgtctcggcccatttgaagaccaggaagttgatcaatcccgaggctgctgagagacggtggcgcgattgggacagtcgccagggatggctgaggtgaagatgcagcgggtgtccgggctgctctcctggacgctgagcagagtcctgtggctctccggcctctctgagccgggagctgcccggcagccccggatcatggaagagaaagcgctagaggtttatgatttgattagaactatccgggacccagaaaagcccaatactttagaagaactggaagtggtctcggaaagttgtgtggaagttcaggagataaatgaagaagaatatctggttattatcaggttcacgccaacagtacctcattgctctttggcgactcttattgggctgtgcttaagagtaaaacttcagcgatgtttaccatttaaacataagttggaaatctacatttctgaaggaacccactcaacagaagaagacatcaataagcagataaatgacaaagagcgagtggcagctgcaatggaaaaccccaacttacgggaaattgtggaacagtgtgtccttgaacctgactgatagctgttttaagagccactggcctgtaattgtttgatatatttgtttaaactctttgtataatgtcagagactcatgtttaatacataggtgatttgtacctcagagcattttttaaaggattctttccaagcgagatttaattataaggtagtacctaatttgttcaatgtataacattctcaggatttgtaacacttaaatgatcagacagaataatatttttctagttattatgtgtaagatgagttgctatttttctgatgctcattctgatacaactatttttcgtgtcaaatatctactgtgcccaaatgtactcaatttaaatc

SEQ ID NO: 19422 - DNA, 1537 bp, Homo Sapiens
  misc_feature (232)..(240): n is a, c, g, or t
  misc_feature (1174)..(1188): n is a, c, g, or t
  misc_feature (1266)..(1275): n is a, c, g, or t
gcacgaggaggtgctgagataaggaaactttgccaaatgaaagaaagtcactcacttccaatatcccctctcaagcggctaccgtgaaacgggctgcaaacacattccctgagcatcccttgctgatacagcttctttatatttatatcctactggatggtagcatattgctaaggtttcctgtactctgcttcaagggaatgtaagctttatggcattgaaacatttaggnnnnnnnnngatgtttaagagaattaatagagccgtagtctgtattaggatgtgtgtcatatgtgtgttctataaactaagcatcggtgggtttagagtgttaaagtgtcagcacattccttctccttttgtctctcaggctaacatgagagaaaatagaaaagtcttggctgtggggattggaagctcagggggccaaatgtccttgccagatccttagagcattactttgactcctaaaaatagtagtgtatgttatttgatggcttttgtttccatagttccatcactgacaaaactgtcaatactgttgatggagcagcagcatagcctagagtgatgcattcttacccagaggtggcaataggagagggtccatgtaaataggacgaggtagacagtgcatgattgtaggagaagggttgaagggaggacatgattccaaaaaagatcgttctcaatgtgtcgtctgactcaaccagctggcagattacacttgccaagtcgttccctttccttctaagtcagttggctccatattcacttgaatatgcctctgtttgggcaaagcaagatacctccacttaacctttatccaaggaagctcttggtgtcctcttggtcataaagttgtctcctacctaacccagttttaccaaatggaagtaaaaggggacaaactatggaagatggactccatgccattgcagtcagccaccattctcttttccatataaggagccccattacataagctacgggtgaggttggaacagctatgtttcataatttcaagagtgtgaccaccctgctctagtcatcatcattggatgaatccagttgactctttggcaaaagggtgatacttttcactaaaaatgcctactcttcctgttgatgttccttttctgtttttaccttgtccaatttccacactagtcannnnnnnnnnnnnnnagaggatcagattttagcgctggaaaatgagttcaaaaatttcagtgtaatgtcataaggatgttgggatacagagannnnnnnnnnccttggaaacaaatggactgggaagaaacacagcatggctttgctctgagtttcaatctgatgattatgaccatggaagatagtcttatgtaaaggttaaatggtgtttacaagtggatagataacgcggagatggtgagaagccgggttttctctatgctaattgtgtctactaagagcagcactttcctactagctaagcacaatcataagccccaccgtgatgagctgctagtctgaataacattccctgacttaggga

SEQ ID NO: 19423 - DNA, 1225 bp, Homo Sapiens
gcacgagggttacggcatagtgaacgagaaatgaggaacacactagaaaaatttactgcaagcatccagcgtttaatagagcaagaagaatatttgaatgtccaagttaaggaacttgaagctaatgtacttgctacagcccctgacaaaaaaaagcagaaattgctagaagaaaacgttagtgctttcaaaacagaatatgatgctgtggctgagaaagctggtaaagtagaagctgaggttaaacgcttacacaataccatcgtagaaatcaataatcataaactcaaggcccaacaagacaaacttgataaaataaataagcaattagatgaatgtgcttctgctattactaaagcccaagtagcaatcaagactgctgacagaaaccttcaaaaggcacaagactctgtcttgcgtacagagaaagaaataaaagatactgagaaagaggtggatgacctaacagcagagctgaaaagtcttgaggacaaagcagcagaggtcgtaaagaatacaaatgctgcagaggaatccttaccagagatccagaaagaacatcgcaatctgcttcaagaattaaaagttattcaagaaaatgaacatgctcttcaaaaagatgcacttagtattaagttgaaacttgaacaaatagatggtcacattgctgaacataattctaaaataaaatattggcacaaagagatttcaaaaatatcactgcatcctatagaagataatcctattgaagagatttcggttctaagcccagaggatcttgaagcgatcaagaatccagattctataacaaatcaaattgcacttttggaagcccggtgtcatgaaatgaaaccaaacctcggtgccatcgcagagtataaaaagaaggaagaattgtatttgcaacgggtagcagaattggacaaaattacttatgaaagagacagttttagacaggcatatgaagatcttcggaaacaaaggcttaatgaatttatggcaggtttttatataataacaaataaattaaaggaaaattaccaaatgcttactttgggaggggacgccgaactcgagcttgtagacagcttggatcctttctctgaaggaatcatgttcagtgttcgacacctaagaaaagttggaaaaagatcttcaacctttcgggaggagagaaacacttagttcattggctttagtatttgctcttcaccactacaagccc

SEQ ID NO: 19424 - DNA, 1684 bp, Homo Sapiens
gcacgaggagaaggcagagtccaggcttagactgcagttcctcgcttacctgtgcagtctaattttgagctgcctctttgtagtcttaaaaggcaggagcttcgtgttgtgggtctgctaacccgtacgtttccgtgggcaagtcgtgtgtactcctcgccatggctcagctccaaacacgcttctacactgataacaagaaatatgccgtagatgatgttcccttctcaatccctgctgcctctgaaattgccgaccttagtaacatcatcaataaactactaaaggacaaaaatgagttccacaaacatgtggagtttgatttccttattaagggccagtttctgcgaatgcccttggacaaacacatggaaatggagaacgtctcatcagaagaagttgtggaaatagaatacgtggagaagtatactgcaccccagccagagcaatgcatgttccatgatgactggatcagttcaattaaaggggcagaggaatggatcttgactggttcttatgataagacttctcggatctggtccttggaaggaaagtcaataatgacaattgtgggacatacggatgttgtaaaagatgtggcctgggtgaaaaaagatagtttgtcctgcttattattgagtgcttctatggatcagactattctcttatgggagtggaatgtagagagaaacaaagtgaaagccctacactgctgtagaggtcatgctggaagtgtagattctatagctgttgatggctcaggaactaaattttgcagtggctcctgggataagatgctaaagatctggtctacagtccctacagatgaagaagatgaaatggaggagtccacaaatcgaccaagaaagaaacagaagacagaacagttgggactaacaaggactcccatagtgaccctctctggccacatggaggcagtttcctcagttctgtggtcagatgctgaagaaatctgcagtgcatcttgggaccatacaattagagtgtgggatgttgagtctggcagtcttaagtcaactttgacaggaaataaagtgtttaattgtatttcctattctccactttgtaaacgtttagcatctggaagcacagataggcatatcagactgtgggatccccgaactaaagatggttctttggtgtcgctgtccctaacgtcacatactggttgggtgacatcagtaaaatggtctcctacccatgaacagcagctgatttcaggatctttagataacattgttaagctgtgggatacaagaagttgtaaggctcctctctatgatctggctgctcatgaagacaaagttctgagtgtagactggacagacacagggctacttctgagtggaggagcagacaataaattgtattcctacagatattcacctaccacttcccatgttggggcatgaaagtgaacaataatttgactatagagattatttctgtaaatgaaattggtagagaaccatgaattacatagatgcagatgcagaaagcagccttttgaagtttatataatgttttcacccttcataacagctaacgtatcactttttcttattttgtatttataataagataggttgtgtttataaatacaaactgtggcatacattctctatacaaacttgaaattaaactgagtttaacatttctcttt

SEQ ID NO: 19425 - DNA, 1777 bp, Homo Sapiens
gcacgaggccagctcggagcccggagcgtgcctcggcggcctgtcggttttcaccatggagcagctgagctcagcaaacacccgcttcgccttggacctgttcctggcgttgagtgagaacaatccggctggaaacatcttcatctctcccttcagcatttcatctgctatggccatggtttttctggggaccagaggtaacacggcagcacagctgtccaagactttccatttcaacacggttgaagaggttcattcaagattccagagtctgaatgctgatatcaacaaacgtggagcgtcttatattctgaaacttgctaatagattatatggagagaaaacttacaatttccttcctgagttcttggtttcgactcagaaaacatatggtgctgacctggccagtgtggattttcagcatgcctctgaagatgcaaggaagaccataaaccagtgggtcaaaggacagacagaaggaaaaattccggaactgttggcttcgggcatggttgataacatgaccaaacttgtgctagtaaatgccatctatttcaagggaaactggaaggataaattcatgaaagaagccacgacgaatgcaccattcagattgaataagaaagacagaaaaactgtgaaaatgatgtatcagaagaaaaaatttgcatatggctacatcgaggaccttaagtgccgtgtgctggaactgccttaccaaggcgaggagctcagcatggtcatcctgctgccggatgacattgaggacgagtccacgggcctgaagaagattgaggaacagttgactttggaaaagttgcatgagtggactaaacctgagaatctcgatttcattgaagttaatgtcagcttgcccaggttcaaactggaagagagttacactctcaactccgacctcgcccgcctaggtgtgcaggatctctttaacagtagcaaggctgatctgtctggcatgtcaggagccagagatatttttatatcaaaaattgtccacaagtcatttgtggaagtgaatgaagagggaacagaggcggcagctgccacagcaggcatcgcaactttctgcatgttgatgcccgaagaaaatttcactgccgaccatccattccttttctttattcggcataattcctcaggtagcatcctattcttggggagattttcttccccttagaagaaagagactgtagcaatacaaaaatcaagcttagtgctttattacctgagtttttaatagagccaatatgtcttatatctttaccaataaaaccactgttcagaaacaagtctttcattttctttgtaagtttggctctgttggctgtttacacccatgaattttggcatgggtatctatttttcttttttacattgaaaaaaatccagtggttgcttttgaatgcatcaagtaaagaagaagaaaagaatacatccgatgcgtagattcttgaccatgtagtaatctataaaattgctatatcctcctgatagccatgggaaaacatgataagatggtcatttattttgcagttagaattttggaagccacaaaatagacagacaccctgactgttgaagggaggtttaaaaacagatattcaattgaaatgtaagagagcacctcaattgagagcccaggttacgaagacaagcttgcctcgcctgacttttctgtcccttgttctgcaggattagtattctgttacagacttctagttttagactcttcattaaagggccaatggttataacctgc

SEQ ID NO: 19426 - DNA, 1795 bp, Homo Sapiens
  misc_feature (285)..(525): n is a, c, g, or t
gcacgaggttttttttgaaatttgaaatggcagatttattaagtatttttaagccatcaagttacaaaaggctattaggggtcttaaaaagacaaagagtatacaataaaacaataagcaattacagattgttttaggttgaacaatttttgtacagttatatctatagtacattactaatttacttagcaaactttatcctgagatttgcaaatttaaaaaaatgaagaatcaaactatattttcttttctgtttttttgaaacagagtctccactctgtcatnnnnnnnnnnnnnnnnnnnnnnnnnnnnnnnnnnnnnnnnnnnnnnnnnnnnnnnnnnnnnnnnnnnnnnnnnnnnnnnnnnnnnnnnnnnnnnnnnnnnnnnnnnnnnnnnnnnnnnnnnnnnnnnnnnnnnnnnnnnnnnnnnnnnnnnnnnnnnnnnnnnnnnnnnnnnnnnnnnnnnnnnnnnnnnnnnnnnnnnnnnnnnnnnnnnnnnnnnnnnnnnnnnnnnnnnnnnnnnnnntgagccaccgtgcccggcctcaaactatattttctaattagtacagtaaatacacattaatcatgacacaattatttcttctggatacagcaggaaaaattaagttaagagaaagtgcttcatatttcttgatttgttataaaaaggagagatcctctagatttctgggtaagagggaaagctagcaatcccacaatgatttcctttatttcttgccatccgaatatatccttcttcaccaaagttgtggccccagctgtttttcacaagccagtattctttcccattaagatcaccatagccaaccacaagtacaccatgattcacattctgagtacaggatggttcatagtagacaccacttctgtagaggaagaaagaaggatgacgcgcatctacaccaacagacactgggcctttattggccacagcttctttcaggacatcttttctgccataaggaagttcagtgtactttgaacatgtggcagcacgatattttgagtcatattgacatttctgatccatggctttgtagggataggaagcgtctgagtcgatgcccttgttatcaatgatgtactggaaagccgttgtcatgaagccaccattgcagcctttgtttccatatttttcagttgagcaatccaccaggttctgggcactgagagacaccagctttcctgttttcagcttcagctgtgcttccagggcccccacagcactgaaagcccagcaagcaccacaagaaccttgatatttcacttcagtaacacaccctttctctctccagtccacagaatcaggcaatatccaattagggtttgacttatatgtgatatttctctgccactggctgggaactctcagggaactcatcaaagacatcacttcttcactggtcatgtctcccaggtggttcatgcccagatcgtatgagtgcattcccattgaatgctccaggttgtgaagcatcacaaactttagattcttttcccagatgagacgtcgtactgcttcttcattcttttccttgtattgtttgccataggttttcttccagagatgccagtggtgatccagggtaggatctttatgcaactgtgccactgcagaggagcacaccaagagcacacaaaccagccgtttcattgtgatagaaccagcagttgctcccacggtaagagtccttgaattagtgggctctcttctaagatttcaaagcaacaaggagatttcagttcaattgacttgaaaagaaacctcgtgc

SEQ ID NO: 19427 - DNA, 1274 bp, Homo Sapiens
  misc_feature (1064)..(1074): n is a, c, g, or t
gcacgaggctcaactgaaatcatggcgtttgacagcacttggaaggtagaccggagtgaaaactatgacaagttcatggaaaaaatgggtgttaatatagtgaaaaggaagcttgcagctcatgacaatttgaagctgacaattacacaagaaggaaataaattcacagtcaaagaatcaagcgcttttcgaaacattgaagttgtttttgaacttggtgtcacctttaattacaacctagcagacggaactgaactcagggggacctggagccttgagggaaataaacttattggaaaattcaaacggacagacaatggaaacgaactgaatactgtccgagaaattataggtgatgaactagtccagacttgttcgctgatatctaaattaagaagttggttcttgagtgaattctgaaaatggctacaaacttcttgaataaagaagacaggactctcaatagaagaatttcacatctccaagggacccttcctttcattttacactttgttactaatttgcagaactctattaattgggtaggatttcacccattcctagctaagttcttaaaattaaaccctttggttcgtgtttaaaaactttcaaacatctgatggctttacaggggctgaatataaaagcatttgtacttaaaggtcttgtgtattcattaagaaatatagtaatgtcttttaatgttttaagagttgatcagggtttactatgatgcaagtaataggatgattaataagggaaggtttttatgaattcaaaagtcaattattcaaaagcagggaaagattttgagagagggaacaaagtattcttagattgcgtagaagctgctaggttccagttttaatttttaggtttagttggactctgttatgaaaagataggttatgggtgggcgacaggttgatacagtcttagaaaaagcaggtaatatcaaagtattggaaagctagcatgcatgccctcttacctgggtatcttcccccttttttccttttaaactcttgagcctcctataacgaaggattatgtgtttcaaaccnnnnnnnnnnnactgtttcattaagtgtgcttgtgcccaaaatatttacttgtataatatctgtaacttgcttaaatacttcagcaaagtcagcatatttactcattcaacaaatatttgagccaggcatattttagacagcagtgaaccaaaacaaaaaggcattcttgtcttcatggagcttacatttcttattggtatttaaatctaa

SEQ ID NO: 19428 - DNA, 1299 bp, Homo Sapiens
gcacgaggtggagatggctgagctcgtctttgacctgctggtcatcatgttcctcatgctgctccgaaggttccgaagccgatactggtctccaggccgagggggcaggggtgctcaggaggtagcctccaccctggcatcctcccctccttcccacttctgcccccaccccatgtctctgtccttgtcccagccaggccctgctccctctccagccttgacagcccctccccctgcctatgccaccctgggcccccgcccatctccagggggctctgcaggggccagttcctccgcctgtcctctgggggggccctgagagggaaggagaggtttctcacaccaaggcagatgctcctctggtgggagggtgctggccctggcaagattgaaggatgtgcagggcttcctctcagagccgcccaaactgccgttgatgtgtggaggggaagcaagatgggtaagggctcaggaagttgctccaagaacagtagctgatgaagctgcccagaagtgccttggctccagccctgtaccccttggtactgcctctgaacactctggtttccccacccaactgcggctaagtctctttttcccttggatcagccaagcgaaacttggagctttgacaaggaactttcctaagaaaccgctgataaccaggacaaaacacaaccaagggtacacgcaggcatgcacgggtttcctgcccagcgacggcttaagccagcccccgactggcctggccacactgctctccagtagcacagatgtctgctcctcctcttgaacttgggtgggaaaccccacccaaaagccccctttgttacttaggcaattccccttccctgactcccgagggctagggctagagcagacccgggtaagtaaaggcagacccagggctcctctagcctcatacccgtgccctcacagagccatgccccggcacctctgccctgtgtctttcatacctctacatgtctgcttgagatatttcctcagcctgaaagtttccccaaccatctgccagagaactcctatgcatcccttagaaccctgctcagacaccattacttttgtgaacgcttctgccacatcttgtcttccccaaaattgatcactccgccttctcctgggctcccgtagcacactataacatctgctggagtgttgctgttgcaccatactttcttgtacatttgtgtctcccttcccaactagactgtaagtgccttgcggtcaggggactgaatcttgcccgtttatgtatgctccatgtctagcccatcatcc

SEQ ID NO: 19429 - DNA, 864 bp, Homo Sapiens
gcacgaggcccgaagccgtcgcggcggggaccatgttgcttccgaacatcctgctcaccggtacaccaggggttggaaaaaccacactaggcaaagaacttgcgtcaaaatcaggactgaaatacattaatgtgggtgatttagctcgagaagagcaattgtatgatggctatgatgaagagtatgactgtcccattttagatgaagacagagtagttgatgagttagataaccaaatgagagaaggtggagttattgttgattaccatggttgtgatttcttccctgaacgctggtttcatatagtttttgtgctgagaacagataccaatgtattgtacgaaagacttgaaacaaggggttataatgagaagaaactaacagacaatattcagtgtgagatttttcaagttctttatgaagaagccacagcatcctacaaggaagaaatcgtgcatcagctgcccagtaataaaccagaagagctagaaaataatgtagatcagatcttgaaatggattgagcagtggatcaaagatcataactcttgacttataaggctagctacttaataatcactcttgttgatatctctgccgacatcatagaaattgttcaagtgtcagtaacactttattaaaatcatgttgcagaaccagcaggtggatagtatataggtttatgcctgtgtttctttttctccatgagaaagctaaacatgaaatataatgaatatagtattattaaggattgagacaaaaactgtgattttaatacttaaattgctaaagaataaataaatctgacaaatgggtggatatcttttaagtttattacagaaaaaatgccgatgatctcttaaaa

SEQ ID NO: 19430 - DNA, 879 bp, Homo Sapiens
gaattcggcacgaggggcgctagagcgttcctccccagctcgaatgcccggcggccgaggcggctagagcgtcgcctcctcccggggaaccgcgtgtgaccttccagcccgcggaccgatgctgccggcggccgctcgccccctgtgggggccttgccttgggcttcgggccgctgcgttccgccttgccaggcgacaggtgccatgtgtctgtgccgtgcgacatatgaggagcagcggccatcagaggtgtgaggccctcgctggtgcacccctggataacgcccccaaggagtacccccccaagatacagcagctggtccaggacatcgccagcctcactctcttggaaatctcagacctcaacgagctcctgaagaaaacgttgaagatccaggatgtcgggcttgtgccgatgggtggtgtgatgtctggggctgtccctgctgcagcagcccaggaggcggtggaagaagatatccccatagcgaaagaacggacacatttcaccgtccgcctgaccgaggcgaagcccgtggacaaagtgaagctgatcaaggaaatcaagaactacatccaaggcatcaacctcgtccaggcaaagaagctggtggagtccctgccccaggaaatcaaagccaatgtcgccaaagctgaggcggagaagatcaaggcggccctggaggcggtgggcggcaccgtggttctggagtagcctccagctcggaggacttgtgttcaggggtcctgggccccgggcgaggtcccgccctcccgtggtcactggctccgccccagcaccaggcgcccagtggagccgtttgggagattgcctgcgccacgcagcggggccggacaggccgcacagacctactgtgg

SEQ ID NO: 19431 - DNA, 934 bp, Homo Sapiens
ggaattcggcacgagggcagtaatgggtcggagagtagtcctgccaatgagaacggagaccggcatctacagcagggttcagaatctcccatgatgattggtgagttgagaagtgaccttgatgatgttgatccctagaggaacatgcccagcctgagaggagtcaagacacaatactggatgctcagcaccttcttggaatcagaatctcgaaccctttggaagagcctggagattggactgggaaagctgctgtgacttgggcggatcgtgtatttctcaaggaaagcatttttaagccactagaaggtttgggagctgtttggcagtgggagaactccggcatgtggatcagctgtcccgggagcgtggtctatatgtggattcacatttctgtggagattttcggaaatagagccagtggcagacttttttgttacacgaacatacaagagtgagcataaagctgttgctttctctacgatgctacaaaagaaattcctttggtttttatattttaagaaaaagcaagctgcttttagatatgtgggggcaaatttttaatcttgcagtaatattaaacaggaatatcccatttaaaatgatgtaaagatgtaataaaattccttttcattgtaaaatagtaattaagtcaatttacacagacctttgtatttaatatgtctccctatttgtatagaatttcagatgggtctagatgagaaccctatgcataagcttggatcttgatgaaaggttaccaggatcaggatcaaaaattggggaatactaagctcttgaagatatttttctgatataattagattgaaagagcaattttgaaaatgctgtgttctccagaagtacagggtgcattatttgacatcattacttaaaggaagttatgagttgttcccaaactgattttaaaaac

SEQ ID NO: 19432 - DNA, 1271 bp, Homo Sapiens
  misc_feature (1073)..(1086): n is a, c, g, or t
gcacgaggattttttttccctgaaattggataatgtactttcttctcaagattcatgacttgatagaacaatactttcagttatgttgcaaaggctcttgggcattttaaacaaaatgaagtatatccattttgaaacctgtgtatttctttttcggggtttctgcatgcagtggcagtcttaagtgccaaaattcattataaccccaaaataaccccttgatgaaggcttgctgtcttttactgtgttacacagcatccttactggatatcttagttgcttgtttgggcagcacactaatattacttaaaacactgtgatatactggagttttagttagcggaagtcagttcagggcattttagggctgtcttgctatactgaattgtagctaacaatcctaattatatctagtaccatactgagttattggtatgaccctgtggaaacacacattattttatgtaaatataggctaaagacttaatgtcctttagcttgtgtatataattgtgttgtatagtctcagagtacattctaaccctacatttctaatcattgttattggtaatcttttctgtgaatattaggtttcctccagaaatggtccgttatttgggaaagttaactgtgtgcacttttagatattaactacatttacaggcaaatcactgtaatgagaatggtactggaaaaatactgaatagacttgctaaatggcacatgcactacaagaggaaccttttgggttatttaatatgtacagaaaacattagaaaaaatttattacagaattctaattccagtatgaatagtggaaacccatctgtaaattagatggatgttggatggaaaatgacattgctaaatttgagaatttctttttacctactaatgtagattgctttgtataataaaacacagggtttggaaggttttgttacagggagcatggtctgttgaagatttttaaaatgtatttttctagattaacttctgtacatgaaatgtctaataaaactataagaggtttagagatttttccattggaaatgtgcattttggtttctaannnnnnnnnnnnnncatttactggcatactgttatacctcatttttaaaaatcaactgaatccaatatttcctgtggcaaataacactttcctcatttcataccttttctcctctcttccatgccaacatttctccacccacaacgtacactttttatttctccatcaatatttgaaagcgagtgatttgtgaccagga

SEQ ID NO: 19433 - DNA, 870 bp, Homo Sapiens
gcacgaggcacattattcgaaaatgcccaatcagattgccacccttgatttcaatgatacatttctctccattgagcatttaaaagccagcttccctggtcataatgttaaagtaactgtagaagaccctgctctacaaataccccctttcaggataacttttccagtaagaagtggaaaagggaagaaaaggaaagatgcggatgtggaagatgaagacaccgaggaagcaaaaaccttaattgttgagccccatgttattcctaataggggtccttatccttataatcaacccaaacgtaatacgattcagttcactcatacacagatagaagccatccgtgctggaatgcagcctgggctgactatggttgtgggcccacctggtacaggcaaaacagatgtggcagttcagatcatatccaacatctaccacaacttcccagaacagaggactctaattgttactcattccaatcaggccctaaaccagttgtttgagaaaatcatggcattagacattgatgagcgccacctactgcgtcttggtcatggagaagaagagctggagaccgagaaagatttcagcaggtatggaagagttaattatgttctggctcgaagaatagaacttttagaagaagtcaacgattgcaaaagagtctaggggttccaggagatgcctcatatacctgtgaaactgcaggctatttcttcttataccatctcatgaagtacaaataataaaaaatatgccctagatggcaaactttgtatacaacatgtacatgcctttgatacagactacacatcattatcatcggactttattaccactaccacctgctatggtagaaggagggtgaggaa

SEQ ID NO: 19434 - DNA, 1492 bp, Homo Sapiens
  misc_feature (1122)..(1149): n is a, c, g, or t
ctggtctcattcctgttgcagtgaaacttcgagttccacagactttgcatgctggcttctctaaccctgtgtgctgcgtgtgcctgtttctcatctcttattctttttaaaattcatgcttaactactgtgggagaataactgtaaacagctttaattaaatcatacttataaaaaactattttcttatattccactctatgcttttggtattgttgatctttacaaattaaatggtctttgataatggatctattttgtattgccttattaagaccaaatacttcttgtcatcccattctttatcctcttctttcatggaattgttatcgttaattaaaacttttttaaacattggcttgtttcaatcatactgtaaattttggttgtagtcagctttgagtgcaatgagatgtataattctgttatcattacctgttgagtttgaaactcagttgggaatatttaatataatagaatgtaagtgacatttctgaaaatgctttctttcagggtgaaagctcttatgtttagcatcaatgtgtatggctctgttaaatgcagccatttctgagacgagattcttttatatatatatacatataaagtactattggcttttaggagtttcttttatatacatttatgaaatactgaagaccaatcagaccattaatggacacttagtgtaactttttataaagaaaataatgctaaagtaagaccaaaactgatgtcatcactgaaattaacaattttcaatatgttcatattttaattcacaatggaaaaatgtgttccaaactggaaactcatagtactcgtgtaaactgtggaagatttcaaatgtgatgttattttgacaatgttttaaattttagagtcacattttattctgatcagaatttttattgagatgttgagcttttgtttttgaaactagtttgtcataacattgtgcataatcacagtatttattttctaggacaattgtgaatgtgtagacttatgtttactgctaagggaacaattatttataaaataatattaaatccagtattagctgcctatttcagacacttaatacttgcagagatctatgttacatttaccacactgaagnnnnnnnnnnnnnnnnnnnnnnnnnnnnaaagaatcaccctcattgttgaaagtaaatgtactcttagggtgcgaatattagtgttccaataagcatgtgattatattaaggtggtggtagcgggaagataattctgattccattgggaatcttaggttttcgtaaatttattgggaaaatagtttttcctgtactgctgaagtttctttttggtaaacagtatctttctaaaagaaaaaagcacgagggagaaattgaggtgtgtatacatttcctcaaatgaccagcattgtattcgtgaatactgtgtatcttgcagtgaacagtgtggaagctgttcatttttcaatctgaagtaaaatcctcgtgc

SEQ ID NO: 19435 - DNA, 952 bp, Homo Sapiens
gcacgagggcgcgtttggctgcaatgagctcggcctcggggctccgcagggggcacccggcaggtggggaagaaaacatgacagaaacagatgccttctataaaagagaaatgtttgatccggcagaaaagtacaaaatggaccacaggaggagaggaattgctttaatcttcaatcatgagaggttcttttggcacttaacactgccagaaaggcggggcacctgcgcagatagagacaatcttacccgcaggttttcagatctaggatttgaagtgaaatgctttaatgatcttaaagcagaagaactactgctcaaaattcatgaggtgtcaactgttagccacgcagatgccgattgctttgtgtgtgtcttcctgagccatggcgaaggcaatcacatttatgcatatgatgctaaaatcgaaattcagacattaactggcttgttcaaaggagacaagtgtcacagcctggttggaaaacccaagatatttatcattcaggcatgtcggggaaaccagcacgatgtgccagtcattcctttggatgtagtagataatcagacagagaagttggacaccaacataactgaggtggatgcagcctccgtttacacgctgcctgctggagctgacttcctcatgtgttactctgttgcagaaggatattattctcaccgggaaactgtgaacggctcatggtacattcaagatttgtgtgagatgttgggaaaatatggctcctccttagagttcacagaactcctcacactggtgaacaggaaagtttctcagcgccgagtggacttttgcaaagacccaagtgcaattggaaagaagcaggttccctgttttgcctcaatgctaactaaaaagctgcatttctttccaaaatctaattaattaatagaggctatctaattttacactctgtattgaaaatggctttc

SEQ ID NO: 19436 - DNA, 1575 bp, Homo Sapiens
  misc_feature (686)..(720): n is a, c, g, or t
  misc_feature (835)..(844): n is a, c, g, or t
  misc_feature (1045)..(1075): n is a, c, g, or t
  misc_feature (1232)..(1234): n is a, c, g, or t
  misc_feature (1240)..(1266): n is a, c, g, or t
  misc_feature (1501)..(1510): n is a, c, g, or t
cgggctgcaggaattcggcacgaggctgcccttaaaagtaggggtggcggcggcggcgctgagtttatacattagttcagacctacttggtggcattaaactgtttgaatgcaaattcgatttcagattgaacttgttaagggagttaacgagggctgagttcagcaaatgctaaagtgttaatttcaaatatgcaaatttggtactgcagtttgttatgcaatattatatcaccaacccagtatcacaaaaactcatagaagatatcatgtaggccctgggctttgggggggtcccaaacatggtatgcagaaatgtgatggttacaggtcagtacaacctcagtccttagaacccctccacacttcagctctgcacccactttcctgtcatttatttatataggactgtagttttttttagttcgagagcctttcgaagcttaatttatattctttctttgtcccttttttctaaaattaccaaagatattacacaaaggtaaattatgttctctgttttatgctttatctgatgaagccaaatatcctcttattgttgatcaaaggaggcaaaagaatttagaggcaaatgacaagcgataggctattgcaacctgagaaagagaactgctccttcatcgtaaatttagaagaccaagtagataatggaaccaaagttgttannnnnnnnnnnnnnnnnnnnnnnnnnnnnnnnnnngtgtacctctacagagaccaaaactcattctcttaaagagattttatggggctactgcagataaaaataggacacaatattaaaggagctacagaaggaagggagtcccatctcnnnnnnnnnntgaatgtatgccactgcaattagagtatccaataaaggagacagtttagagtcaggacagaaaagcttccataattgaactagattacataatagtatttctagaaaaagagatatttttagattgtatgccacttttgtttaagaactgtgctgtgatcactgtattaattttggtttatcttggcatatatccttcagnnnnnnnnnnnnnnnnnnnnnnnnnnnnnnnccgattaggctttggtcagcatttttcatttaaagaaaagtaacactcccatccactcataagcttggtacaaaaacttttctggcagttacttttgaagcttcactctgctttctgtataaagggcagtctgtggtcacgcaagactttagatttnnnataacnnnnnnnnnnnnnnnnnnnnnnnnnnnccttttccaggcagcttcatgatgtgcaggcagtagccagacagggtcatgggaagggggccctgtgcttctaaactgagtggttgctggttagtttggtattcaaaagaggataaaaatctggtagattagttcattctcagcatgtgtagctagacatgagtaaagataacagcatgagaaactgttagtacgcatacctcagttcaaacctttagggaatgattaaaatttnnnnnnnnnncatttcactcagttgcacttagtcgtatgtcttgcatgcttagtctaaagactgtagcctcgtgc

SEQ ID NO: 19437 - DNA, 689 bp, Homo Sapiens
aatatatgcacacagttttatatataatgcagcatcacaccatgtagggcatttactcttattttatacattcagatatgtttgaaacacttcttaaggctacaaaacagaacatagaaaaataaacaggaatatattcaacacttacaaaaagtgatatgataaagaatataaagtactagtttccttttaacacttcaaaagatatgtatatatacttttttttacaagtaacatcacaaatgatcacatcttcacatgctcttaaagtattatttgtactcagtgtaaggctattatcgtttttcatacataaaattttctagctctgtaacacaatgcaatttttaatccattcaagtaagttcaaccccaaagttgccgcttcccagcattaagacatgcacccacccctcttctaagattttctaaaacttgtatttcggggagaaagacctcttttaaaaaataatcccaattagtgggagagtaaatggctgacattagtagcaaaaccttagttatctgaaaataacatattggaaatgagacattattaggattttaaacaaacaatagcatttagacataaagtaggaagcaaaatacagtaaacagaaatagtgtagccaaatatgcattctcttcagctacactagagtggaccttgcttagtacccttaagtaaa

SEQ ID NO: 19438 - DNA, 1151 bp, Homo Sapiens
ggcgtccaggtctaagcggcgtgccgtggaaagtggggttccgcagccgccggatcccccagtccagcgcgacgaggaagaggaaaaagaagtcgaaaatgaggatgaagacgatgatgacagtgacaaggaaaaggatgaagaggacgaggtcattgacgaggaagtgaatattgaatttgaagcttattccctatcagataatgattatgacggaattaagaaattactgcagcagctttttctaaaggctcctgtgaacactgcagaactaacagatctcttaattcaacagaaccatattgggagtgtgattaagcaaacggatgtttcagaagacagcaatgatgatatggatgaagatgaggtttttggtttcataagccttttaaatttaactgaaagaaagggtacccagtgtgttgaacaaattcaagagttggttctacgcttctgtgagaagaactgtgaaaagagcatggttgaacagctggacaagtttttaaatgacaccaccaagcctgtgggccttctcctaagtgaaagattcattaatgtccctccacagatcgctctgcccatgtaccagcagcttcagaaagaactggcgggggcacacagaaccaataagccatgtgggaagtgctacttttaccttctgattagtaagacatttgtggaagcaggaaaaaacaattccaaaaagaaacctagcaacaaaaagaaagctgcgttaatgtttgcaaatgcagaggaagaatttttctatgaaaggcaattctcaagttcaactactcagtgcaggaggagagcgacacttgtctgggaggcaaatggtcttttgatgacgtaccaatgacgcccttgcgaactgtgatgttaattccaggcgacaagatgaacgaaatcatggataaactgaaagaatatctatctgtctaacccttttccagtggacagagaggggcttgtttttgtaaaattaccagaaaactcagtggatatttactgaaaaactcacacttttttcatattatgttcctctacaaaaagtagggctctgtcccatgtgtctcagacacttttacaatataccagttttttaaaattgggctcaaaataagagtgggagatttaaaatcttttccaag

SEQ ID NO: 19439 - DNA, 670 bp, Homo Sapiens
gcacgaggctgatgtttctgtctcagagccaaggccaagaggcccagacagagttgccccaggcccggatcagctgcccagaaggcaccaatgcctatcgctcctactgctactactttaatgaagaccgtgagacctgggttgatgcagatctctattgccagaacatgaattcgggcaacctggtgtctgtgctcacccaggccgagggtgcctttgtggcctcactgattaaggagagtggcactgatgacttcaatgtctggattggcctccatgaccccaaaaagaaccgccgctggcactggagcagtgggtccctggtctcctacaagtcctggggcattggagccccaagcagtgttaatcctggctactgtgtgagcctgacctcaagcacaggattccagaaatggaaggatgtgccttgtgaagacaagttctcctttgtctgcaagttcaaaaactagaggcagctggaaaatacatgtctagaactgatccagcaattacaacggagtcaaaaattaaaccggaccatctctccaactcaactcaacctggacactctcttctctgctgagtttgccttgttaatcttcaatagttttacctaccccagtctttggaaccctaaataataaaaataaacatgtttccaccctcgtgc

SEQ ID NO: 19440 - DNA, 1332 bp, Homo Sapiens
gcacgagggcagcagccatctccactccaaagttagacaaaatgccaggaatgttcttctctgctaacccaaaggaattgaaaggaaccactcattcacttctagacgacaaaatgcaaaaaaggaggccaaagacttttggaatggatatgaaagcatacctgagatctatgatcccacatctggaatctggaatgaaatcttccaagtccaaggatgtactttctgctgctgaagtaatgcaatggtctcaatctctggaaaaacttcttgccaaccaaactggtcaaaatgtctttggaagtttcctaaagtctgaattcagtgaggagaatattgagttctggctggcttgtgaagactataagaaaacagagtctgatcttttgccctgtaaagcagaagagatatataaagcatttgtgcattcagatgctgctaaacaaatcaatattgacttccgcactcgagaatctacagccaagaagattaaagcaccaacccccacgtgttttgatgaagcacaaaaagtcatatatactcttatggaaaaggactcttatcccaggttcctcaaatcagatatttacttaaatcttctaaatgacctgcaggctaatagcctaaagtgactggtccctggctgaagggaattaacagatagtatcaagcgcagaaggaatgtgccagtatggctccctgggtgaacagcttggccttttttgggtgtcttgacaggccaagaagaacaaatgactcagaatggattaacatgaaagttatccaggcgcagagttgaagaagcataagcaagacaaaaacagagagaccgcagaaggaggaagatactgtggtactgtcataaaaaacagtggagctctgtattagaaagcccctcagaactgggaaggccaggtaactctagttacacagaaactgtgactaaagtctatgaaactgattacaacagactgtaagaatcaaagtcaactgacatctatgctacatattattatatagtttgtactgagctattgaagtcccattaacttaaagtatatgttttcaaattgccattgctactattgcttgtcggtgttattttattttattgtttttgactttggaagagatgaactgtgtatttaacttaagctattgctcttaaaaccagggagtcagaatatatttgtaagttaaatcattggtgctaataataaatgtggattttgtattaaaatatatagaagcaatttctgtttacatgtccttgctacttttaaaaacttgcatttattcctcagattttaaaaataaataaataattcattt

SEQ ID NO: 19441 - DNA, 1384 bp, Homo Sapiens
  misc_feature (1141)..(1161): n is a, c, g, or t
gcacgaggggactctgtatgatatttgtggcagattgcctttgtccttcaaaaaggcgcagaccacagccatacccatacccttcaaaaaaattattatcagaatctgcacaacctttgaaaaaagtggaggaggaacaagaggcggatgaagaagatgtttcagaagaagaagctgaaagtaaagaaggaacaaacaaagactttccacagaatgccataagacaacgctctctgggtccatcattggccacagataaatcctagttaaattttatagttatcttaatattatgattttgataaaaacagaagattgatcattttgtttggtttgaagtgaactgtgacttttttgaatattgcagggttcagtctagattgtcattaaattgaagagtctacattcagaacataaaagcactaggtatacaagtttgaaatatgatttaagcacagtatgatggtttaaatagttctctaatttttgaaaaatcgtgccaagcaataagatttatgtatatttgtttaataataacctatttcaagtctgagttttgaaaatttacatttcccaagtattgcattattgaggtatttaagaagattattttagagaaaaatatttctcatttgatataatttttctctgtttcactgtgtgaaaaaaagaagatatttcccataaatgggaagtttgcccattgtctcaagaaatgtgtatttcagtgacaatttcgtggtctttttagaggtatattccaaaatttccttgtatttttaggttatgcaactaataaaaactaccttacattaattaattacagttttctacacatggtaatacaggatatgctactgatttaggaagtttttaagttcatggtattctcttgattccaacaaagtttgattttctcttgtatttttcttacttactatgggttacattttttatttttcaaattggatgataatttcttggaaacattttttatgttttagtaaacagtatttttttgttgtttcaaactgaagtttactgagagatccatcaaatcgaacaatctgttgtaatttaaaattttggccacttttttcagattttacatcattcttgctgaacttcaacttgaaattgnnnnnnnnnnnnnnnnnnnnnggatgtgaaggtgaacattcctgatttttgtctgatgtgaaaaagccttgggtattttacatttttgaaaattcaagaagcttaatataaagtttgcattctactcgggaaaaagcatcttcctgtatatgtcttaaatgtatttttgtcctccatatacagaaagtcctaaattgatttacagtcggtattgcttgatgtttaaaataataacatttttaaa

SEQ ID NO: 19442 - DNA, 858 bp, Homo Sapiens
gcacgagggtccaaggtgccctacatcgtgcgccagtgcgtggaggagatcgagcgccgaggcatggaggaggtgggcatctaccgcgtgtccggtgtggccacggacatccaggcactgaaggcagccttcgacgtcaataacaaggatgtgtcggtgatgatgagcgagatggacgtgaacgccatcgcaggcacgctgaagctgtacttccgtgagctgcccgagcccctcttcactgacgagttctaccccaacttcgcagagggcatcgctctttcagacccggttgcaaaggagagctgcatgctcaacctgctgctgtccctgccggaggccaacctgctcaccttccttttccttctggaccacctgaaaagggtggcagagaaggaggcagtcaataagatgtccctgcacaacctcgccacggtctttggccccacgctgctccggccctccgagaaggagagcaagctccctgccaaccccagccagcctatcaccatgactgacagctggtccttggaggtcatgtcccaggtccaggtgctgctgtacttcctgcagctggaggccatccctgccccggacagcaagagacagagcatcctgttctccaccgaagtctaaaggtcccagtccatctcctggaggcagacagatggcctggaaacctctggctaatcgggccatccgtagagcgggaaccttcctgaggtgtccttgggccacccccaagtgttgggccatctgccaagagacagcgacccaaagccgaacgacaggtggcctgggcagatctcgcccaggtctgggagctccaggctggcctcagactgtggtttttatgtggcc

SEQ ID NO: 19443 - DNA, 1037 bp, Homo Sapiens
gcacgaggatttatttttgtttcctaaaattaagatagcttgaatattatttcacattcctttttcttttttaaataaacaggtttgctttggaaaggcttaatgatggaatgttagcatcttcactagggtaaagaagaacaaaaagaatgttgctggaacgtaaaatagtatttaaaagttaatgaacacttctctagttttcttagttatggccttaataattagtctcttggcttaaatgtccactggttttactttgacacagttgaacaacactggggttaagtctctggtatttaggctggcaatatatatattaaccatattttaaaagtaccaattttgtttttacagaaaagataaaactcaaaagagaacagtgtattccttctgaggggcttttataaattattaactataatatatgatggattttttcctaattttttatatttccttacaattttggtggccattaatttaactttaggcttttgggcatatgctagtctgagcttccgaaaagatacatatatgtttcccttttcattagctgaatgaggatattttaagaagttgaaagagaatttattttcaagttgtgagtaaatcctcctttgaaattcacctgattattagataacttaaagtttatttttaaaagctgacaactttttatgaatcttcgagttgacagttcctaaaagcgtaactcagatattaatgggctgtgtattaaatggttttattttcagttttgcagcacagaacactgttgaaatatccatatcaacttgatttttttaactaaattcaggtgtcctttgcatctcttaaatgttgggggtgggggtcagagccagttatccggcttctgttttgtcgattgcttagatttgttcctgttgtcaaaactgttacccccaaaattggtgtgacacatgctcatgcataaaatgttaaaatgagtacatccttgtatttgtatttgttttcaacatcgccaaggtgctatgggaaattaacaaaattag

SEQ ID NO: 19444 - DNA, 710 bp, Homo Sapiens
gcacgagggtcagcttcttctgagagagtctctagaagacatgatgctacactcagctttgggtctctgcctcttactcgtcacagtttcttccaaccttgccattgcaataaaaaaggaaaagaggcctcctcagacactctcaagaggatggggagatgacatcacttgggtacaaacttatgaagaaggtctcttttatgctcaaaaaagtaagaagccattaatggttattcatcacctggaggattgtcaatactctcaagcactaaagaaagtatttgcccaaaatgaagaaatacaagaaatggctcagaataagttcatcatgctaaaccttatgcatgaaaccactgataagaatttatcacctgatgggcaatatgtgcctagaatcatgtttgtagacccttctttaacagttagagctgacatagctggaagatactctaacagattgtacacatatgagcctcgggatttacccctattgatagaaaacatgaagaaagcattaagacttattcagtcagagctataagagatgatagaaaaaagccttcacttcaaagaagtcaaatttcatgaagaaaacctctggcacattgacaaatactaaatgtgcaagtatatagattttgtaatattactatttagtttttttaatgtgtttgcaatagtcttattaaaataaatgttttttaaatctg

SEQ ID NO: 19445 - DNA, 1372 bp, Homo Sapiens
gcacgaggcgcgtcgactgcccagagtccgcgaatcctccgctccgagcccgtccggactcccccgatcccagctttctctcctttgaaaacactaagaataatgtcactgcatcagtttttactagagccaatcacctgtcatgcctggaacagggatcgtactcagattgccctcagtcccaataatcacgaagtgcacatctataagaagaacgggagccagtgggtgaaagctcatgaactcaaggagcacaacggacacatcacaggtattgactgggctcccaagagcgaccgcattgtcacttgtggggcagaccgcaatgcctatgtctggagtcagaaagatggtgtttggaagccaaccctggtgatcctgagaattaatcgcgcagctacttttgtgaagtggtcccccctagagaacaaatttgctgtgggaagtggagcacgactcatttctgtttgttactttgagtctgaaaatgactggtgggtgagcaagcacattaaaaagccgattcgctccacagtcctcagcttggattggcatcccaacaacgttttgctggcagcaggatcatgtgacttcaaatgcagagtgttttctgcctacattaaagaagtggatgaaaagccagccagcacgccctggggcagcaagatgccttttgggcagctgatgtcagagtttggtggcagtggcactggtggctgggtccacggggtaagcttctctgccagtgggagccgcctggcctgggtcagccacgacagcaccgtgtctgttgctgatgcctcaaaaagtgtgcaggtctcgactctgaagacagagttcctgccgctcctaagtgtgtcatttgtctcagagaacagcgtcgtggctgctggccatgactgctgcccaatgctctttaactacgatgaccgcggctgcctgaccttcgtctccaagttagatattccaaaacagagcatccaacgcaacatgtctgccatggaacgcttccgcaacatggacaagagagccacaactgaggaccgcaacacggccttggagacgctgcaccagaatagcatcactcaagtctctatttatgaggtggacaagcaagattgtcgcaaattttgcactactggcatcgatggagccatgacaatttgggatttcaagaccctcgagtcttccatccagggcctccggataatgtgaagctgagtgagcctccgccatccagcatgacaaactgtggccgaccgcagctgtgccgtggcacgatggcgaggaagccagccccaggaaacactgaaaacacatatcacgccaatgccgtgtggttttgtttgaatataaaattggtgaaagtgtt

SEQ ID NO: 19446 - DNA, 479 bp, Homo Sapiens
gcacgaggcttttatttacctacccaagttccttttacatgtgagttatctgcattccaccttgccccctctcccaggatgaatcctcttggcacagaggaaggggtgccccttcaactagggccagagcctagatgacctggtggatcccccaccatgaaaaaagcaggaagggaatggagaagaaaagtgttgatcacacctagccctcaccacaggagggggaatgaagaggtctgggggactgcccccatgctatgccccagtccttaaatacaaagcaaggagaatgaaaaggaccctccctctgaaatacagcaccgacctcagcatggaggcaaaaggacagtgggcaagaccacgtccctccgaagggagagggctgaaggagagcacataccgttagtggctgcggcacccctccctaccagggtctgatgcagcctcagcaccgggagtggggagaggggaggagaagg

SEQ ID NO: 19447 - DNA, 886 bp, Homo Sapiens
ctcaatagcagtcacagctttaatactacacatttctgcccaaacttgctcctgaaatgcttcacaattgtccttttcattttgaatatgtttaatttccaaatttataagtaagggctgctgtaattgagattttatctgatttaaaacatgtaaggaagtttctagtttgtcctgacaattcttttcatccaattcttttggtgagagttctaataccatgttttggagaactttgtataacttatcattttcttctgcattcagctttatttgtagtatttctttctccttgaatgagtcatcaaaggtcttattttcatttaatttctttattatctcatcacataaacacttggctttctcaattctctgacttaaaatttgggcattgagccgtctgctttccggagagctatcaggagcttttagtactacttcagtcattttcttaatttgcaaatcaatagctctcattttacttaataatgcctgatatttgccatgttcttcctcaaatgtgtccaactgcttaattttttcttcaagttccttttctttttcaaatacttgggtttgtaattggtcaagttgtgaaaaatcccagtttagtccaatatagtcaaacacttttttaagtttcaatacctgtaagatgcaacacttaatagcggtgagtctgtctttaagattatagatctcctctttaacaccctttatttacttcttgattaagtaatagttcattgcgctgtatactgtcagcctcctcctgagcgctgatgttttttcatggaattgtctgcaaactttacctttgtgttcacttcattacatgtattctgaatgaatctttgtattctgttggttctaatcttaagatttt

SEQ ID NO: 19448 - DNA, 1643 bp, Homo Sapiens
gcacgaggcccgccttccatacctccccggctccgctcggttcctggccaccccgcagcccctgcccaggtgccatggccgcattgtaccgccctggcctgcggcttaactggcatgggctgagccccttgggctggccatcatgccgtagcatccagaccctgcgagtgcttagtggagatctgggccagcttcccactggcattcgagattttgtagagcacagtgcccgcctgtgccaaccagagggcatccacatctgtgatggaactgaggctgagaatactgccacactgaccctgctggagcagcagggcctcatccgaaagctccccaagtacaataactgctggctggcccgcacagaccccaaggatgtggcacgagtagagagcaagacggtgattgtaactccttctcagcgggacacggtaccactcccgcctggtggggcccgtgggcagctgggcaactggatgtccccagctgatttccagcgagctgtggatgagaggtttccaggctgcatgcagggccgcaccatgtatgtgcttccattcagcatgggtcctgtgggctccccgctgtcccgcatcggggtgcagctcactgactcagcctatgtggtggcaagcatgcgtattatgacccgactggggacacctgtgcttcaggccctgggagatggtgactttgtcaagtgtctgcactccgtgggccagcccctgacaggacaaggggagccagtgagccagtggccgtgcaacccagagaaaaccctgattggccacgtgcccgaccagcgggagatcatctccttcggcagcggctatggtggcaactccctgctgggcaagaagtgctttgccctacgcatcgcctctcggctggcccgggatgagggctggctggcagagcacatgctgatcctgggcatcaccagccctgcagggaagaagcgctatgtggcagccgccttccctagtgcctgtggcaagaccaacctggctatgatgcggcctgcactgccaggctggaaagtggagtgtgtgggggatgatattgcttggatgaggtttgacagtgaaggtcgactccgggccatcaaccctgagaacggcttctttggggttgcccctggtacctctgccaccaccaatcccaacgccatggctacaatccagagtaacactatttttaccaatgtggctgagaccagtgatggtggcgtgtactgggagggcattgaccagcctcttccacctggtgttactgtgacctcctggctgggcaaaccctggaaacctggtgacaaggagccctgtgcacatcccaactctcgattttgtgccccggctcgccagtgccccatcatggacccagcctgggaggccccagagggtgtccccattgacgccatcatctttggtggccgcagacccaaaggggtacccctggtatacgaggccttcaactggcgtcatggggtgtttgtgggcagcgccatgcgctctgagtccactgctgcagcagaacacaaagggaagatcatcatgcacgacccatttgccatgcggcccttttttggttacaacttcgggcactacctggacactggctgagcatggaagggcgcaaggggg

SEQ ID NO: 19449 - DNA, 1242 bp, Homo Sapiens
gcacgagggtttggcctgcctcagcagcaccagttgactgctcgtgtgccagcggtgtggggaggacggggcaggacgctgcagctctctccagccctgttggcatcctcagtgcctgcaggcctctcgctgcctgttgggctgtctggggggtggccatttagggatcgtggggacggggtccaccccaagaagaaagaaaggcccgtccacaggcccggctctgggccacgtgccccggaagcaggtgtgtccagagtcagctgagggctctccccacaccacccagcaggcgctggtgctccttctgcctcatgggaccagtccagcttccagccgctctggctcgagggtggtctgagcacttccttctgagtgggcttctctgggagctctccagtggcactgctggacctgcccacgtttctgtaaaatcaggatacgtggctttagtaagcagaccaagcgcttcgtggcagggaaagcagcgtgtggggaagtcactgaaaagtgctgcctaaggaagtttggaaatagtccccgttccagattgccttgaattttaaaacattttgctttgggaaagtaggtcagcagcacctaagatcaaggatgcgttccattttcacacttcacagtcatgaaaactgagaagactgtcttcagcgtgaactaaagttcacaggcagatcactgatccagaacacttcaagaactcgtcaaacagctcgataagcctttttgactgtgtacatctgtaccgggaataacattcctaggctgaaatttccacaaagaatagaacctgtacccagttcttcaggctgatttccctgacctcttgggcatttgtatttgtagtaaagtattgcagagattcctaagtattttatagcagccatcaaaattggactttgtattgtttattcataaaagacacttggtaatagacttcagtgaactctgtatgaatgcagtagtgtgcgtgcaaaatccgcttcctgagcgtagggtgctgagctggcgctagggctcggttgtgaaatacagcgtagtcagcccttgcgctcagtgtagaaacccacgtctgtaaggtcggtcttcgtccatctgcttttttctgaaatacactaagagcagccacaaaactgtaacctcaaggaaaccataaagcttggagtgccttaatttttaaccagtttccaataaaaccctcgtgccgaattcctgcagcccggggga

SEQ ID NO: 19450 - DNA, 875 bp, Homo Sapiens
gcacgaggctttgctctttggggctgggctggtcgttctgaatctagtgacgtctgccaggagccagaagacagaacctctaagtggctctggggaccagccactcttccgtggagctgatcgatatgactttgccatcatgatacctccaggaggcacggaatgcttttggcaatttgcccaccagactggatacttctatttcagttacgaggttcagcggacagtggggatgtcacatgaccggcatgttgctgccacggcacataacccacagggatttctcatagacacctcccagggtgttcggggccagattaacttctctacccaagagacaggtttttatcagctttgtctaagtaatcagcataatcacttcggttctgtgcaagtgtacctcaactttggggtcttctatgaggggcctgagactgatcacaaacagaaggaaagaaaacaactgaatgatactctggatgcaattgaggacggcacacaaaaggtgcagaacaatatctttcacatgtggcgatactacaactttgcccggatgaggaaaatggctgactttttccttatccaatcaaactataactacgtgaactggtggtcgacagcccagagccttgttattattctttctgggatcctgcaactgtatttcttgaagcgtctcttcaatgttccaccaactacagatacaaagaagccaagatgctaagctaaggtgactatagcaccctggctgttttcttctggggcttagtcgaatcagctttgtaatgttatgggacaaaaatcaaattatctcattattgtttaagtctgctgcacactctaaaaaagcaaatggcaattaaatcataccagtg

SEQ ID NO: 19451 - DNA, 790 bp, Homo Sapiens
gcacgaggcactcttcagtttgggagctgggtctgtggctttgatcagaaggtactttcaaaagagggctttccagggctcagctcccaaccagctgttaggaccccacccttttgcctttattgtcgacgtgactcaccagacgtcggggagagagagcagtcagaccgagctttctgctaacatggggaggtagcaggcactggcatagcacggtagtggtttggggaggtttccgcaggtctgctccccacccctgcctcggaagaataaagagaatgtagttccctactcaggctttcgtagtgattagcttactaaggaactgaaaatgggccccttgtacaagctgagctgccccggagggagggaggagttccctgggcttctggcacctgtttctaggcctaaccattagtacttactgtgcagggaaccaaaccaaggtctgagaaatgcggacaccccgagcgagcaccccaaagtgcacaaagctgagtaaaaagctgcccccttcaaacagaactagactcagttttcaattccatcctaaaactccttttaaccaagcttagcttctcaaaggcctaaccaagccttggcaccgccagatcctttctgtaggctaattcctcttgcccaacggcatatggagtgtccttattgctaaaaaggattccgtctccttcaaagaagttttatttttggtccagagtacttgttttcccgatgtgtccagccagctccgcagcagcttttcaaaatgcactatgcctgattgctgatcgtg

SEQ ID NO: 19452 - DNA, 1726 bp, Homo Sapiens
gcacgaggcagaagttggccctgctgctccagccatggccccagctccagcctcggccccagctccagcctcggccccagctccagccccggtccccaccccagccatggtctcagccccgtcatccactgtgaatgccagtgcttctgttaagacttctgcaggcaccaccgacccagaggaggccacaaggcttctagctgagaagaggcggctggcccgagagcagagagaaaaggaagaaagggagaggagggagcaggaagagcttgaaagacaaaagagagaggaattggctcaacgtgtggctgaagagaggacgactcgccgtgaggaggagtcgcgcaggctggaagccgagcaggcccgggagaaggaggagcagctgcagcggcaggcggaggagcgggcgctgcgcgagtgggaggaggcagagcgcgcccagaggcagaaagaagaagaagctcgcgttcgtgaagaagcagagagggtccggcaggaacgagagaagcatttccagagagaagagcaagagcgcctggagagaaagaagcgacttgaggagattatgaaaagaaccaggagaacagaagctacagataagaaaaccagtgatcagagaaacggtgatatagccaagggagctctcactggaggaacagaggtgtctgcacttccatgtacaacaaacgctccgggaaatggaaagccagttggcagcccacatgtggttacctcacaccagtcaaaagtgacagtggagagcactcccgatttggaaaaacaaccaaatgaaaatggtgtatctgttcagaatgaaaattttgaagaaattataaacttacccattggatctaaaccatccagattagatgtcaccaacagtgagagcccagaaattcctttgaatccaattttggcctttgatgatgaagggacacttgggcccctgcctcaggtagatggtgttcagacacagcagactgcagaagttatatgagtgtttcttctgaagaaccaaagctgaaatttaatgagaatttctacaattaatggaattcctttcctgctataaaggagcatcccctccacccgttttctagagttcttgaccatcattttgaaaagatttattaaaactagctaaagacaacagactggatagcttttctaataattttcatcaataggaaaaaagaaatacgtctcattcttcaatactttaaaatggctttttccagtgtgctccttcttagcaatcaatatttttctgcattctttaaaagacaagagaatttggttataaaagaaatgggctgactaggcatgatttttttggtcttaaaagcttaacatgtaaaattggcaaaaaaattttttaccttttataatacttgaaaaataagtacctctttgttctacaagtagaatgaataggagaagagtttaagcctgtttttttaaaatattattgcaaagagctctatttgtagaagcaaattataggcagattaccaggttctataaatacagcttgtacatggacattctgcaaacccagctgtcacatttttcttgcaactccttttgcaaaagcagactaaaatgttttaaatgtgaaaaaacattattttttcaaagcaagaaaataatttactgccctcttacataatgtattttaaagtttttccagataactaattcaataaattagaataatgtgaca

SEQ ID NO: 19453 - DNA, 909 bp, Homo Sapiens
gcacgaggggaaaacaatggaaaggacaattcaccacagtccgaaaaagtggccagtgttcgggctgtggaaaaaccatagagtctattcagctgagtccagaagaatatgaatgtcttaagggaaaaatcatgagggatgtgatagatggaggtgaccagtacagaaagacaacacctcaggaacttaagagatttgagaacttcataaaatctcgtcctccttttgatgttgtcattgatggtctcaatgttgccaaaatgtttcctaaagttcgtgaatctcaacttctcttgaatgtcgtctctcaactagccaaacggagtctgcgactgctggtcctaggccggaagcacatgctaagacggagttcccagtggagtcgggatgagatggaagaggtgcaaaagcaagccagctgtttttttgctgatgacatctcggaggatgatccattccttctgtatgccacactgcactccgggaatcactgcaggtttatcacaagagacctgatgcgggaccacaaggcctgtctgcctgatgccaagacccaacgcctgttttttaagtggcagcagggacatcagctggcaattgtaaataggtttccaggatcaaaactaacctttcagcgtattctcagctatgacacagtggtgcaaacaactggagactcgtggcacataccatatgatgaagacttggtagaaagatgttcctgtgaagtaccaaccaaatggctttgcctccaccaaaagacatagagattcttacctctatgctaagtttgtgtttgggtaccctctaggttggcatcagaggctcttgagctggtgtttgtttagggcattgcctctgtcctgaataaaaaggattctattaacagcattgacattgattttttaa

SEQ ID NO: 19454 - DNA, 833 bp, Homo Sapiens
gacagaggtcacaacgcctatttattccccacacgtcacgccctgcaccccgggtgggcttggcacacacctcaccgccatgagcggctgcagggccgcggcggcccccgttcctactgctacctacgatacacggtactgcgcctacctcacagacggccaggagccagggagccccaggatgctccgactgacaaccctgctgctgggaccacggcgccgtgggctcgtctgccacccccaggcctcaggaacccagacaggctgcctgctgtccggctctccggctgctttcctggtggctgttttagggccaaggtgggtggcacctgaggtgtcccgtggcctccacccagcacaggaggggtaagcttccctggggggccccgggcccatgaaacatccaggacagaaggacagcaggatgggacacagacagaaacggcccagctgccttccctgtgcccggggctaaggcggccgggacagaaggtcatgatgtcgcccctggctctcagtcgcgaggaccagaaaatgagggtgggaggaggggaaacatgtctgtcaacatgcccaactggagaaaagtcacagaaactggtcctatgcacccaggacggctcctgagccgcggaggcgtggggtgaccgcagccgtctcttaagtgtctgccactaaaagagttcctcatgcaaacacacatggcccgcggtgcccaggccgcagctgggagtgagctcttccgagcaagcacagggcccgggtggccgggaaggtcgactcggaagaggcttctcacagacgggagagttcctgcagacagaccacgggat

SEQ ID NO: 19455 - DNA, 882 bp, Homo Sapiens
gcacgaggctcttcttgaggcatcattctcggacctccaacagcacaggagcggaggtggtcctctatcatctaccacgagaaggtgcctgtaaaaagatgcacatattgaagttaaataggacgggaaagtttgccctgaacgtggtggacaacctggtagtcgtgcatcatcaggatacagagacatcggtaatattcgatatcaagttacggggagagtttgacggctccgttaccttccaccaccccgtgcttcctgctcgatcgatccagccctatcagatccccatcacaggtcctgctgccgtgaccagccagtctcctgttccatgtaaactctattcttcatcttggattgtctttcaacctgacatcattatcagcgcaagccaaggttacctctggaacctccaagtgaaacttgagcccatagtaaatctcttaccagacaaaggaagactcatggactttctcctccagagaaaggaatgcaagatggtcatcctgtctgtctgttcacagatgttaagtgagtcagacagagcatcgctgcccgtgatagccactgtttttgataaactcaaccatgagtataaaaagtacctggatgccgagcagagttatgcgatggcggtggaagcagggcagagccgaagcagcccgctcctcaagaggccggtgcggacccaggcggtgctggacagtcagatgtgtacacccatgtcctgtcagccttcgtggaaaagaaggagatgcctcataaatttgtgatagccgtgctgatggaatacattcgttctctttaaccagtttcagattgcagtacagcattacctacatgactttggttatcaaacccttgtccagcacaactctttta

SEQ ID NO: 19456 - DNA, 914 bp, Homo Sapiens
ggctgcaggaattcggcacgaggctgacatatgagggttgggcgagacatccgagcctgtttcgttccgtgttgggaccaggaataaccctgacttctgagctttcataaccccaggatcctccagaaaatttgcggcgcgctgagggaaaaccttgctgaagctgtacattggaatgcgtttacagtcattgtaatggaagcaaaatacatgaaggaaaaactgttatttgtatccctgcttattgcacctgacgactagttgcagatggttttgtttacctaagaaaacttgtgatataaatgaaaaaaacacctgttttcctagagtcattggttacaaatatgcttcgtctaagagctatttgtccattctcctggagagtgtttcaatttcgacccatcagttgtgaaccactaattattcagatgaataagtgtacagatgaggagcaaatgtttggttttattgaaagaaacaaagccatactttcagaaaagcaagtgggatgtgcatttgatatgctttggaagcttcaaaagcagaagaccagcctgttaaaaaatgctgagtatgtcagagaccatcctcaatttcttactcttcataatttagctacaaataaattcaaattaatgaatgacgataccctggtgaatgtgttatacgtcacacaacagtttgctggtgaggcccatgacccgctagttgaagcactagttacagaagcatggagaaggctagaaaggtttgatattaaactgctctcagaattttcctcttgcctagcagatcagcatttgtattttagtccattaatgggaaaaatagctgatattgttcataggaacttggaaaccacacaggacttaagttccttgtctgtcttgatggtcaacatatcttctttaata

SEQ ID NO: 19457 - DNA, 1467 bp, Homo Sapiens
gcacgaggctggtgccgtggtcataatcgtgcgagcgccgcgttgtcgcgagctaccggcgcagaagtggtggcacacgggcgccctctaccgcatcggcgaccttcaggccttccagggccacggcgcgggcaacctggcgggtctgaaggggcgtctcgattacctgagctctctgaaggtgaagggccttgtgctgggtccaattcacaagaaccagaaggatgatgtcgctcagactgacttgctgcagatcgaccccaattttggctccaaggaagattttgacagtctcttgcaatcggctaaaaaaaagagcatccgtgtcattctggaccttactcccaactaccggggtgagaactcgtggttctccactcaggttgacactgtggccaccaaggtgaaggatgctctggagttttggctgcaagctggcgtggatgggttccaggttcgggacatagagaatctgaaggatgcatcctcattcttggctgagtggcaaaatatcaccaagggcttcagtgaagacaggctcttgattgcggggactaactcctccgaccttcagcagatcctgagcctactcgaatccaacaaagacttgctgttgactagctcatacctgtctgattctggttctactggggagcatacaaaatccctagtcacacagtatttgaatgccactggcaatcgctggtgcagctggagtttgtctcagcaaggctcctgacttccttcttgccggctcaacttctccgactctaccagctgatgctcttcaccctgccagggacccctgttttcagctacggggatgagattggcctggatgcagctgcccttcctggacagcctatggaggctccagtcatgctgtgggatgagtccagcttccctgacatcccaggggctgtaagtgccaacatgactgtgaagggccagagtgaagaccctggctccctcctttccttgttccggcggctgagtgaccagcggagtaaggagcgctccctactgcatggggacttccacgcgttctccgctgggcctggactcttctcctatatccgccactgggaccagaatgagcgttttctggtagtgcttaactttggggatgtgggcctctcggctggactgcaggcctccgacctgcctgccagcgccagcctgccagccaaggctgacctcctgctcagcacccagccaggccgtgaggagggctcccctcttgagctggaacgcctgaaactggagcctcacgaagggctgctgctccgcttcccctacgcggcctgacttcagcctgacatggacccactacccttctcctttccttcccaggccctttggcttctgatttttctcttttttaaaaacaaacaaacaaactgttgcagattatgagtgaacccccaaatagggtgttttctgccttcaaataaaagtcacccctgc

SEQ ID NO: 19458 - DNA, 2137 bp, Homo Sapiens
  misc_feature (1962)..(2001): n is a, c, g, or t
gcacgaggcgcaacgctcgaccccaggattcccccggctcgcctgcccgccatggccgacaaggaagcagccttcgacgacgcagtggaagaacgagtgatcaacgaggaatacaaaatatggaaaaagaacaccccttttctttatgatttggtgatgacccatgctctggagtggcccagcctaactgcccagtggcttccagatgtaaccagaccagaagggaaagatttcagcattcatcgacttgtcctggggacacacacatcggatgaacaaaaccatcttgttatagccagtgtgcagctccctaatgatgatgctcagtttgatgcgtcacactacgacagtgagaaaggagaatttggaggttttggttcagttagtggaaaaattgaaatagaaatcaagatcaaccatgaaggagaagtaaacagggcccgttatatgccccagaacccttgtatcatcgcaacaaagactccttccagtgatgttcttgtctttgactatacaaaacatccttctaaaccagatccttctggagagtgcaacccagacttgcgtctccgtggacatcagaaggaaggctatgggctttcttggaacccaaatctcagtgggcacttacttagtgcttcagatgaccataccatctgcctgtgggacatcagtgccgttccaaaggagggaaaagtggtagatgcgaagaccatctttacagggcatacggcagtagtagaagatgtttcctggcatctactccatgagtctctgtttgggtcagttgctgatgatcagaaacttatgatttgggatactcgttcaaacaatacttccaaaccaagccactcagttgatgctcacactgctgaagtgaactgcctttctttcaatccttatagtgagttcattcttgccacaggatcagctgacaagactgttgccttgtgggatctgagaaatctgaaacttaagttgcattcctttgagtcacataaggatgaaatattccaggttcagtggtcacctcacaatgagactattttagcttccagtggtactgatcgcagactgaatgtctgggatttaagtaaaattggagaggaacaatccccagaagatgcagaagacgggccaccagagttgttgtttattcatggtggtcatactgccaagatatctgatttctcctggaatcccaatgaaccttgggtgatttgttctgtatcagaagacaatatcatgcaagtgtggcaaatggcagagaacatttataatgatgaagaccctgaaggaagcgtggatccagaaggacaagggtcctagatatgtctttacttgttgtgattttagactccccttttttcttctcaaccctgagagtgatttaacactggttttgagacagactttattcagctatccctctatataataggtaccaccgataatgctattagcccaaaccgtgggtgttttctaaatattaataggggggcttgattcaacaaagccacagacttaacgttgaaattttcttcaggaattttctagtaacccaggtctaaagtagctacagaaaggggaatattatgtgtgattatttttcttcttatgctatatccccaagtttttcagactcatttaagtaaaggctagagtgagtaaggaatagagccaaatgaggtaggtgtctgagccatgaagtataaatactgaaagatgtcacttttattcaggaaatagggggagattcaagtcgtatagattcctactcgaaaatcttgacacctgactttccaggatgcacattttcatacgtagaccagtttcctcttggtttcttcagttaagtcaaacaacacgttcctctttccccatatattcatatatttttgctcgttagtgtatttcttgagctgttttcatgttgtttatttcctgtctgtgaaatggtgnnnnnnnnnnnnnnnnnnnnnnnnnnnnnnnnnnnnnnnnaacttgggaccaccaagttgtaaagatgtatgtttttacctgacagttataccacaggtagactgtcaagttgagaagagtgaatcaataacttgtatttgttttaaaaattaaattaatccttgataagagttgc

SEQ ID NO: 19459 - DNA, 1306 bp, Homo Sapiens
gcacgagggtttgaagcatgacaaaataaaattgataggacatttcatttcttacttagtcttctcaatggggttataaaaatacaatgccacttagtttttgtaagctcttgaaaatgtccagaagctcacacttagtatgatattaaaaggcacttataacacacaataagatacttagaaacccatctcatagatacaattgaaatttctttgagaaaaatttctaaatatagaaataaataggacggcactatttcttcttttccaaaacacagaatagcattttccccatgttacctatacacaccataaatgtggacacctcctcccatttttgttcttgatacaggttgataatcaagctgaaattaatttgcttgcttttcttcaatttaatctcaatttggtttaaaataaagcaaaattcttaatttgtatccaggatcttttagaatacctggcttattttcattttgttttaaatcacaattcattaaataggaagatgatgatgcaaaaattttaaaaagtacttactatttagctgcccaaatcaccctaagcaacaatatttctgaagcatgtgtacatacatgtgtgtatatttttaaatatcacttttgtatcactctgactttttagcatactgaaaacacactaacataatttttgtgaaccatgatcagatacaacccaaatcattcatctagcacattcatctgtgatagaaagataggtgagtttcatttccttcaggttggccaatggataaacaaagtacgccataaattaactaaaaaacccactgccctatgctatatctgtgctattgttaattaaaataagtgtattcttgctgtggaaattctgtggtctgggaatttttatttgttcattctttcaaggcattagtaagaaaggataatttctattttgaacagaaagacatacaactagtcagatcaataactcattattggcatataggatgctattttggaggtaagtgaattatttcaccccatgactgtctgaatatggtcaatctgaaatgacttaacagtgaaatccagagatctggttactttcctggcaggatttggcctataaatgaaaatggacatttaaaataatatggggaaaatacagagttgcttgaatgcttatcactttattactgcaatcataaatgatagtaatttaaattagtccttcacattgatatgtgtttaaattagtccttaggtatgccttttctgccttttgttctgttgctcacccttttaagaaatgcccctcgtgc

SEQ ID NO: 19460 - DNA, 1254 bp, Homo Sapiens
gcacgaggcgatttctttctccaggaagaaaaatggcatccgttgcagttgatccacaaccgagtgtggtgactcgggtggtcaacctgcccttggtgagctccacgtatgacctcatgtcctcagcctatctcagtacaaaggaccagtatccctacctgaagtctgtgtgtgagatggcagagaacggtgtgaagaccatcacctccgtggccatgaccagtgctctgcccatcatccagaagctagagccgcaaattgcagttgccaatacctatgcctgtaaggggctagacaggattgaggagagactgcctattctgaatcagccatcaactcagattgttgccaatgccaaaggcgctgtgactggggcaaaagatgctgtgacgactactgtgactggggccaaggattctgtggccagcacgatcacaggggtgatggacaagaccaaaggggcagtgactggcagtgtggagaagaccaagtctgtggtcagtggcagcattaacacagtcttggggagtcggatgatgcagctcgtgagcagtggcgtagaaaatgcactcaccaaatcagagctgttggtagaacagtacctccctctcactgaggaagaactagaaaaagaagcaaaaaaagttgaaggatttgatctggttcagaagccaagttattatgttagactgggatccctgtctaccaagcttcactcccgtgcctaccagcaggctctcagcagggttaaagaagctaagcaaaaaagccaacagaccatttctcagctccattctactgttcacctgattgaatttgccaggaagaatgtgtatagtgccaatcagaaaattcaggatgctcaggataagctctacctctcatgggtagagtggaaaaggagcattggatatgatgatactgatgagtcccactgtgctgagcacattgagtcacgtactcttgcaattgcccgcaacctgactcagcagctccagaccacgtgccacaccctcctgtccaacatccaaggtgtaccacagaacatccaagatcaagccaagcacatgggggtgatggcaggcgacatctactcagtgttccgcaatgctgcctcctttaaagaagtgtctgacagcctcctcacttctagcaaggggcagctgcagaaaatgaaggaatctttagatgacgtgatggattatcttgttaacaacacgcccctcaactggctggtaggtcccttttatcctc

SEQ ID NO: 19461 - DNA, 429 bp, Homo Sapiens
gcacgaggcctcagggctgtgcggccccgagccaggtactacgtccaagtggcggctcaggacctcacagactacggggaactgagtgactggagtctccccgccactgccacaatgagcctgggcaagtagcaagggcttcccgctgcctccagacagcacctgggtcctcgccaccctaagccccgggacacctgttggagggcggatgggatctgcctagcctgggctggagtccttgctttgctgctgctgagctgccgggcaacctcagatgaccgacttttccctttgagcctcagtttctctagctgagaaatggagatgtactactctctcctttacctttacctttaccacagtgcagggctgactgaactgtcactgtgagatattttttattgtttaattagaaaagaattgttgttg

SEQ ID NO: 19462 - DNA, 1206 bp, Homo Sapiens
gcacgaggagcatttacaggcaatgtacagcaacagaggtacctcttggtgtatagtatttacattctcttttaggtagaagaggcaattttacccttatttcacatggttagaaatttaaagcaagatcatttacccaaggataggtgtttggtaatgttgaaggagttagtctggcttcatgttttacatcttcaactaaaatcccatactatctgcttggatttggagagccaaaaaataaagctgattgtcatgtgattaaatatctgatcaacaggtatgaatataacttaaatcagcatatttttgccatggtaataaattgtcctataaactatttatatatttttgttcttcataattatcactaataagcatcagtttgttgtttttaaaaggatatttaagtgagcattttctagttcatatgaaaataaccatagtacaggatgatttctgtccacacaaaggttaaattagattgcacagttaattttcacttatatttatggtactattatgtgggtgatgcctttttcttttaagcccagtacatatattatgcctgcctaagttctgaactggggctgtatttcagtagttgtagaattattgatatttagttttgatagctaatgtttaattgtttggatctgcacagtttggtttttgcacaaaagtcatttaaaaaaatctgagtaattgtcaaatattaaaagaaagatattcttcctgtaaggaatacagtttttagtcaaagtggccattacatcctctttttaatttacataatacagatacttgagaaagttgttgtggtgttgtatgccaagaaaattctttttattggtgcctatattgtaacaattatttttaatgcattgtattttgaagtaacggttcagttaaatttttcacctgctgtgtaactgaaacacaattacagtttataatcatctgtagaagtctggagataattttgcaactcatgttatgggttaaatgaatatttttgtaaaagtaaaagcaacaaatttataaattgattatttgaaactttacaacacaattgcatcccaaatacaaattgtattgcttattcattatagctattcgtcctgtaatctgtttctaggtgaagcatactccagtgttttaggggttttgaaaataaatattagagagattcctcgtgccgaattc

SEQ ID NO: 19463 - DNA, 815 bp, Homo Sapiens
gcacgaggttttaacttaacctttgtgaatacttcacaaaaatacacatacagaagtaaataaaactatacagttgaactaaatatccagcagatacaacaagtagtcagaagttcaaagatggataagttaggcagctgatgaggttgtctgcataatcaaaggggtagcacaaataatgaacaaataacttttaacaaaagcattctagttaacataaaagaaattggtagtctataaaatggttgaatgggtaacatgcattgatcaatacaacaaccaataatatttactgaattcaaactatttacttgtaaacgtttaacaaagcattatgagatctaaatacagtctttgacaatttcaacaaaataagtcgtatgtttaaaaaataaagctgatgagcaatagatcattctatatattttctttcaacagttccagcaagagaaatagcagagtattttttaaaagtatacagcaaagattgttcctattataatgacaaactctggaaactgtaaatacaaataatcattgaacagtcaaatggtcatattcctaatcaggaagtagttacagtaagaacagtctgcaatccagtttatacacaattgtcaataagaatgtgtttcttgtcagttgatttcatagttctttctctaagagacagcaaaactttggcaactgggtgtactgaaaatatatttttgaaagttcgagatatcaagatacagtcatagcatttcgttttgtgaaaggtggtctgtaccccaaggctcagaggttgttaaagattgattccatgtggaaat

SEQ ID NO: 19464 - DNA, 1563 bp, Homo Sapiens
  misc_feature (1364)..(1396): n is a, c, g, or t
gcacgaggctggcattgtcattctcagcatgataattgcattgattgtcacagcaagatcaaataacaaaacgaagcatattgaagaagagaacttgattgacgaagactttcaaaatctaaaactgcggtcgacaggcttcaccaatcttggagcagaagggagcgtctttcctaaggtcaggataacggcctccagagacagccagatgcaaaatccctattcaagacacagcagcatgccccgccctgactattagaatcataagaatgtggaacccgccatggcccccaaccaatgtacaagctattatttagagtgtttagaaagactgatggagaagtgagcaccagtaaagatctggcctccggggtttttcttccatctgacatctgccagcctctctgaatggaagttgtgaatgtttgcaacgaatccagctcacttgctaaataagaatctatgacattaaatgtagtagatgctattagcgcttgtcagagaggtggttttcttcaatcagtacaaagtactgagacaatggttagggttgttttcttaattcttttcctggtagggcaacaagaaccatttccaatctagaggaaagctccccagcattgcttgctcctgggcaaacattgctcttgagttaagtgacctaattcccctgggagacatacgcatcaactgtggaggtccgaggggatgagaagggatacccaccatctttcaagggtcacaagctcactctctgacaagtcagaatagggacactgcttctatccctccaatggagagattctggcaacctttgaacagcccagagcttgcaacctagcctcacccaagaagactggaaagagacatatctctcagctttttcaggaggcgtgcctgggaatccaggaactttttgatgctaattagaaggcctggactaaaaatgtccactatggggtgcactctacagtttttgaaatgctaggaggcagaaggggcagagagtaaaaaacatgacctggtagaaggaagagaggcaaaggaaactgggtggggaggatcaattagagaggaggcacctgggatccaccttcttccttaggtcccctcctccatcagcaaaggagcacttctctaatcatgccctcccgaagactggctgggagaaggtttaaaaacaaaaaatccaggagtaagagccttaggtcagtttgaaattggagacaaactgtctggcaaagggtgcgagagggagcttgtgctcaggagtccagccgcccagcctcggggtgtaggtttctgaggtgtgccattggggcctcagccttctctggtgacagaggctcagctgtggccaccannnnnnnnnnnnnnnnnnnnnnnnnnnnnnnnnaatgggggcaaccacatccagtacaagcttttacaaatgttattagtgtccttttttatttctaatgccttgtcctcttaaaagttattttatttgttattattatttgttcttgactgttaattgtgaatggtaatgcaataaagtgcctttgttagatggaaaaa

SEQ ID NO: 19465 - DNA, 895 bp, Homo Sapiens
gcacgaggaagacatctgggtcagagaaaaagtatttaagggccatgcaagccaatcgtagccaactgcacagtcctccaggaactggaagcagtgaggatgcctcaacccctcagtgtgtccacacaagattgacaggagagggttcttgccctcattctggagatgttcatatccagataaactccatacctaaagaatgtgcagaaaatgcaagctccagaaatataaggtcaggtgtccatagctgtgcccatggatgtgtacacagtcgcttacggggtcactcccacagtgaagcaaggctgactgatgatactgccgcagaatctggagatcatggtagtagctccttctcagaattccgctatctcttcaagtggctgcaaaaaagtcttccatatattttgattctgagcgtcaaacttgttatgcagcatataacaggaatttctcttggaattgggctgctaacaacttttatgtatgcaaacaaaagcattgtaaatcaggtttttctaagacttaatttttttaaatcctactttggaccatttgagcttctgggaagtattttggattgttggaattacagacttcattctgaaattctttttcatgggcttaaaatgccttattttattggtgccttctttcatcatgccttttaaatctaagggttactggtatatgcttttagaagaattgtgtcaatactaccgaacttttgttcccataccagtttggtttcgctaccttataagctatggggagtttggtaacgtaactagatgggagtcttgggatactgctggctttactctacctcatattaaaacttttggaattttttgggcatctgagaactttcagacagggtttacgaataattttt

SEQ ID NO: 19466 - DNA, 902 bp, Homo Sapiens
gcacgaggcgaaggcttctgtgagatagaccggcagacgctggagatcattgtcactcgggaggccctcaacaccaaagaggcggtggtcttcgaggccgtcctgaactgggccgaggcggagtgcaagaggcaggggctgccaatcaccccacgaaacaagaggcatgttctggggcgagccctctatctggtccgaattccaaccatgaccctagaggagtttgccaacggcgctgcccagtcagacatcctgactctggaggagacccacagcatcttcctgtggtacacggccaccaacaagccccgcctggactttcccctgaccaagaggaagggcctcgccccgcagaggtgccaccgattccagtcttctgcctaccgcagcaaccagtggcggtaccgcgggcgctgcgacagcatccagtttgcagtggacagaagggtatttattgcagggctgggcctgtatggctccagctctgggaaggctgagtacagcgtgaagattgagctcaagcggctcggggtggttctggctcagaacttgaccaagttcatgtcagacggatccagtaacaccttcccggtctggtttgaacacccggtccaggttgaacaagacaccttctacacggccagtgccgtcctggacggcagcgaactcagctactttgggcaggaggggatgacggaagtgcagtgtggaaaggtggccttccagttccagtgctcctcggacagcaccaacgggactggggtccagggtgggcagatccctgagctcattttctatgcctgaggtgcccggggaggctgcagcaggtcagcgagtgagtgaaggggaagtcaagatgctaactgcttcttgacaccatgaaaggctgctcttaactttgt

SEQ ID NO: 19467 - DNA, 974 bp, Homo Sapiens
gcacgaggggacaaactaggccagtggttttcaaactgcttggcagagccctgaagtttcctaggggttgcctcaggagtccttggggagatgaagggggtggggagctgagcaggctgggcaatttgccctcaaacagaacagctccccttgtagctgtcttacatattggggttcagggtaagattttatttgcattaaggggtttgctgctgaaaaaaagttggaaaaccactgactagaccatcggctccaaattggagtctgtgcttccttccccaggtatggagcacactcttcaccctaccctctaccacaggacacatatccctgttagcattccccgggacctttagccaagaggagctgcagggaccatggccaggttaccaaaatgccctgctctgaagccttgacacctgggtggaaagagaggctgttttctgaaagggtaaagggcttggtctggattcccagaagcatagcttagatgggaccacagtgggcaattttgacctgtcctgcccttcttagcttgaagggaaaccccagagactcttctgtcagggaaaactagggactctcttctagagccatatagttccttgggattagctcttggccaagaaggctgagtatggttcccaatttttaaatccatttcattttttaaaaaataagggaaataaatgtaattgccatttttcaaagattaagtaggaggagaggggtttcttgctctccagagcccaaagggacaaatagggactttgtttagcccaggaaggagcggaagtagggcacctcggtcctgcgattattaatcccactccccacttattctagggcacacaaacactattttacttttttaaaatcataaaacggcagacagatttggttagtttagaagaaaagaaagctctataatataaatctatattcctgtattttatttataatttataaatacc

SEQ ID NO: 19468 - DNA, 398 bp, Homo Sapiens
gcacgaggcctggctgcattttattggatgggtgatggaagtgggtgggagtactatggtaaaggagggatatatgggtgggagccaccaacaaaagtcccccatccccctcccccaacagaaaggagagagacaaccctttcccctcaggtgatctggaattccagggcctctgccagctttgcaggaggtgcacagaagctggatgcttttggtctggtggccatgagctagactctgttgcctttggttgcttttcactccacagcaaacccgcaggtctcctccacggctgtcagcagcttctcgtagagcttctcataggactcatatggtggaatgtcgatccggttaaagctgaaaaaggacaaaagagagtcaccgtgtgggcagtccag

SEQ ID NO: 19469 - DNA, 1039 bp, Homo Sapiens
ggaaaccaggaagcctagcatcccatgtcaaaaacttggatgaaaatggcttggatttgctctcgaaaatgttaatctatgatccagccaaacgaatttctggcaaaatggcactgaatcatccatattttaatgatttggacaatcagattaagaagatgtagctttctgacaaaaagtttccatatgttatgtcaacagatagttgtgtttttattgttaactcttgtctatttttgtcttatatatatttctttgttatcaaacttcagctgtacttcgtcttctaatttcaaaaatataacttaaaaatgtaaatattctatatgaatttaaatataattctgtaaatgtgtgtaggtctcactgtaacaactatttgttactataataaaactataatattgatgtcaggaatcaggaaaaaatttgagttggcttaaatcatctcagtccttatggcagttttattttcctgtagttggaactactaaaatttaggaaaatgctaagttcaagtttcgtaatgctttgaagtatttttatgctctgaatgtttaaatgttctcatcagtttcttgccatgttgttaactatacaacctggctaaagatgaatatttttctactggtattttaatttttgacctaaatgtttaagcattcggaatgagaaaactatacagatttgagaaatgatgctaaatttataggagttttcagtaacttaaaaagctaacatgagagcatgccaaaatttgctaagtcttacaaagatcaagggctgtccgcaacagggaagaacagttttgaaaatttatgaactatcttatttttaggtaggttttgaaagctttttgtctaagtgaattcttatgccttggtcagagtaataactgaaggagttgcttatcttggctttcgagtctgagtttaaaactacacattttgacatagtgtttattagcagccatctaaaaaggctctaatgtatatttaactaaaattactagctttgggaattaaactgtttaacaaat

SEQ ID NO: 19470 - DNA, 1222 bp, Homo Sapiens
gcacgaggcatttcgaagaggatcagcagtagcgacatctcattttgaagttggaaacacatgtccatcagaatttccttctaaaagcatcacctttacttccagaagcaccagccccagaacaagtacaaacttttcacccatgaggccacagcagcccaaccttcagcatctcaagtctagcccacctggatttccatttccagggcctcctaattttcccccacaaagcatgtttggatttccaccacatttgccacctccattacttccccctccaggctttggctttgctcaaaatcccatggttccctggccacctgttgttcatctcccaggtcagccacagcgtatgatgggtcctctctcacaagcatcaaggtatataggcccgcagaatttttaccaggttaaagacattcggaggccagaaaggcgccatagtgacccttggggtaggcaagaccaacagcaactggataggccatttaataggggtaaaggggaccgccagagattttatagtgattcacaccatttgaaaagagagcgacatgaaaaggaatgggagcaagaatctgaaaggcatagacgcagagacagaagccaagacaaggacagagacagaaaaagcagggaggaagggcacaaagataaagagagggcacggttatcacatggtgatcgaggaacagatggaaaagcaagcagagatagtaggaatgtagacaagaagccagataaacctaaaagtgaagactatgagaaggacaaagaacgagagaaaagtaaacacagagaaggagaaaaggacagggataggtaccacaaagatagggaccacactgacagaactaaaagcaaaaggtaaaatttgcaggctgcttcaggattacatttaaataactgttaaaatgttgtatcttgtaaacaaaagaaagattgcctgctaggattgtgccatctttaaaatttttactattggtcatttgcagaacagtaaattctgtgtgttggtacagagtgctctgtaccagtgctcatcatcccttcttcataccaacggtccctagttatagaatttatatttttaaaagttttacattgctgtatattcaagatttgttttattaatatgcaataaaggcttagaattttagttttattccttaattggtaaatatggttaactatggaatatatttacttcctctagtgaatg

SEQ ID NO: 19471 - DNA, 875 bp, Homo Sapiens
ccgcggtggcggccgctctagaaccatttagaatcccccgggctgcaggcctgaacactccttggtggggacccatgcctccaaggctgcccccaatgccagctgtcctggggaaactccccagaactctcggggaaaggcccgagaaccttcggaggaagcctccgggactcctcgccacctgctctgtttctctcccggccccactgccttcaggtatcaggaagagggcaggcccctgtgccccctctccccttcccagggcggccaacaatactccaccatggggcgcttcctttcttctctggaaactaagacattggactgaaggaactggcctgaggggggctgaccgggggcccgtgctgctgggagctctacgcacaagaggccgccggggtcacggacaggaacctcagcccagggtgctggcctttctccttcgcaggagtcccccaaaatccacacagcgactcgagcagccttccactcagccagaggagggtcgggctcccccgcctgctctcggtggtggcgtctggcccttcctgccgtttccaaggcctccggaagcaccaacccagttctcagttacctcctctggccggaaggcctcacgttgtcctccagagctgctctgggcccagggctggctccgtgaccacctgatggacgtgctgggcagcatgggctcccaaggcagcatccccagctgctctcccaccccaccccagctgcccgggcggctgggcccacgagggctctggggacacttcatatgaaaggggcctggcactttgtgattgccacgtgttttcctgttaaccgcctgcccccagtgcaaatctctgttgtttgctctctcctgaacaaaa

SEQ ID NO: 19472 - DNA, 819 bp, Homo Sapiens
aaattaaaaaatgcctttatttttaaaatgtggcttaactacatgcaatgtactgagccagttttggaatccaccctgtatcaaagtaaaactggaccaaaggaagtgaagtcagggctcctggctgtcactcctccagcaactcaatctacagagcatttcttcagctgttttttgtgacgtgtggtgattcgttttggattcctctgtatgacagacaggtccgaccttgaggaagaccggtagcccacgtcttctgcttttatggggttaatgatatggcctggcttggtgacaaccttgggagtagtcagcttttggaaagccctctgggtgttccatgtggatcctatgggggtctggatggtcctttcaaattgccaatggtgggtaaatggatatggaagcactcgtacctgatgagcagctgcgtggatgttgcgcttctcattgataatcacatttggcaaattcttatcttttcttggaggaccctcaggggctttaatgagaaaccggcgtcttttcttggcactgggctttaggcccacaccaccccactcccccccaccaggtagtgtcaggtccacgtcctttggcttactcgcctccacagcttccctcttctctttcaagaaatctctgatgacatcttccccagcaaaagcttccctttatcatctgcctatggtttctctcttcttcatcttccacctcctctattgtggggacctgccaaagacttcacggacggagattgtgtgggtaaggaggttctgtatgtcgatctttgctccttctttttcctctccttaaggg

SEQ ID NO: 19473 - DNA, 1132 bp, Homo Sapiens
gcacgaggcacagcagtcccctcaggatgagcaggaaaagctcttggatgaagccatacaggctgtgaaggtccagtcattccaaatgaagagatgcctggacaaaaacaagcttatggatgctctaaaacatgcttctaatatgcttggtgaactccggacttctatgttatcaccaaagagttactatgaactttatatggccatttctgatgaactgcactacttggaggtctacctgacagatgagtttgctaaaggaaggaaagtggcagatctctacgaacttgtacagtatgctggaaacattatcccaaggctttaccttttgatcacagttggagttgtatatgtcaagtcatttcctcagtccaggaaggatattttgaaagatttggtagaaatgtgccgtggtgtgcaacatcccttgaggggtctgtttcttcgaaattaccttcttcagtgtaccagaaatatcttacctgatgaaggagagccaacagatgaagaaacaactggtgacatcagtgattccatggattttgtactgctcaactttgcagaaatgaacaagctctgggtgcgaatgcagcatcagggacatagccgagatagagaaaaaagagaacgagaaagacaagaactgagaattttagtgggaacaaatttggtgcgcctcagtcagttggaaggtgtaaatgtggaacgttacaaacagattgttttgactggcatattggagcaagttgtaaactgtagggatgctttggctcaagaatatctcatggagtgtattattcaggttttccctgatgaatttcacctccaggactttgaatccttttcttcgggcctgtgctgagttacaccagaatgtaaatgtgaagaacatatcattgctttaattgatagattagctttatttgctcaccgtgaagatggacctggaatcccagcggatattaaactttttgatatattttcacagcaggtggctacagtgatacagtctagaccagacatgccttcagagggatgttgtatctttacaagtctctctgattaatcttgccatgaaatgttaccctgatcgtgtggactatgttgataaagttctagaaaaaacagtgga

SEQ ID NO: 19474 - DNA, 1004 bp, Homo Sapiens
gcacgaggcgcctgtcctgtcgccccagaacctgctgtcttgtgacacccaccagcagcagggctgccgcggtgggcgtctcgatggtgcctggtggttcctgcgtcgccgaggggtggtgtctgaccactgctaccccttctcgggccgtgaacgagacgaggctggccctgcgcccccctgtatgatgcacagccgagccatgggtcggggcaagcgccaggccactgcccactgccccaacagctatgttaataacaatgacatctaccaggtcactcctgtctaccgcctcggctccaacgacaaggagatcatgaaggagctgatggagaatggccctgtccaagccctcatggaggtgcatgaggacttcttcctatacaagggaggcatctacagccacacgccagtgagccttgggaggccagagagataccgccggcatgggacccactcagtcaagatcacaggatggggagaggagacgctgccagatggaaggacgctcaaatactggactgcggccaactcctggggcccagcctggggcgagaggggccacttccgcatcgtgcgcggcgtcaatgagtgcgacatcgagagcttcgtgctgggcgtctggggccgcgtgggcatggaggacatgggtcatcactgaggctgcgggcaccacgcggggtccggcctgggatccaggctaagggccggcggaagaggccccaatggggcggtgaccccagcctcgcccgacagagcccggggcgcaggcgggcgccagggcgctaatcccggcgcgggttccgctgacgcagcgccccgcctgggagccgcgggcaggcgagactggcggagcccccagacctcccagtggggacggggcagggcctggcctgggaagagcacagctgcagatcccaggcctctggcgcccccactcaagactaccaaagccaggacacctcaagtctccagccccactaccccaccccactcctgtattc

SEQ ID NO: 19475 - DNA, 778 bp, Homo Sapiens
gcacgaggcagagtcaataactttattagaaaaagattaatactaaaacttttcaatgacagagacaatcaactttgtaacagaaagtcagagatactttatttttacttctaaatccaaaggctaagtagagcagagttgtaaaaatgaaatcccacttagtctgattcacacgaatactaacgtttaatcctgttttcaaagtccaagattgaaaacttgcaattaaacactgagcaagccacatgtttaagtaatatttcttaaaaagtcttaaagaaaaaagtatgatacaggacctaagttttcagtggcatatatactattaacacatgttctgaaatctggtaggtcacatcagtcctgaattaacttttaataataataataataaaaaaactaactgagctttatactttttctatgccactatagctttctttcacctcattttttaaatgtcgatcttcactttatgccgttctcagtattcttccaaaaatcttcgaacagtagtcctacaacgcaaaatttggggaaaaatgataattagacaacatgtaaaaggccaatttttatgagaaagtgttggcccagtcactaactgctaattaacatgtgtacatggaatgcttgtattctttttaattatcaaggcatcagtgtggttcttaaagccatgtgcctgtgtatgcttgcctaagtgtgaatgacatacacagacataaccttacattgctttcccaaaaggggaatgccaccaacaaatccctcgtgc

SEQ ID NO: 19476 - DNA, 899 bp, Homo Sapiens
  misc_feature (503)..(511): n is a, c, g, or t
gcacgaggctttttccaaaggggttgtctttgaaaaggaaagcaatcacttctcactttgcataattgcctgcagcaggaacatctcttcactgggctccacctgctcacccgcctgcagatctgggatccagcctgctctcaccgctgtagctgtggcggctggggctgcagcctgcagggagaagcaagaagcatcagttgacagaggctgccgacacgtgcctcttccctctcttctctgtcaccctcctctggcggtccttccaccttcctctgtcctccggatgtcctctttgcccgtcttctcccttggctgagcaaagccatcccctcaattcagggaagggcaaggagccttcctcattcaggaaatcaaatcagtcttccggtctgcagcacggaaaagcacataatctttctttgctgtgactgaaatgtatccctcgtttatcatcccctttgtttgtgattgctgctaaagtcagtagtatcgtttttttnnnnnnnnngtttggtgtttttaaccatgctgttccagcaaagatgataccttaaactcccactgcaagcccatgaacttcccagagagtggaacggcttgctcttctttctagaatgtccatgcacttgggttttaatcagcagttccctattattctgattttaagctgttcctgtgatgaacttagagacagcatcggtgtctgctgctgtgtccccaggtcttgtgtgggtggcacagatctggggcagttagatagtgctctgtgcctaatgtgaagccacactagggtgaaagcctcacttccctgtttgagcaatgcagtgcctgctgcccgtgtgcatgaagggtacagccattcatataagtggaactattgagttacataaagaaaa

SEQ ID NO: 19477 - DNA, 838 bp, Homo Sapiens
caagtctaacccacatttatttgcacatgtatagtaatggccaacaaatactccaagttcatacaaatttgtaaaacaacaaagttaataatcacttggtacacttgtgtgttatcttgcttacatattaaaacctaaatgaacttccttcattttgtggacttccatacaatacttccttaaacaaaattcttgaaaacacatatcagcatgtttaagttaaagccaacacaaagttaaaacaagacacaaactcaaaaaccaagtttgaaagatacttttctacctccctcccctaaaaagaagtgattttctttaacagatgtatgttatatcacacaagtaaccatgaaaacaaaagaatgacgctcccatcatcaggaaaaaaatgccaaccaaatcatactgtttagttatctaccgaacatatggttaaaatatgaaaaacgggggaaaatgcttaaattaaaataacaagggagaatagaaaatagcaaatgattttaaagagaactgttccccctcaaagctgcaaagctctgactctgacaactaaaaactgtccaaggcaaataaaaacgaggaaaccttcaaaaacattctaatcacgtgcagtatctagtgttaaaagctgaaaatgataaagaggatatttattatacaagtgtcaacgaggacatcccaaaaataatgaaataaacacacatttatttctacaaaagcaatgtatgatacagaaattaaaagggaacagacttaaaagatttgcctatttaaatatacagattcttactgaagagtataggatatttaaaaaagatgacaagggatgttaatc

SEQ ID NO: 19478 - DNA, 1192 bp, Homo Sapiens
gcacgagggagccgcagccgctgtgggcagggggtgtggcaggagctcccagcactggagacccacggactcaacccagttacctcacatggggccttttctgagcaaggtctcgaaagcgcaggccgccctggctgagcagcaccgccctttcccagctgcactcgccctgtggacagccccgacacaccactttcctgaggctgtcgctcactcagattgtccgtttgctatgccgaatgcagccaaaattcctttttacaatttgtgatgccttaccgatttgatcttaatcctgtatttaaagttttctaacactgccttatactgtgtttctctttttgggggagcttaactgcttgttgctccctgtcgtctgcaccatagtaaatgccacaagggtagtcgaacacctctctggcccctagacctatctggggacaggctggctcagcctgtctccagggctgctgcggcccagccccgagcctgcctccctcttggcctctcatccattggctctgcagggcaggggtgaggcaggtttctgctcataagtgcttttggaagtcacctacctttttaacacagccgaactagtcccaacgcgtttgcaaatattcccctggtagcctacttccttacccccgaatattggtaagatcgatcaatggcttcaggacatgggttctcttctcctgtgatcattcaagtgctcactgcatgaagactggcttgtctcagtgtttcaacctcaccagggctgtctcttggtccacacctcgctccctgttagtgccgtatgacagcccccatcaaatgaccttggccaagtcacggtttctctgtggtcaaggttggttggctgattggtggaaagtagggtggaccaaaggaggccacgtgagcagtcagcaccagttctgcaccagcagcgcctccgtcctagtgggtgttcctgtttctcctggccctgggtgggctagggcctgattcgggaagatgcctttgcagggaggggaggataagtgggatctaccaattgattctggcaaaacaatttctaagatttttttgctttatgtgggaaacagatctaaatctcattttatgctgtattttatatcttagttgtgtttgaaaacgttttgatttttggaaacacatcaaaataaataatggcgtttgttgt

SEQ ID NO: 19479 - DNA, 1083 bp, Homo Sapiens
gcacgaggctatctattactgctatgttgtcagtcccacagtgttttgttcgccccacggaggccaagaaagccgcagatgaggccaagatgagatttgcccacatagatggagatcatctgacactgctgaacgtctaccatgcttttaaacaaaatcatgaatcggttcagtggtgttatgacaacttcattaactacaggtccctgatgtccgcagacaatgtacgccagcagctatctcgaattatggacagatttaatttgcctcgtcgaagtactgactttacaagcagggactattatattaatataagaaaagctttggttactgggtattttatgcaggtggcacatttagaacgaacagggcattacttaactgtgaaagataaccaggtggttcagttgcatccctctactgttcttgaccacaaacctgaatgggtgctttataatgagtttgttctaacaacaaagaattacatccggacatgtacagatatcaagccagaatggttggtgaaaattgcccctcaatattatgacatgagcaatttcccacagtgtgaagcaaagagacagttggaccgcatcattgccaaacttcaatccaaggaatattcacagtactgaattcagtgcttagaactgaagttattgagaggacagctttaaaagatgaatgaactcaaaagttcgagttgtgctcttcacgttggttcgataatggcctttatttgaaagctttttaatttttctttacagtaaatattccattctgatttcataaattaaacatttatgcctcccttttgtgttgacactgtagctcatactggaaaagtcgatcaatgttttgcagtttattgaaagtagttctatatataacaatgttataagcatttctttagaaatggttgaaaatgcttctaaaatgtgattatcgaccatggtatgcatgatcgttgtaattgttgacattccttttagaagttgtgaaatgttacaacttgtgcttatgtagacacaatcttctgtctcagtacagaggcactgacttcaataaagtctatttatacta

SEQ ID NO: 19480 - DNA, 908 bp, Homo Sapiens
gcacgaggggcggccggctgggcgcgcactctcgggatggagggcgagcgaggggcatcgcaggcgccctcctcgggcctcccggccgggggcgccaacggggagagcccggggggcggcgccccctttccgggcagcagcggctcttccgccctgctgcaggcggaggtgctggatctggacgaggacgaggacgacctggaggtgttcagcaaggatgcctcattgatggacatgaactccttcagccctatgatgccaacatcccctttatcaatgataaaccaaatcaagtttgaggatgaaccagatttaaaggatctcttcatcacagttgatgaacctgaaagtcatgttactacaatagaaactttcattacgtataggattattactaagacatctcgtggggaatttgactccagtgaatttgaagttaggagacgatatcaagatttcctttggttgaagggaaaactggaagaagcacaccccactctgattattccaccattgccagaaaagtttatagtaaaaggaatggtggaacgctttaacgatgacttcattgagacacgcaggaaggctttacataaatttttgaaccgaattgctgatcatccaactttaacatttaatgaagacttcaaaatttttctcactgcacaagcttgggaactctcttctcacaagaagcaaggtcctggcttgctaagcaggatggggcaaaccgtcagagctgttgcgtcctcaatgagaggagttaaaaaccgcccagaggagttcatggaatgaataactttattgaactatttagcccgaaaataaatttgatagataaatatctcaaagaatttataaggaagaaagggaatattttgatgaaatgaaagaatatggcccaattc

SEQ ID NO: 19481 - DNA, 1428 bp, Homo Sapiens
  misc_feature (1248)..(1290): n is a, c, g, or t
gcacgagggcctcctgaaggaggggaagggacgtgggggcggccacggcagattattgtggatgatgatgacagtaagatatggtcgctctatgacgcgggcccccgaagtatcaggtgtcctctcatattcctgccccctgtcagtggaactgcagatgtctttttccggcagattttggctctgactggatggggttaccgggttatcgctttgcagtatccagtttattgggaccatctcgagttctgtgatggattcagaaaacttttagaccatttacaattggataaagttcatctttttggcgcttctttgggaggctttttggcccagaaatttgctgaatacactcacaaatctcctagagtccattccctaatcctctgcaattccttcagtgacacctctatcttcaaccaaacttggactgcaaacagcttttggctgatgcctgcatttatgctcaaaaaaatagttcttggaaatttttcatctggcccggtggaccctatgatggctgatgccattgatttcatggtagacaggctagaaagtttgggtcagagtgaactggcttcaagacttaccttgaattgtcaaaattcttatgtggaacctcataaaattcgggacatacctgtaactattatggatgtgtttgatcagagtgcgctttcaactgaagctaaagaagaaatgtacaagctgtatcctaatgcccgaagagctcatctgaaaacaggaggcaatttcccatacctgtgcagaagtgcagaggtcaatctttatgtacagatacatttgctgcaattccatggaaccaaatacgcggccattgacccatcaatggtcagtgccgaggagcttgaggtgcagaaaggcagccttggcatcagccaggaggagcagtagtgtgtctctcgctgtcaatgatgagttgacccggtgtgttcttgtatagtcagtggcatcagcacccgtcagccggccttttccttcaggttcgtcaggctcaccggttctcactgtgtctgggaagtaggactgatggtcatcttcatgacaggcggcatctccactaagcctgtgtaactgttccctctttggttttcttagcttttgaatttgaagaagtacttttgaagactcccattttaagaaccgtgcagattttgctaccaaaagtcttcaccactgtgttcttaagtgaatgttaatttctgaggtttgggactttgtggtggnnnnnnnnnnnnnnnnnnnnnnnnnnnnnnnnnnnnnnnnnnnatgttgtttgctgtaaatgctgcacatccagattgcatatcaagacattggttattttatgctttcttggatataaccatgatcaagagtgccatggccactaccccactgtttgctctcctgcaaatcactgctttt

SEQ ID NO: 19482 - DNA, 886 bp, Homo Sapiens
gcacgaggcaggacgcgggaggcgcacttgcttcaagtcgcgggcgtgggaacggggttgcaaaacggggcctctttatccgggcttgcttccggcgtcatggctcaaagggccttcccgaatccttatgctgattataacaaatccctggccgaaggctactttgatgctgccgggaggctgactcctgagttctcacaacgcttgaccaataagattcgggagcttcttcagcaaatggagagaggcctgaaatcagcagaccctcgggatggcaccggttacactggctgggcaggtattgctgtgctttacttacatctttatgatgtatttggggaccctgcctacctacagttagcacatggctatgtaaagcaaagtctgaactgcttaaccaagcgctccatcaccttcctttgtggggatgcaggccccctggcagtggccgctgtgctatatcacaagatgaacaatgagaagcaggcagaagattgcatcacacggctaattcacctaaataagattgatcctcatgctccaaatgaaatgctctatgggcgaataggctacatctatgctcttctttttgtcaataagaactttggagtggaaaagattcctcaaagccatattcagcagatttgtgaaacaattttaacctctggagaaaacctagctaggaagagaaacttcacggcaaagtctccactgatgtatgaatggtaccaggaatattatgtaggggctgctcatggcctggctggaatttattactacctgatgcaggtattcagagaggaaaagtatctctgtgatgcctatcagtgtgctgatgtgatctggcaatatgggttgctgaagaaggatatgggctgtgccacgg

SEQ ID NO: 19483 - DNA, 892 bp, Homo Sapiens
gcacgaggcgaagacatgacacttacaagatggacagggatgataattgggcctccaagaacaatttatgaaaaccgaatatacagccttaaaatagaatgtggacctaaatacccagaagcacccccctttgtaagatttgtaacaaaaattaatatgaatggagtaaatagttctaatggagtggtggacccaagagccatatcagtgctagcaaaatggcagaattcatatagcatcaaagttgtcctgcaagagcttcggcgcctaatgatgtctaaagaaaatatgaaactccctcagccgcccgaaggacagtgttacagcaattaatcaaaaagaaaaaccacaggcccttccccttccccccaattcgatttaatcagtcttcattttccacagtagtaaattttctagatacgtcttgtagacctcaaagtaccggaaaggaagctcccattcaaaggaaatttatcttaagatactgtaaatgatactaattttttgtccatttgaaatatataagttgtgctataacaaatcatcctgtcaagtgtaaccactgtccacgtagttgaacttctgggatcaagaaagtctatttaaattgattcccatcataactggtggggcacatctaactcaactgtgaaaagacacatcacacaatcaccttgctgctgattacacggcctggggtctctgccttctccccttaccctcccgcctcccaccctccctgcaacaacagccctctagcctggggggcttgttagagtagatgtgaaggtttcaggtcgcagcctgtgggactactgctaggtgtgtggggtgtttcgcctgcacccctgggttctttaagtcttagtgatgccccttccaaaccatcatc

SEQ ID NO: 19484 - DNA, 882 bp, Homo Sapiens
  misc_feature (364)..(415): n is a, c, g, or t
caaacaatggtttgaaacaactactggaatattgtccacaataagctggaagtttgttgtagtatgcctcaaatataactgactgtatactatagtggtaacttttcaaacagcccttagcacttttatactaattaacccatttgtgcattgagttttcttttaaaaatgcttgttgtgaaagacacagatacccagtatgcttaacgtgaaaagaaaatgtgttctgttttgtaaaggaactttcaagtattgttgtaaatacttggacagaggttgctgaactttaaaaaaaattaatttattattataatgacctaatttattaatctgaagattaaccatttttttgtcttagaatatnnnnnnnnnnnnnnnnnnnnnnnnnnnnnnnnnnnnnnnnnnnnnnnnnnnnatttattatcaaggagcaatatttttatcttttccaaaataaatttgttaatgatacattacaaaaatagattgacatcagcctgattagtataaattttgttggtaattaatccattcctggcataaaaagtctttatcaaaaaaaattgtagatgcttgctttttgttttttcaatcatggccatattatgaaaatactaacaggatataggacaaggtgtaaatttttttattattattttaaagatatgatttatcctgagtgctgtatctattactcttttactttggttcctgttgtgctcttgtaaaagaaaaatataatttcctgaagaataaaatagatatatggcacttggagtgcatcatagttctacagtttgtttttgttttcttcaaaaaagctgtaagagaattatctgcaacttgattcttggcaggaaataaacattttgagttgaaatc

SEQ ID NO: 19485 - DNA, 1528 bp, Homo Sapiens
gcacgaggcatgactgcactttgagagactgaagcatctctcttccattcaccttcatagtttcattgcattccatgaaaagtgtcttggcctcagatggatggatgtgtttggacgagtgtctttaaggagtagtcctgaaaggtgtttttggtgtccatgtaaatatttgaagataaaaccactatagcttgtcataatttactgttgactgcattctcattaaaatgaaggtaaaggctcaggaatcatattgatgttctgattttaaaattggagtcaaagtctatgtttatcattttactatgttcctgatgttctttgttatttaattaatgggagcaaataaaaccagaagagcttgggaagattgctcagcatatattcctgtcgtagaagttgagattgctagggtccagtttccctagtgtggcctggacgagtcatttccccttcattgacctcattttccccatctgaaaagagagggttggactaagtgatctccaaggtcctttccaactctaaaattctgcaatttgttaacatttcattttgtttaggttgaggacatacattcaaactaattttatcacaaggaaaactgcaatacccacttccttgacagagttactcctttcagaagctaaataaagtatataacttattagatgttatatagatacagggggactttgaatttcacatcttaaagcagttgagctactttgaatttaagcagtcgtactaatcttaaattgcatagcatttgttttgatcgaatttgctgctcaagtatgggaataatttttaatgtcttaatgattggtgctgctaacttgcgtgatttcagaagacataattgtgaatacacactgtcagaattgggggattggtttttaccctagacttcactcttaaaaagcaacgtgcaatcaagatcatttatggctcaaatgaaagcatataaggttttcttgaagttgtgccaaagcattctgtagagtaggatgagatggttgttgccctagtctgttggtagaaccagaaatcaatatgttgtcttttaggttaaagcttgtaccaaaatatttatttcccccatttcaagccctgagtcaaacatttttttctcttaataatagacctgaaatgttttattagtatttctgtgaaatcagttgattcttgtgccatttttgtatatgtaattgtaattttgcccatgttaggccctctaaaaaatgtttgacatcctttgagatattttattactaaaatctgatcttttttggctactgcaaaaatctattcagcaagaaggtatcagctgcataccttgcacagtggagctgactacctataaactctccctaaggcatttgtttacaggtgtattccattttagcagacgttctgatgctcagtgtatgtgctgcatacaaataaatgtgttctgaatcttttcatcttattgatagcatttttacaaatgtgtttccaaggaataaagattattccctcgtgc

SEQ ID NO: 19486 - DNA, 1101 bp, Homo Sapiens
gcacgaggctggcctatgcttttgccctggcaggtaaccaggacaagaggaaggaagtactcaagtcacttaatgaggaagctgtgaagaaagacaactctgtccattgggagcgccctcagaaacccaaggcaccagtggggcatttttacgaaccccaggctccctctgctgaggtggagatgacatcctatgtgctcctcgcttatctcacggcccagccagccccaacctcggaggacctgacctctgcaaccaacatcgtgaagtggatcacgaagcagcagaatgcccagggcggtttctcctccacccaggacacagtggtggctctccatgctctgtccaaatatggagcagccacatttaccaggactgggaaggctgcacaggtgactatccagtcttcagggacattttccagcaaattccaagtggacaacaacaaccgcctgttactgcagcaggtctcattgccagagctgcctggggaatacagcatgaaagtgacaggagaaggatgtgtctacctccagacatccttgaaatacaatattctcccagaaaaggaagagttcccctttgctttaggagtgcagactctgcctcaaacttgtgatgaacccaaagcccacaccagcttccaaatctccctaagtgtcagttacacagggagccgctctgcctccaacatggcgatcgttgatgtgaagatggtctctggcttcattcccctgaagccaacagtgaaaatgcttgaaagatctaaccatgtgagccggacagaagtcagcagcaaccatgtcttgatttaccttgataaggtgtcaaatcagacactgagcttgttcttcacggttctgcaagatgtcccagtaagagatctgaaaccagccatagtgaaagtctatgattactacgagacggatgagtttgcaattgctgagtacaatgctccttgcagcaaagatcttggaaatgcttgaagaccacaaggctgaaaagtgctttgctggagtcctgttctcagagctccacagaagacacgtgtttttgtatctttaaagacttgatgaataaacactttttctggtcaatgtc

SEQ ID NO: 19487 - DNA, 952 bp, Homo Sapiens
atcccccgggctgcgggaagcgctccgggcctggaatccctacgcgtccctttgggtttagcacgatgagctcaatcggcactgggtatgacctgtcagcctctacattctctcctgacggaagagtttttcaagttgaatatgctatgaaggctgtggaaaatagtagtacagctattggaatcagatgcaaagatggtgttgtctttggggtagaaaaattagtcctttctaaactttatgaagaaggttccaacaaaagactttttaatgttgatcggcatgttggaatggcagtagcaggtttgttggcagatgctcgttctttagcagacatagcaagagaagaagcttccaacttcagatctaactttggctacaacattccactaaaacatcttgcagacagagtggccatgtatgtgcatgcatatacactctacagtgctgttagaccttttggctgcagtttcatgttagggtcttacagtgtgaatgacggtgcgcaactctacatgattgacccatcaggtgtttcatacggttattggggctgtgccatcggcaaagccaggcaagctgcaaagacggaaatagagaagcttcagatgaaagaaatgacctgccgtgatatcgttaaagaagttgcaaaaataatttacatagtacatgacgaagttaaggataaagcttttgaactagaactcagctgggttggtgaattaactaatggaagacatgaaattgttccaaaagatataagagaagaagcagagaaatatgctaaggaatctctgaaggaagaagatgaatcagatgatgataatatgtaacatttactcccgcatctattgtattttaaatttctactccagtccaatgtaactatttagccctggattatacatactgtccaattttcattaaatttttgtcttataaaaaagggggg

SEQ ID NO: 19488 - DNA, 864 bp, Homo Sapiens
ccgccaccttagcagcccgacttggggcctggaaagtggagcacgcggaggtgggagggccctgcacgcggcccccggtggggaaggggacgggccagggattcagactcgggctctcccctcaggatgcagcaccgaggcttcctcctcctcaccctcctcgccctgctggcgctcacctccgcggtcgccaaaaagaaagataaggtgaagaagggcggcccggggagcgagtgcgctgagtgggcctgggggccctgcacccccagcagcaaggattgcggcgtgggtttccgcgagggcacctgcggggcccagacccagcgcatccggtgcagggtgccctgcaactggaagaaggagtttggagccgactgcaagtacaagtttgagaactggggtgcgtgtgatgggggcacaggcaccaaagtccgccaaggcaccctgaagaaggcgcgctacaatgctcagtgccaggagaccatccgcgtcaccaagccctgcacccccaagaccaaagcaaaggccaaagccaagaaagggaagggaaaggactagacgccaagcctggatgccaaggagcccctggtgtcacatggggcctggcccacgccctccctctcccaggcccgagatgtgacccaccagtgccttctgtctgctcgttagctttaatcaatcatgccctgccttgtccctctcactccccagccccacccctaagtgcccaaagtggggagggacaagggattctgggaagcttgagcctcccccaaagcaatgtgagtcccagagcccgcttttgttcttccccacaattccattactaagaaacacatcaaataaactgactttttccccccc

SEQ ID NO: 19489 - DNA, 782 bp, Homo Sapiens
ccatttaaaagtattttatttttttccagtcaaatgactagttaacaagaagagtaaacttattaaacatgctctaattataaatcactgcattaaggacaatgaaaataatcaatttcggttatacaatatatacagttgtgctgcaaccaaagtaatcaggtgaatgaactgaatatcatacatctcaaaatagcatcctaagctgcatattatgttatccaccccttaacagatcacacagttactcttagtctgtgtacatgttctgagccatcatcccagatctgatggagaatggcatgcaaaatgccagaatcctgcagctgcagttcatgaaacataaactttaaatataaatagatatctacaatgtttttctttctcttagttgcttttttaatttgcaaggagcaaataactaagaaaggatattagcagggtcgttaatataatttctcctctggtaagagtactattagttactgcacaatagcaccaaattgtagactggaaaaatatttcctaggtatttatgtaccagtgaacctgacagattagtttgggactggagttctaatgttgatatgaatcaactttattccttatatagctggcaccaggtggtcaaaaggctgactataaaatacagatgccggaggattgttaaaatagacataagtgcactgtgccaaatacatctgtttacttaaatctatgagaaaattaaatgaagggttcaaacagaatttaaccattagtgaaaacagatgtagtgcttt

SEQ ID NO: 19490 - DNA, 786 bp, Homo Sapiens
  misc_feature (686)..(699): n is a, c, g, or t
ccgcatcctgctggatatagacaatgataccgagagcactgccctgtgaagaaagccctttcccagccctccaccacttccaccctggcgagtggagcaggggcaggcgaacctctttctttgcagaccgaacagtgaaaagctttcagtggaggacaaaggagggcctcactgtgcgggacctggccttctgcacggcccaaggagaacctggaggccaccactaaagctgaatgacctgtgtcttgaagaagttggctttctttacatgggaaggaaatcatgccaaaaaaatccaaaacaaagaagtacctggagtggagagagtattcctgctgaaacgcgcataggaagcttttgtccctgctgttaatgcgggcagcacctacagcaacttggaatgagtaagaagcagtgcgttaactatctatttaataaaatgcgctcattatgcaagtcgcctactctctgctacctggacgttcattcttatgtattaggagggaggctgcgctccttcagacttgctgcagaatcattttgtatcatgtatggtctgtgtctccccagtcccctcagaaccatgcccatggatggtgactgctggctctgtcacctcatcaaactggatgtgacccatgccgcctcgttggattgtcggaatgtagacagaaatgtactgttcnnnnnnnnnnnnnnaaacaatgtaattgctacttgataaggaccgaacattattctagtttcatgtttaatttgaattaaatatattctgtggtttatatg

SEQ ID NO: 19491 - DNA, 1253 bp, Homo Sapiens
  misc_feature (640)..(656): n is a, c, g, or t
  misc_feature (893)..(903): n is a, c, g, or t
gcacgaggcttctccaagcaggtggtggccatcgtccatgccgtgctccttgggtttgtcactgtgtcctgcttcttcttcatcccggccgctgtcttctcagtcctggaggatgactggaacttcctggaatccttttatttttgttttatttccctgagcaccattggcctgggggattatgtgcctggggaaggctacaatcaaaaattcagagagctctataagattgggatcacgtgttacctgctacttggccttattgccatgttggtagttctggaaaccttctgtgaactccatgagctgaaaaaattcagaaaaatgttctatgtgaagaaggacaaggacgaggatcaggtgcacatcatagagcatgaccaactgtccttctcctcgatcacagaccaggcagctggcatgaaagaggaccagaagcaaaatgagccttttgtggccacccagtcatctgcctgcgtggatggccctgcaaaccattgagcgtaggatttgttgcattatgctagagcaccagggtcagggtgcaaggaagaggcttaagtatgttcatttttatcagaatgcaaaagcgaaaattatgtcactttaagaaatagctactgtttgcaatgtcttattnnnnnnnnnnnnnnnnngacaaatggaacaaagaagctgtgaccccagcaggatgtctaatatgtgaggaaatgagatgtccacctaaaattcatatgtgacaaaattatctcgaccttacataggaggagaatacttgaagcagtatgctgctgtggttagaagcagattttatacttttaactggaaactttggggtttgcatttagatcatttagctgatggctaaatagcaaaatttatatttagaagcnnnnnnnnnnngcatagagatgtgttttataaataggtttatgtgtactggtttgcatgtacccacccaaaatgattatttttgtagaatctaagttaaacttactatttataatgcataggtaaccattaactatgtacatataaagtataaatatgtttatattctgtacatatggtttaggtcaccagatcctagtgtagttctgaaactaagactatagatattttgtttcttttgatttctctttatactaaagaatccagagttgctacaataaaataaggggaataataaacttgagagtgaataatcatagtattctgctgcataaatgtttctactctcttgcgataaaaaa

SEQ ID NO: 19492 - DNA, 1681 bp, Homo Sapiens
gcacgaggggagcggtaactaccccggctgcgcacagctcggcgctccttcccgctccctcacacaccggcctcagcccgcaccggcagtagaagatggtgaaagaaacaacttactacgatgttttgggggtcaaacccaatgctactcaggaagaattgaaaaaggcttataggaaactggctttgaagtaccatcctgataagaacccaaatgaaggagagaagtttaaacagatttctcaagcttacgaagttctctctgatgcaaagaaaagggaattatatgacaaaggaggagaacaggcaattaaagagggtggagcaggtggcggttttggctcccccatggacatctttgatatgttttttggaggaggaggaaggatgcagagagaaaggagaggtaaaaatgttgtacatcagctctcagtaaccctagaagacttatataatggtgcaacaagaaaactggctctgcaaaagaatgtgatttgtgacaaatgtgaaggtagaggaggtaagaaaggagcagtagagtgctgtcccaattgccgaggtactggaatgcaaataagaattcatcagataggacctggaatggttcagcaaattcagtctgtgtgcatggagtgccagggccatggggagcggatcagtcctaaagatagatgtaaaagctgcaacggaaggaagatagttcgagagaagaaaattttagaagttcatattgacaaaggcatgaaagatggccagaagataacattccatggtgaaggagaccaagaaccaggactggagccaggcgatattatcattgtgttagatcagaaggaccatgctgtttttactcgacgaggagaagaccttttcatgtgtatggacatacagctcgttgaagcactgtgtggcttccagaagccaatatctactcttgacaaccgaaccatcgtcatcacctctcatccaggtcagattgtcaagcatggagatatcaagtgtgtactaaatgaaggcatgccaatttatcgtagaccatatgaaaagggtcgcctaatcatcgaatttaaggtaaactttcctgagaatggctttctctctcctgataaactgtctttgctggaaaaactcctacccgagaggaaggaagtggaagagactgatgagatggaccaagtagaactggtggactttgatccaaatcaggaaagacggcgccactacaatggagaagcatatgaggatgatgaacatcatcccagaggtggtgttcagtgtcagacctcttaatgggccagtgaataacactcactgctggcatttaatgtgcagtagtgaatgagtgaaggactgtaatcataatatgctcactacttgctcttgtttttgttttaataaactatagtagtgttttaaaaagttaaatgaagaataaacgcaaatataaaagctctgattttgccctgtatgtatgatgacttcagtgtgcaagatgaagtttaatacctgtaaaaactacaaagaagttcccctagcatttttaggccaaaccttgtaattgacttcagctatgtacgtggacaagcttagactgaaatgctaggtatatgtattggcttcagtgtatgacccttcattgttaagctatgaaagtaaaactctgtatttaactggcaatgagg

SEQ ID NO: 19493 - DNA, 1031 bp, Homo Sapiens
gtgtgtcatgactttaatggttagctacagtatgcatacacatacaagaagtaggggagctgaagcccaggaaaaggctacaaaatacaacacagggaccaatacatttgcaaaacattcaaaatccttataaaaggggctgtattggtcctttcaactttgtcattattcagcttagcctgtatggccattcattcagtggggtaatgggggagaacaattaattaatgagatttggttccctttcctatattcccactgtttttaagtttcaggagaggattgtgggggtgagggtagggggtgggctttaggcctggtctggtttccctttatataaagagctgacccccatctcaggcggctgaggtgtataatccccaaaagaaataagatggtacaaatgcagtcagctttggaatacctttgggtaaagacaaaatggaaactcatgggattccaatagtgagcccttcccatgttcctggacatatccaattctagcacatccacatttttaataacttagtgattttcaaggtcccctgtccacattaaaaaaataagttacataatattcaaactggctttttgctattctttgggacaccaggaatgtcagaagacatggagctatgccctcagacaagtgcatggcatcagctgcctcttcattaataggtaccagtttatgtacttgccttggacacagcttgcacaaagcctagaagttccagacaaaggttttctctttcatgtatttacacaagttcaaaatgatattcacagcatcttctaaattttggccaagagtcaaaaaaatgcatttaaactttggaacgtgcccacataagacaggaggctgatcccaacagtagttggggcagatacccacaaaccaaagggctgggaaagtcaggaagagttgaaaggattcttcagtcagtttatgaactcggtgcagtgagacctctagactgacacgtacaacagagatgcagtttcgtctaactggcacctgtcccttcgga

SEQ ID NO: 19494 - DNA, 919 bp, Homo Sapiens
atcccccgggctgcaggaattcggcacgagggacatctggagcatgggactgtctctggtagagatggcggttgggaggtatcccatccctcctccagatgccaaggagctggagctgatgtttgggtgccaggtggaaggagatgcggctgagaccccacccaggccaaggacccccgggaggccccttagctcatacggaatggacagccgacctcccatggcaatttttgagttgttggattacatagtcaacgagcctcctccaaaactgcccagtggagtgttcagtctggaatttcaagattttgtgaataaatgcttaataaaaaaccccgcagagagagcagatttgaagcaactcatggttcatgcttttatcaagagatctgatgctgaggaagtggattttgcaggttggctctgctccaccatcggccttaaccagcccagcacaccaacccatgctgctggcgtctaagtgtttgggaagcaacaaagagcgagtcccctgcccggtggtttgccatgtcgcttttgggcctccttcccatgcctgtctctgttcagatgtgcatttcacctgtgacaaaggatgaagaacacagcatgtgccaagattctactcttgtcatttttaatattactgtctttattcttattactattattgttcccctaagtggattggctttgtgcttggggctatttgtgtgtatgctgatgatcatatttattttcagtatactgtgtgggatacttagtggtatgtctctttaagttttgattaatgtttcctaaatggaattcttttgaatgtcacaaatggatcaagatattaaatgtcggatttatctttccccatatccaagtaccaatgctgttgtaaacaacgtgtatagtgcctaaattgtatgaa

SEQ ID NO: 19495 - DNA, 913 bp, Homo Sapiens
gcacgaggcaaataaccaccagctacagcttgctggagcattggcaattgcaaattttgccagaaatgatgcaaattgtattcatatggtagacaatgggattgtagaaaaacttatggatttactggacagacatgtagaagatggaaatgtaacagtacagcatgcagcactaagtgccctcagaaacctggccattccagttataaataaagcaaagatgttatcagctggggtcacagaggcagttttgaaatttcttaaatctgaaatgcctcctgttcagttcaaacttctgggaacattaagaatgttaatagatgcacaagcagaagctgctgaacaattgggaaagaatgttaagttagtggagcgtttggtggaatggtgtgaagccaaagatcatgctggtgtgatgggggagtcaaacagactgctgtctgcccttatacgacacagtaaatcaaaagatgtaattaaaaccattgtgcagagtggtggcatcaagcatctagttaccatggcaactagtgaacatgtaataatgcagaatgaagctcttgttgctttggcattaatagcagctttagaattgggcactgctgagaaagatctagaaagtgctaaacttgtacagattttacatagactgctagcagatgagagaagtgctcctgaaatcaaatataattccatggtcctgatatgtgctcttatgggatctgaatgtctacacaaggaagtacaggatttggcttttctagatgtcgtatcccaacttcgcagtcatgagaacaaaagtgttgcccagcagccctctctcacagagcagagacttactgtggaaagctgagaactgcccgatacacggcatcatcccatctctatttcccctctgtcctccatccagcgg

SEQ ID NO: 19496 - DNA, 927 bp, Homo Sapiens
gcacgaggagaagattctctttgtgaaccacaaaactttttgagacagggctgaaggcaggtgcacccacagtcactgtccacccacccccaggtcccttgtgttgcgagcggcggtgttgccggcattggccgctgtgtcttccgctccccatggaatggcacagggtagagtagaggagagaatccagggctgtggtggtggtggctgtgctgacgctggacgctgtggcctagctgtgggctgggtgctggactctgtgctccaggcccacctcctctagttctcccagcggggcctgttttcatttctgggatgtgtggagagacgttttgtggtgaaacactggaaatccagttattcgccagtggcccacaggcccgtgtggagagtgcggagccagggatctggggatgctggcaggtgctgatcctgctcctgctctcagaagcaggtgttccttggtgtccccactctacccctgaggtcaccccgctgaccctgttctcctctgtgcccgtcaggaaccacgaaggcggaggaccggggcatgctgctgaaaaccttcaacgagcccggctctgagtacttcatcttcctgctcagcacccgggctggggggctcggcctgaacctccagtcggcagacactgtgatcatttttgacagcgactggaatcctcaccaggtaaaagcgggccgggccccaggtcgaggagaaggaaggggtgcctgcaaaacctcgaggagacggccctggcttgagggtcctccagcctcctccacattgtcttggaccccaggagccgggaggagctgcacccatatctccataggtcatcagggagaaaaaaggcggggcctcctgtttccaaaatacaaacagcctttcctctgattgggaagcagtgtataagccatccgtcg

SEQ ID NO: 19497 - DNA, 916 bp, Homo Sapiens
gcacgagggccgctagtctcagcgtacttaagaacgtgcccggcctcgccatcctactttccaaggacgcgctggatccgcgacagcccggctaccagcccccgaatccccatcctggtccctcgtccccgccagccgcgccagcgtccaagaggagcctaggggaacccgcagctggagaaggctccgcgaagcgatcgcaacccgagccaggggttgcggacgaggatcagacggcctgaaactccggactgtgggccacctagtccggcaggatcttccgccagcgcctccaccttcagatgtacctccagcctttcactcctcggtcctccggagcccacaacctggacacagctcctcaagacaggtagcatggaccttaaggcgacaagagaggggccccaggagtggcaggagaggatccccgaccaccctagggaaacttcgtgcgataattgctgcttatgcccgtgttgcgtgaagacacggaacttcaccttttctgggaccttctttgggggagaatggtggacagtgggattctggaaacttgtttgggacccccaagggttaaagccacccagcattcacgaagagcacctgaagtatggaagctgagaagagttattggaatcacccccaccgttgacagaggaaggcagggggtgagaattaactgcttgagggtaggagagtctgagatgtgggggccctattccgctccccgccctgggacagttttcctttctagttttctttcccctgcttcagaggagcatctctgagggttctagctcttttaacaccccttttccccctgctggcccagagggagacccaggactgaactctccaggcctcctcccctgagccctgcagctggctggagtcttgcttccaataaaacaagcac

SEQ ID NO: 19498 - DNA, 640 bp, Homo Sapiens
  misc_feature (530)..(540): n is a, c, g, or t
gaattcggcacgaggccatcttccagtaattcgccaaaatgacgaacacaaagggaaagaggagaggcacccgatatatgttctctaggccttttagaaaacatggagttgttcctttggccacatatatgcgaatctataagaaaggtgatattgtagacatcaagggaatgggtactgttcaaaaaggaatgccccacaagtgttaccatggcaaaactggaagagtctacaatgttacccagcatgctgttggcattgttgtaaacaaacaagttaagggcaagattcttgccaagagaattaatgtgcgtattgagcacattaagcactctaagagccgagatagcttcctgaaacgtgtgaaggaaaatgatcagaaaaagaaagaagccaaagagaaaggtacctgggttcaactaaagcgccagcctgctccacccagagaagcacactttgtgagaaccaatgggaaggagcctgagctgctggaacctattccctatgaattcatggcataataggtgttnnnnnnnnnnntaaaggacctctgggctacaaaaatgtttctcttcattgagtagaagtgtggtgtcctctcccccaaagaaatatttaaagcaaattttggttgtgtcct

SEQ ID NO: 19499 - DNA, 1365 bp, Homo Sapiens
  misc_feature (1003)..(1068): n is a, c, g, or t
acatttgcaaaacaacatttattcttttaaaaaatctatatacattgccatacaaagataccacattgaagcagttctcaggaaccttccagtgagccttctcttataattgcccgagcaagatttcgtgccaaagaaagtctcagcatttccaccttggtggtctctatgtcatcatcctggagctgctcggtatcagattctccatgcacaggtcttcttgacgtcaagtcctccagacaccgcatcaactcataagtctgttctgctgagaaaatcacctgtttctgttccaaaaggggcaaggcatctgtcagcagagtcatccagaaagaccgaggggcaatccgagacgtcttctaggacagaaggagagaagctgcgtcggcaaaacgcttctccccgtacatacggtggaactcgcgatactttcccaggaatgtcagtcggtcactgagcatcatggctggccccaggttgtcaatgagatccaaatcagaaaagcagcctcgctcacagtaatccctgaggaacctgtctgacacgagcgtggcaaaggcggcatccttagcacggatgctccaagagagggcagaacccaggcgattgttgcggacggctttcatggctaagatcttacaaatgctgcgaacttgttcagtcatctgccgctgctcacagatccgcagcaccttcagggctttctgctcggtgttcagaggtatccgctcaatgtgcagctccagggagactcggcccagctcggggcagtaatcaaagtaatcgacccccagctgccacaggctgggatgagcaaacagtcccgaggcgtactccagcaggaggaactctctcatgttggaaccgaaatagaggttgtgtgactggaggagcttgcagtggtccagcaggtctgtcaggtgggccacaaaccaccagttgctcagggcgatgctgtaatcccagctactcgagaagctggggtgggagtattgcttgagcnnnnnnnnnnnnnnnnnnnnnnnnnnnnnnnnnnnnnnnnnnnnnnnnnnnnnnnnnnnnnnnnnnaaccatatcttttagctcgatacttttggaggacttgaagggcaccaggaaactgccgacatcttgcccaactcccagtgaagtgcaccccagctgtttcctcttgccagacagcaaggaactggcccgtcttcagaggaagctgtaagccaggagggaagaagggaccctgtggaggactcctgccatctcctttcagctaaggggttagcagtcaagcatgcccacccaggcactgagagacaaacccctggccctttagcagggctgacgaactacagcctctgagtcaggatc

SEQ ID NO: 19500 - DNA, 869 bp, Homo Sapiens
gaaaagagctttcacaaaatacagatgagtctggattaaatgatgaagccatcgccaagcaattacagcttgatgaagatgcggagctggagaggcagttgcatgaagatgaagagtttgccagaacattagccatgttggatgaagaacccaagaccaaaaaggctcgaaaggacacagaagcgggagaaacgttttcatctgtccaagccaatttaagtaaagcagaaaaacataaatatcctcataaagtaaaaacagcacaagtttcagatgaaagaaagagctacagtcctaggaagcaaagtaaatatgaaagttcaaaagaatctcagcaacattccaagtcatcagctgacaaaataggagaagtctcttctcccaaggccagttctaagctggcaattatgaaaagaaaagaagagagctcttataaagaaatagagcctgtggcctcaaaaagaaaagaaaatgccattaaattgaaaggagagacaaaaactcctaagaaaaccaaaagttctccagctaaaaaagagtctgtaagtcctgaagattctgaaaagaaacgcactaattatcaagcttatcgaagctacttaaatcgagaaggtcccaaggctctgggctccaaagaaataccaaagggagctgaaaattgcttggaaggccttatatttgtaatcacaggcgtgctggagtctattgaacgagatgaggccaagtctctaattgaacgttatgggggaaaagtaacaggaaatgtcagcaagaaaacaaattatcttgtcatgggtcgtgatagtggacagtccaagagtgataagccgcacccttggggacaaaaattattgatgaagatgggcctg

SEQ ID NO: 19501 - DNA, 705 bp, Homo Sapiens
gcacgagggtggaaagtagctgctagtgaaatggctggggccgctggggtccgtcttcacactgcgcaggtctcttctgggcgtctgagctggggtgggagctgtgctgtgtgccccactccagcctggggaccccacttcagaaggtaggggccgtgtcccgcggtgctgactgaggcctgcttccccctccccctcctgctgtgctggaattccacagggaccagggccaccgcaggggactgtctcagaagacttgatttttccgtccctttttctccacactccactgacaaacgtccccagcggtttccacttgtgggcttcaggtgttttcaagcacaacccaccacaacaagcaagtgcattttcagtcgttgtgcttttttgttttgtgctaacgtcttactaatttaaagatgctgtcggcaccatgtttatttatttccagtggtcatgctcagccttgctgctctgcgtggcgcaggtgccatgcctgctccctgtctgtgtcccagccacgcagggccatccactgtgacgtcggccgaccaggctggacaccctctgccgagtaatgacgtgtgtggctgggaccttctttattctgtgttaatggctaacctgttacactgggctgggttgggtagggtgttctggcttttttgtggggtttttatttttaaagaaacactcaatcatcct

SEQ ID NO: 19502 - DNA, 1316 bp, Homo Sapiens
gcacgaggcgagctcctggaggcggcgggatggaggcggcggccgagcctggaaacctggccggcgtcaggcacatcatcctggtcctctcaggaaaggggggcgttgggaaaagcaccatctccacggagctggccctggcactgcgccatgcaggcaagaaggtgggaatcctggatgtggacctgtgtggccccagtatcccccgcatgctcggggcgcagggcagggctgtgcaccagtgcgaccgcggctgggcacccgtcttcctggaccgggagcagagcatctcgctcatgtctgtgggcttcctgctggagaagccggacgaggccgtggtgtggagaggccccaagaaaaacgcgctgataaagcagtttgtgtccgacgtggcctggggggagctggactacctggtggtggacacgcccccggggacctccgatgagcacatggccaccatagaagccctgcgtccctaccagcccctgggggccctcgtggtcaccacgccccaggcggtgtccgtgggggacgtgaggcgcgagctgaccttctgtaggaagacgggcttgcgggtgatgggaatcgtggagaatatgagcggcttcacctgcccacactgcacggagtgcaccagcgtcttctccaggggcggcggagaggagctggcccagctcgccggggtgcccttcttaggctccgtgcccctggaccctgcgctcatgaggaccctggaggagggccacgacttcatccaggagttccccgggagccccgccttcgctgcactcacctccatagcccagaagattctggacgcgacgcccgcgtgcctcccctgactaaggccaccttgcagccgctttccagggccaccaagggctctgctccagcctctcagagaaacagaggcctgggctcggttcccgggccctgcaggggcaggcccaggcagcgtcagcgggagagcttctccccgaccagcccagccccaggatgtgtcgcaccagcagctctgcctggttggcctgcagtgccgtggtctgcgtgctctgcagctgtgagacgggggcggcctgggctctcttcccatccatgttgcctacctgtgcccctggcagccgcgtgtccacacagttagcggagcgcaggacttctgcagtcctcaggtgaccccgggcctccagcaccctgggtcgctgtcatctgtgtttagctcggggagtgccccctaagggggcgaactgacctcaggcatgtcttgtaactgtagaggcgcctgccattaaacgtgtccgctgctgtggcgacag

SEQ ID NO: 19503 - DNA, 866 bp, Homo Sapiens
gcacgagggccacaaccatcctgctgcttctgacggtttggctgctggtgggctttcccctcactgtcattggaggcatctttgggaagaacaacgccagcccctttgatgcaccctgtcgcaccaagaacatcgcccgggagattccaccccagccctggtacaagtctactgtcatccacatgactgttggaggcttcctgcctttcagtgccatctctgtggagctgtactacatctttgccacagtatggggtcgggagcagtacactttgtacggcatcctcttctttgtcttcgccatcctgctgagtgtgggggcttgcatctccattgcactcacctacttccagttgtctggggaggattaccgctggtggtggcgatctgtgctgagtgttggctccaccggcctcttcatcttcctctactcagttttctattatgcccggcgctccaacatgtctggggcagtacagacagtagagttcttcggctactccttactcactggttatgtcttcttcctcatgctgggcaccatctcctttttttcttccctaaagttcatccggtatatctatgttaacctcaagatggactgagttctgtatggcagaactattgctgttctctccctttcttcatgccctgttgaactctcctaccagcttctcttctgattgactgaattgtgtgatggcattgttgccttcccttttgccctttgggcattccttccccagagagggcctggaaattataaatctctatcacataaggattatatatttgaactttttaagttgcctttagttttggtcctgatttttctttttacaattaccaaaataaaatttattaag

SEQ ID NO: 19504 - DNA, 934 bp, Homo Sapiens
gcacgaggcccaagccaaccaaggcagggaaagataagtctaaagcatcccttgagaaagctggaaaatctggtgtgaaaaaagatctgcatgatgcaaatacagatcttattggaagacaccctaaacaagagaaacgatcagtcttccaaacaattaatcagttcctggacttaaccctattcacccacagaggctttttgctatacctctctggaaatgtgatcatgttttttggactctttgcacctttggtgtttcttagtagttatgggaagagtcagcattattctagtgagaagtctgccttccttctttccattctggcttttgttgacatggtagcccgaccatctatgggacttgtagccaacacaaagccaataagacctcgaattcagtatttctttgcggcttccgttgttgcaaatggagtgtgtcatatgctagcacctttatccactacctatgttggattctgtgtctatgcgggattctttggatttgccttcgggtggctcagctccgtattgtttgaaacattgatggaccttgttggaccccagaggttctccagcgctgtgggattggtgaccattgtggaatgctgtcctgtcctcctggggccaccacttttaggtcggctcaatgacatgtatggagactacaaatacacatactgggcatgtggcgtcgtcctaattatttcaggtatctatctcttcattggcatgggcatcaattatcgacttttggcaaagaacagaaagcaaacgagcagaaaaggaaagtaaagaggaagagaccagtatagatgttgctgggaagccaatgaagttaccaagcagcagatctccggaccaaaagacacagaaggagggcccaggaggaggaagtccagtctgaatcctggggctgaagggtaaattgagca

SEQ ID NO: 19505 - DNA, 2230 bp, Homo Sapiens
tcggcatcgacctggggaccacctactcctgcgtcggcgtgttcaagaacggccgcgtggagatcatcgccaacgatcagggcaaccgcatcacgccgtcctatgtcgccttcactcctgaaggggaacgtctgattggcgatgccgccaagaaccagctcacctccaaccccgagaacacggtctttgacgccaagcggctcatcggccgcacgtggaatgacccgtctgtgcagcaggacatcaagttcttgccgttcaaggtggttgaaaagaaaactaaaccatacattcaagttgatattggaggtgggcaaacaaagacatttgctcctgaagaaatttctgccatggttctcactaaaatgaaagaaaccgctgaggcttatttgggaaagaaggttacccatgcagttgttactgtaccagcctattttaatgatgcccaacgccaagcaaccaaagacgctggaactattgctggcctaaatgttatgaggatcatcaacgagcctacggcagctgctattgcttatggcctggataagagggagggggagaagaacatcctggtgtttgacctgggtggcggaaccttcgatgtgtctcttctcaccattgacaatggtgtcttcgaagttgtggccactaatggagatactcatctgggtggagaagactttgaccagcgtgtcatggaacacttcatcaaactgtacaaaaagaagacgggcaaagatgtcaggaaagacaatagagctgtgcagaaactccggcgcgaggtagaaaaggccaaacgggccctgtcttctcagcatcaagcaagaattgaaattgagtccttctatgaaggagaagacttttctgagaccctgactcgggccaaatttgaagagctcaacatggatctgttccggtctactatgaagcccgtccagaaagtgttggaagattctgatttgaagaagtctgatattgatgaaattgttcttgttggtggctcgactcgaattccaaagattcagcaactggttaaagagttcttcaatggcaaggaaccatcccgtggcataaacccagatgaagctgtagcgtatggtgctgctgtccaggctggtgtgctctctggtgatcaagatacaggtgacctggtactgcttgatgtatgtccccttacacttggtattgaaactgtgggaggtgtcatgaccaaactgattccaaggaacacagtggtgcctaccaagaagtctcagatcttttctacagcttctgataatcaaccaactgttacaatcaaggtctatgaaggtgaaagacccctgacaaaagacaatcatcttctgggtacatttgatctgactggaattcctcctgctcctcgtggggtcccacagattgaagtcacctttgagatagatgtgaatggtattcttcgagtgacagctgaagacaagggtacagggaacaaaaataagatcacaatcaccaatgaccagaatcgcctgacacctgaagaaatcgaaaggatggttaatgatgctgagaagtttgctgaggaagacaaaaagctcaaggagcgcattgatactagaaatgagttggaaagctatgcctattctctaaagaatcagattggagataaagaaaagctgggaggtaaactttcctctgaagataaggagaccatggaaaaagctgtagaagaaaagattgaatggctggaaagccaccaagatgctgacattgaagacttcaaagctaagaagaaggaactggaagaaattgttcaaccaattatcagcaaactctatggaagtgcaggccctcccccaactggtgaagaggatacagcagaaaaagatgagttgtagacactgatctgctagtgctgtaatattgtaaatactggactcaggaacttttgttaggaaaaaattgaaagaacttaagtctcgaatgtaattggaatcttcacctcagagtggagttgaaactgctatagcctaagcggctgtttactgcttttcattagcagttgctcacatgtctttgggtgggggggagaagaagaattggccatcttaaaaagcgggtaaaaaacctgggttagggtgtgtgttcaccttcaaaatgttctatttaacaactgggtcatgtgcatctggtgtaggaagttttttctaccataagtgacaccaataaatgtttgttatttacactggtctaa

SEQ ID NO: 19506 - DNA, 1237 bp, Homo Sapiens
  misc_feature (223)..(237): n is a, c, g, or t
gcacgagggtacagttgggggaaagcttaggtagatatattttttttaaaaggtgctgcctttttggatttataagaaaatgcctgtcagtcgtgatagaacagagttttcctcatatgagtaagaggaagggactttcactttcaagtggaacagccatcactatcaagatcagctcatggaaggagtaaagaaaatatctcaaaatgagacaaactgaagnnnnnnnnnnnnnnnaatgacttaagtttttgtgctcttgcaagactatacaaaactattttaagaaagcagtgatatcacttgaacttcagtgccctcactgtagaatttaaaagccttactgttgattgcccatgttggacttgatggagaaattaaatatctttcattatgctttacaaaatactgtatatgtttcagcaagtttggggaatgggagaggacaaaaaaaagttacatttaatctatgcatttttgccaagccatattgagttattttactactagagacattaggaaactaactgtacaaaagaaccaagtttaaaagcattttgtggggtacatcatttctataattgtataatgtatttctttgtggttttaaatgataaagacattaagttaacaaacatataagaaatgtatgcactgtttgaaatgtaaattattcttagaacactttcaatgggggttgcattgtccttttagtgccttaatttgagataattattttactgccatgagtaagtatagaaatttcaaaaaatgtattttcaaaaaattatgtgtgtcagtgagtttttcattgataattggtttaatttaaaatatttagaggtttgttggactttcataaattgagtacaatctttgcatcaaactacctgctacaataatgactttataaaactgcaaaaaatgtagaaggttgcaccaacataaaaaggaaatatggcaatacatccatgatgttttccagttaacataggaattaccagataaatactgttaaactcttgtccagtaacaagagttgattcatatggacagtatgatttattgtttatttttttaaccaaatacctcctcagtaatttataatggctttgcagtaatgtgtatcagataagaagcactggaaaaccgatcgtctctaggatgatatgcatgtttcaagtggtattgaaagccgcactgatggatatgtaatataaacatatctgtataatat

SEQ ID NO: 19507 - DNA, 1021 bp, Homo Sapiens
gcacgaggcagacctgaagtttattgaagcttgcctccgatgcctgcgtaccatcttcaccagtcctgtcactccagaggagctactgtatacagatgccacagtgataccacacctcatggcactgcttagcaggtcccgctatacccaggagtacatctgtcagatcttctcacactgctgtaaagggccagatcatcaaacaattttatttaaccacggtgcagttcagaatattgctcacctactaacctcactgtcctacaaagttcgaatgcaagcactgaaatgtttctcagttttagcttttgaaaacccccaggtatcgatgaccctggtaaatgttttggttgatggagaattgttaccacagatttttgtgaagatgttacagagggataagcctattgagatgcagctcacatcagcaaaatgtttaacttacatgtgtagagctggagcaattcggacagatgataactgtattgtattaaagacattaccttgtttggttcgaatgtgcagtaaggagagattactagaggagagagttgaaggagctgagacacttgcctatctgattgaaccagatgttgagctacagagaatcgctagcataactgatcacctcattgccatgcttgctgattatttcaagtatcccagctcagtgagtgccatcactgatattaaaaggcttgatcatgatttaaaacatgctcacgaactccgccaggctgcattcaagctctatgcctctcttggagcaaatgatgaagacatccggaagaaggtgagtctgggagaggggcgtcccccagtcctgacagccagcaggcagggagtgacgtcaacctgaaagtcgtggtgaagagcactaacagtgactgtttgaatataataaacagagtgactaaaggcataattgaagaatgaatgggacccggatttggggggttgtttgtttgtttttagacatagagtggcatggccgtgctggaatgacaaataactggcgtgc

SEQ ID NO: 19508 - DNA, 1425 bp, Homo Sapiens
  misc_feature (47)..(67): n is a, c, g, or t
gcacgaggctcagctgcggcggccgcaggttccaaagcgggtccgannnnnnnnnnnnnnnnnnnnnactgcagccccaggccccggccccccacccacgtctgcgttgctgccccgcctgggccgggccccaaaggcaaggacaaagcagctgtcagggaacctccgccggagtcgaatttacgtgcagctgccggcaaccacaggttccaagatggtttgcgggggcttcgcgtgttccaagaactgcctgtgcgccctcaacctgctttacaccttggttagtctgctgctaattggaattgctgcgtggggcattggcttcgggctgatttccagtctccgagtggtcggcgtggtcattgcagtgggcatcttcttgttcctgattgctttagtgggtctgattggagctgtaaaacatcatcaggtgttgctattcttttatatgattattctgttacttgtatttattgttcagttttctgtatcttgcgcttgtttagccctgaaccaggagcaacagggtcagcttctggaggttggttggaacaatacggcaagtgctcgaaatgacatccagagaaatctaaactgctgtgggttccgaagtgttaacccaaatgacacctgtctggctagctgtgttaaaagtgaccactcgtgctcgccatgtgctccaatcataggagaatatgctggagaggttttgagatttgttggtggcattggcctgttcttcagttttacagagatcctgggtgtttggctgacctacagatacaggaaccagaaagacccccgcgcaaatcctagtgcattcctttgatgagaaaacaaggaagatttcctttcgtattatgatcttgttcactttctgtaattttctgttaagctccatttgccagtttaaggaaggaaacactatctggaaaagtaccttattgatagtggaattatatatttttactctatgtttctctacatgtttttttctttccgttgctgaaaaatatttgaaacttgtggtctctgaagctcggtggcacctggaatttactgtattcattgtcgggcactgtccactgtggcctttcttagcatttttacctgcagaaaaactttgtatggtaccactgtgttggttatatgggtgaatctgaacgtacatctcactggtataattatatgtagcactgtgctgtgtagatagttccctactggaaaaggagtgggaaatttatttaaaatcataaaagtatgacatcctgttatggtaagggaaatccaaattcccaatttttttggtctttttaggaaagagtgttgtggtcaaaagtgttagtaaaaaatgataatttacctgtagtcctttatgaatacccaatgattccaaaaaaagttatgccctaggaaattggggtt

SEQ ID NO: 19509 - DNA, 953 bp, Homo Sapiens
gcacgaggctggacttggctttacattcttaatgtacttttacttttcctcaagatatgaacttactctcttgaagctgaattttcttttactacttaaatcatttatgtatatctggtaaattatgaccaaatttttgttagattgcatacagtaaattgaaatacacacttggtacactacgggattgttgtgcttttgtttggttttagttggaaataaggtttgatgtagatggcttgttactgttaatttaaaatattctataattgtccattactttatgttgtgttgtgacagatttggctatatttttagtcaattgaaatatgatactttaaaagtttgtttttaggtaatccaaaggaaaagtgtttatactcttgaatatattagcctcagcctatataaaaatttctttgaagtaaacattttaccggaaacagaattgacagatttttctacttgctgactgcctaacttattttgtttcatgatctcgagggactgccttttcccatctagatcttttaaaaaaatagttttagtactaaggtatactactggacatttctatttttttaagtgtattctttttctgacttacagtaaaatttcaggaagttgatagatactaagaacttatgattggtctcagaggtaacaatgaaatactcataattttgtctgtggaactctggcagaattatgttacacatttggcgaagttgtctcttgtaatttatattttaaatgaaaaaagtattttagagcttttaatgaaggggaagagtataaactttctttcatattcactctgtattacagaccgtctcctaaatcaagattgtgcattattagagttctcaaagacagatacttccatatggacccctgttcatttttcttatttactagattattttgctaaatttagcacactagcattaaga

SEQ ID NO: 19510 - DNA, 1979 bp, Homo Sapiens
gcacgaggcttacatgagcattttaggaatgacaccagggtttggagataaaacatttgttgttcagggatttggtaatgtgggcctacactctatgagatatttacatcgttttggtgctaaatgtattgctgttggtgagtctgatgggagtatatggaatccagatggtattgacccaaaggaactggaagacttcaaattgcaacatgggtccattctgggcttccccaaggcaaagccctatgaaggaagcatcttggaggccgactgtgacatactgatcccagctgccagtgagaagcagttgaccaaatccaacgcacccagagtcaaagccaagatcattgctgaaggtgccaatgggccaacaactccagaagctgacaagatcttcctggagagaaacattatggttattccagatctctacttgaatgctggaggagtgacagtatcttactttgagtggctgaagaatctaaatcatgtcagctatggccgtttgaccttcaaatatgaaagggattctaactaccacttgctcatgtctgttcaagagagtttagaaagaaaatttggaaagcatggtggaactattcccattgtacccacggcagagttccaagacaggatatcgggtgcatctgagaaagacatcgtgcactctggcttggcatacacaatggagcgttctgccaggcaaattatgcgcacagccatgaagtataacctgggattggacctgagaacagctgcctatgttaatgccattgagaaagtcttcaaagtgtacaatgaagctggtgtgaccttcacatagatggatcatggctgacttcctcactatcctcttcacatgtaacttctgcagacctatcacaagtttacatgtaaccacagaaatccctttctctcctgactcattaataatggataccattctcaacaagtcaatccaagtcagcccgttaaggagaaagaaattaaggttagcggatcatgtacaagctgagtgtgaaagtagaaatcacctacaccagagagccattttggtattttgcctttaaataaaaagcctcctttatctggctgtgcagccttgctctgtggcttttcccaacacaatcagtgctagtgctggggaggaacagtcaagagcagtcagttgcttgcttattttttctggatgagtctgggacacactgtaactttaacacatttaagaagtaggtgtgtggccttttcagaaggtggcatggtcctcaagtgagttcttagtattttatatcagcaaaataattcaattttgcaggttgcaaacaaatataaaacctgtttctgtttatgaatattattcttttagaatagaataagtacatgctgctgtaataaaattgcctttaatcacttaacaagcctaaccttgactcaaacagtgaatgcctatagaaataataaatgaaaaaaactagtatttttatatcataaaacaatgtcatttatagcttatcattcatgtattgtccagcagacattaaaagccctgtggataattaagttatcttcatacctgcaaaatggtggaggctattttcattaaaactgtcagaatttgcttactataattatgatacagtccaaagaatgcagtcactttttatcatgttaactaattgttctcttttgaagatctatggttgactaattaaacaataattcaagtagagtgtcccagaaaaaaaccacttgggctccctgtttggagtctggctggctctgagcattgccaatggcccctactcacctgactttgtatcctctccttttagaggctttgcattctgcacccagcttcactaacagtgggctgaaaacatcccttgggttgagtgtttcatttgggagttatttggccagggccttttgaacagtagtgtccccatgaagtgctagataatatatgtgtaagagtcagc

SEQ ID NO: 19511 - DNA, 856 bp, Homo Sapiens
gcacgaggaaaggatttaccgttctgcaacaacggactggtacatacaggatgatcacaatggtaaggcacataaattattttcccactggaaacctgccctgtccaccccttctcatttcccttaaccttatcttcaaactactttagctgagaagcttttcaccagactgagttagtggtggcttatacctatttatatttgtattaattgcttacagattatacctcatattagcaattacattacactacaagaaaatgtatttgcataggctcttgcttatctttgttttgcaaaattgttctacttagaaaacagtccttaaaatagtttgactcttcctgttagtaatatattaatctttcatttaaccagctaggcagcattaaatagaattgaagaaataccatagtatttattttacaccccctctcccacgaagtttatgtttggattacatgcacgtgtgagattatttgcaataattcataggttccaagggtgttgatgaatagtcatacatttttttggactttgttataattcattgtggtaagaatgattgaaatgcagatttaacaatcttataatctattgaatggcatttttgataaagcactggaggtcttattgcccaactgattgtaatgaggcagtaagggtgaaaacattgtacatgttgtgaagaaagtatttaaatcccacttttgcgcagatttaacaaacgtgaggaacttttttatttagaaggataattttgaagatgaaaatgtatttcatcttaattgttttttcaatttaaggggataatttatacatcctttcagacaagaatgtacgcaaaatgaggggg

SEQ ID NO: 19512 - DNA, 902 bp, Homo Sapiens
gcacgaggcggaggcgccatattggaggggacaaaactccggcgacagcgagtgacacaaataaacccctggacccccttgttccctcagctctaagggccgcgatgttgtacctagaagactatctggaaatgattgagcagcttcctatggatctgcgggaccgcttcacggaaatgcgcgagatggacctgcaggtgcagaatgcaatggatcaactagaacaaagagtcagtgaattctttatgaatgcaaagaaaaataaacctgagtggagggaagagcaaatggcatccatcaaaaaagactactataaagctttggaagatgcagatgagaaggttcagttggcaaaccagatatatgacttggtaagtaaaagtaatgtgcatactgtgccataagtacttgaataacagattatatcttaaattgtattggcttaaatgtagtaggaagaagcaactaaaactgaagtattgctctcttgatcacatctaatttgacatttcagtgtccattttatggtttctttgtggaaaagtcagagtggttagttaatgtggtgagaactgtacattttagcaagtctatacggcggtaaggtggtttctgatgttagatattttttaaacaagaattaatgtttaactttattttactaatccttgtcttcttaaggtagtgtgtttacttgccttatacatcattttgagattgtttctgtggtaaaatacacctaagaagactgctttgacaagagttcttggtagtctgattaaaatgaagaagaatcatttgaatcagtgtttatgtgagtgatgttaaaagatcgtatgtaacagctgtgtcagttgtttaagcaatacagatgacaaactttaaccagatcctttttttgc

SEQ ID NO: 19513 - DNA, 1059 bp, Homo Sapiens
gcacgaggcgggtggaagctgaccccaagccacccttcacctggacaggatgagagtgtcaggtgtgcttcgcctcctggccctcatctttgccatagtcacgacatggatgtttattcgaagctacatgagcttcagcatgaaaaccatccgtctgccacgctggctggcagcctcgcccaccaaggagatccaggttaaaaagtacaagtgtggcctcatcaagccctgcccagccaactactttgcgtttaaaatctgcagtggggccgccaacgtcgtgggccctactatgtgctttgaagaccgcatgatcatgagtcctgtgaaaaacaatgtgggcagaggcctaaacatcgccctggtgaatggaaccacgggagctgtgctgggacagaaggcatttgacatgtactctggagatgttatgcacctagtgaaattccttaaagaaattccggggggtgcactggtgctggtggcctcctacgacgatccagggaccaaaatgaacgatgaaagcaggaaactcttctctgacttggggagttcctacgcaaaacaactgggcttccgggacagctgggtcttcataggagccaaagacctcaggggtaaaagcccctttgagcagttcttaaagaacagcccagacacaaacaaatacgagggatggccagagctgctggagatggagggctgcatgcccccgaagccattttagggtggctgtggctcttcctcagccaggggcctgaagaagctcctgcctgacttaggagtcagagcccggcaggggctgaggaggaggagcagggggtgctgcgtggaaggtgctgcaggtccttgcacgctgtgtcgcgcctctcctcctcggaaacagaaccctcccacagcacatcctacccggaagaccagcctcagagggtccttctggaaccagctgtctgtggagagaatggggtgctttcgtcagggactgctgacggctggtcctgaggaaggacaaactgcccagacttgagcccaattaaattttatttttgctggttttgaaaa

SEQ ID NO: 19514 - DNA, 779 bp, Homo Sapiens
cctaaaaaaaatcccccgggctgcaggaattcggcacgaggggcagccccagacctgcctgccttcctgacttctgttccagagcaaaggtcattcagccgcttgaatcagccttttccccccacccggtccccaactttgtttacccgataaggaaggtcagcattcaaagtcaagtagcgccatttatcttcccgtgcgctctacaaatagttccgtgagaaagatggccgggaactcgatcctgctggctgctgtctctattctctcggcctgtcagcaaagttattttgctttgcaagttggaaaggcaagattaaaatacaaagttacgcccccagcagtcactgggtcaccagagtttgagagagtatttcgggcacaacaaaactgtgtggagttttatcctatattcataattacattgtggatggctgggtggtatttcaaccaagtttttgctacttgtctgggtctggtgtacatatatggccgtcacctatacttctggggatattcagaagctgctaaaaaacggatcaccggtttccgactgagtctggggattttggccttgttgaccctcctaggtgccctgggaattgcaaacagctttctggatgaatatctggacctcaatattgccaagaaactgaggcggcaattctaactttttctcttccctttaatgcttgcagaagctgttcccaccatgaaggtaatatggtatcatttgttaaataaaaataaagtctttattctgtttttcttgaaaaaaa

SEQ ID NO: 19515 - DNA, 778 bp, Homo Sapiens
gcacgaggcggaagcggcggtgcaggtttcttgccttgatgtactggagcaatcagatcacacggcggcttggagagtgagtgcaaggttttatgagtggaattagccctcagcagatgggggagccagaaggcagttggagtgggaagaacccagggaccatgggcgcctccaggctctataccctggtgctggtcctgcagcctcagcgagttctcctgggcatgaaaaagcgaggcttcggggccggccggtggaatggctttgggggcaaagtgcaagaaggagagaccatcgaggatggggctaggagggagctgcaggaggagagcggtctgacagtggacgccctgcacaaggtgggccagatcgtgtttgagttcgtgggcgagcctgagctcatggacgtgcatgtcttctgcacagacagcatccaggggacccccgtggagagcgacgaaatgcgcccatgctggttccagctggatcagatccccttcaaggacatgtggcccgacgacagctactggtttccactcctgcttcagaagaagaaattccacgggtacttcaagttccagggtcaggacaccatcctggactacacactccgcgaggtggacacggtctagcgggagcccagggcagcccctgggcaggagacgtggctgctgaacagccgcaaaccatcttcacctgggggcattgagtggcgcagagccgggtttcatctggaattaactggatggaagggaaaataaagctatctagcggtgaa

SEQ ID NO: 19516 - DNA, 995 bp, Homo Sapiens
gcacgagggcgcgggaacaaacgaagatgccttgattgaaatcttaactaccaggacaagcaggcaaatgaaggatatctctcaagcctattatacagtatacaagaagagtcttggagatgacattagttccgaaacatctggtgacttccggaaagctctgttgactttggcagatggcagaagagatgaaagtctgaaagtggatgagcatctggccaaacaagatgcccagattctctataaagctggtgagaacagatggggcacggatgaagacaaattcactgagatcctgtgtttaaggagctttcctcaattaaaactaacatttgatgaatacagaaatatcagccaaaaggacattgtggacagcataaaaggagaattatctgggcattttgaagacttactgttggccatagttaattgtgtgaggaacacgccggcctttttagccgaaagactgcatcgagccttgaagggtattggaactgatgagtttactctgaaccgaataatggtgtccagatcagaaattgaccttttggacattcgaacagagttcaagaagcattatggctattccctatattcagcaattaaatcggatacttctggagactatgaaatcacactcttaaaaatctgtggtggagatgactgaaccaagaagataatctccaaaggtccacgatgggcttttccaacagctccaccttacttcttctcatactatttaagagaacaagcaaatataaacagcaacttgtgttcctaacaggaattttcattgttctataacaacaacaacaaaagcgattattattttagagcatctcatttataatgtagcagctcataaatgaaattgaaaatggtattaaagatctgcaactactatccaacttatatttctgctttcaaagttaagaatctttatagttctaatccattaaatataaagcaagataataaaaattgttgcttttgtt

SEQ ID NO: 19517 - DNA, 1100 bp, Homo Sapiens
  misc_feature (1033)..(1047): n is a, c, g, or t
gcacgaggcagaatcattgatatttggatccttcttcagccagaggaagaacggaggaaacaaaacctcgtcattaaagacaaatttatcagaagatgggtgcacaaagaaggctttagtggcttcaagaggtatgtgaccgctgccgaggacaaggagcttgaagccaagatcgcagttgttgaaaagtataacatcaggattccagagctggtgcaaaggatagaaaaatgccatatagaagatttggactttgcagagtacattctgggcactgtgcacaaagccaaaggcctggagtttgacactgtgcatgttttggatgattttgtgaaagtgccttgtgcccggcataacctgccccagcttccgcacttcagagttgagtcattttctgaggatgaatggaatttactgtatgttgcagtaactcgagccaagaagcgtctcatcatgaccaaatcattggaaaacattttgactttggctggggagtacttcttgcaagcagagctgacaagcaacgtcttaaaaacaggcgtggtgcgctgctgcgtgggacagtgcaacaatgccatccctgttgacaccgtccttaccatgaagaagctgcccatcacctatagcaacaggaaggaaaacaaggggggctacctctgccactcctgtgcggagcagcgcatcgggcccctggcgttcctgacagcctccccggagcaggtgcgcgccatggagcgcaccgtggagaacatcgtactgccccggcatgaggccctgctcttcctcgtcttctgaggacaaggcgcacgttctccgcagtgcagagcagcttgccgaggaccccgcgtgaagaaagccagcgaggggggcttctgctccctgagactctgggttcacccacagcactttttgaggaagaggacaccagcccaagctggacctgccatttctccactccctacagacagccagtctccacttgcctcccctctggatgtatctggtcagggaagtgggggatgttcttttgatnnnnnnnnnnnnnnnttttatgtatttaaacttttattacaagatttcaattaaacaggcaccatagc

SEQ ID NO: 19518 - DNA, 363 bp, Homo Sapiens
  misc_feature (61)..(71): n is a, c, g, or t
ccacgcgtccgtcctgctcaaatcaaacaaaaactgctggaactgaggccctggagggggnnnnnnnnnnnccacatgatgcgggaaaacccaaagctggtggagggccgtgacctgctgagctgcaccagctctgagcctctgaccctctgagagatgatgtcctgcccaggcccgatggccactaggaccctgcaagcaactctgctctgtgaccaggccaggattcctggagctggcctgagagggctcaatggaccctcggggacccaagtggggctttcaaccctctcccccaccacccagcccactgcactgaaatgagactttattctgaaattattaaaaagaacagagatgctc

SEQ ID NO: 19519 - DNA, 870 bp, Homo Sapiens
  misc_feature (281)..(289): n is a, c, g, or t
gcacgaggcttaaaacaaaagatatttttaacccactgacagaacaacaaggttaagcttcatctgcttggtgtcccacagaacttgcacaagcagttgttattgggaaagtacagtctcaaaaccagcaacagcagcagtacctacagccctttttttggagagaagtttaaatgctttactgttggggcagtccatttctaatcctgacttggtgacagtatcatgtgtatttataaaacaaggctagccatatttaggacaactgaagaaaagctggnnnnnnnnncaagcaaacttgaacactgaagcaacctcaagcatctctttattttgatgatatatttttgtaaggaaaatattcagatgatcaggaatgtatataactgaaatcaagaaaaagaacagtatgcatttaaaaagacagaattatgaaattatatgagtgcttagaatggggctaagggaagtgctgaaatagagcaaaggatggaagataatatagactaccacccactgtaaatgtttgcaagtggctgtgttttaaatgggattattacagttgatctctatgaatgtcagagccctaactttcaggctttgcattttgtatatgggaagaaatatgacaatcctaggtaattaaaccatagacccaaagcccttacgtttgatgcaatttatttttaaaataggccttgtttttcagcttcatctgcagttctatgtgaagattgataaatcagtttttacttgttttattaataaaacgtaatttggatatcttgagttgatggttttgtgatttagctgggtaaactatctttgtaacagataagttatttataaaaattaaaaaacttatattct

SEQ ID NO: 19520 - DNA, 1007 bp, Homo Sapiens
tgagccaccacgcccggccaggaagccatttttcatgggagggatatagggagaggaaggcgatatttacatcccactgtgcacaactcagtaccgcctattcattttcttgaacttctcataatgatagtcatcagttgccttctcgttagcaggacgcttgcggttaggaggggaccgctcaggctctggcttctccgtgtcgcctactctcaagggccgggccttgggctcttctttgtttctccgtatgggcgcgttgagctcctcatgataaaatctgttgtgctgcacataattcacagccatgttggtaggcacgaaggaggtctcgctgtctttcttcttgttctgctgctctgccagcagacgggccttggcatcctccgtggaaatgatattttttattttagcatcgatgcccaggtccacctcaggaatgccactcagcatctgggttggaaagcatctcctcggtcttctttgctgaggaaacacggatgttttctggaagttcataaagacagtcctctgcattctttgggcttaactttctgttcctcatgttccacgatccctttcctcttctttagctctgtctcaatgtacttcatcatgtctgcatcctcatcccttcggttggtttctgcagaaaacgatgtccccaggtgcaggtcctcctcctcactgatcttatctttgcccctttccttcagtttcttcatatccaccataccacctgtcttcatctgaaagggatcatccactagagtggtctcctcttgtaccttctctcccaccagcaaggccacagcactcaccccgttgggcctcttcctcaagttctgtacctctctggtctcttccagttttaatcgaacctcctctgagtcctgctcatcttcctctgactccgagtcgccccggcggcgacggaaaatcttccggacgaccggcatggtgacaacggccgagttgtacagccgccgcgcctctgcgcctcgtgc

SEQ ID NO: 19521 - DNA, 1242 bp, Homo Sapiens
gcacgaggctgaccttcagcgcctcggctccagcgccatggcgccctccaggaagttcttcgttgggggaaactggaagatgaacgggcggaagcagagtctgggggagctcatcggcactctgaacgcggccaaggtgccggccgacaccgaggtggtttgtgctccccctactgcctatatcgacttcgcccggcagaagctagatcccaagattgctgtggctgcgcagaactgctacaaagtgactaatggggcttttactggggagatcagccctggcatgatcaaagactgcggagccacgtgggtggtcctggggcactcagagagaaggcatgtctttggggagtcagatgagctgattgggcagaaagtggcccatgctctggcagagggactcggagtaatcgcctgcattggggagaagctagatgaaagggaagctggcatcactgagaaggttgttttcgagcagacaaaggtcatcgcagataacgtgaaggactggagcaaggtcgtcctggcctatgagcctgtgtgggccattggtactggcaagactgcaacaccccaacaggcccaggaagtacacgagaagctccgaggatggctgaagtccaacgtctctgatgcggtggctcagagcacccgtatcatttatggaggctctgtgactggggcaacctgcaaggagctggccagccagcctgatgtggatggcttccttgtgggtggtgcttccctcaagcccgaattcgtggacatcatcaatgccaaacaatgagccccatccatcttccctacccttcctgccaagccagggactaagcagcccagaagcccagtaactgccctttccctgcatatgcttctgatggtgtcatctgctccttcctgtggcctcatccaaactgtatcttcctttactgtttatatcttcaccctgtaatggttgggaccaggccaatcccttctccacttactataatggttggaactaaacgtcaccaaggtggcttctccttggctgagagatggaaggcgtggtgggatttgctcctgggttccctaggccctagtgagggcagaagagaaaccatcctctcccttcttacaccgtgaggccaagatcccctcagaaggcaggagtgctgccctctcccatggtgcccgtgcctctgtgctgtgtatgtgaaccacccatgtgagggaataaacctggcactaggtcttgtggtt

SEQ ID NO: 19522 - DNA, 382 bp, Homo Sapiens
ggaatggtgtccaataataatttattttaaaaaaatctcaaaacatgttcaaacacattcagtaacaaagatcccccattggcacacacattaagaaagcacacaccctaggcttctagttgggctaattaaaatctctatgggtggaaaggggggtgggtgtacttaattaagcttttttgaagtgcaaagctatgcctaacagatgagcttgaaagctgcagaatttaagatagacttaatttttcatgattttcccaaagccagtcatgatatttatttaatttgtgggcttcagggggcacctggaagaaacataatatacagaggcagagaccctaatgtaacctagttcgaaatacattttttaaaattggctttt

SEQ ID NO: 19523 - DNA, 893 bp, Homo Sapiens
gcacgagggtgacacttggctctgtgcttggccgctatgatgggaatgtgtatgaaaacttgtttgagtgggctaagaactccccactgaacaaagcagaggtccacgaatcttacaagcacctgaagtcactgcagtccaagctctgaagtgtcacaaggacaagtttaatctgcttcagaaagcgcctgtgtgcaactcaaattttgtggaatctttttcgaattcaaatagctatagagcaaatgataaattgacccctttttataaatggagggaaaaaatgaacagatttcagagattaaatgaaaaaaagcagatgttttaagtgcaattaacactgaaagagacctgttaaaccattcagaaaaagcttaagaaatgcgatatgacttccttttgtaatgctgctgatcccagtagactatgacttttgataattagcagaatttaactactgagtagttgattattttcacattttaattgctaatcactggctatataagtgtttttaagcaaaggtatttttgaagtggtgtagaacccttccaagctttcctgctcagtgttctaccagacttaccctggggcctggcttaaaagcaggattgaagaaaagggactgggggaaggaaacttattggaaaacttgatgcgaatgagtttctgcttggcacagtctctgcctgcttgctctcctttgctgatggattgcatttatcaaactattcatgctagcatttttccaacgagggaacttattccgcacgggcctactgtaggaccattgtctcgtgtaattaggaattttccatttgaaggattgctaaattgtcacagtagtacgaagtatagggaaacctctcagctgtggcactgttgtagctttg

SEQ ID NO: 19524 - DNA, 919 bp, Homo Sapiens
gcacgaggatttacacatacacaatgagatagcttgaggataagatcccagtttaaacataaagttcatttatgtttcatatatactttatacacatagcctgaaggtaatttcatacaatattttaaataattttggcatgaaacaaagtgtggatacactgaaccatcagaaagcaaaggtgttaacatctccgccacccatgtggacgatctgtgattgtttggcatcaccatcattcctgattctgaatttatatgttaccgataagcaatcatttttttacacttattcacacataagtacttaacagtaaaaaaaatgacataccagtaatacaacgaaaaaaatagtgtattcaggttaagtaagccagcacagtagtgtcaccagaatacctgtatcagctgttaagcaacaataacaaataacagtaggctttcagtttccaagtatgatgctgttttgactaaaaggttactgtacactgtattttattttatttttaggtgagaagaagcatcagaagcagttgagggaccaagaagtgggtcctgtagagaggaagaagcattcctctggatggcttttttaaatgtttctttcagagtcatctgcctcattaatgatgctttttgtcttagaagtctctctttgattttataaactgacatgatttcttgctctgttatgaatgcatgctgctctagtcctttaataagcccatcacacatttttaccatgtcgtctataggcactttttctgcagtgttaacatcatcttcattatcattatcatcatgatcatcttgattcagaaccatttttgttacttcaccattggacaatgaatgaacaactggagcctcattattactgttaaaaacatctttgatatcctcttcttccagcttactga

SEQ ID NO: 19525 - DNA, 1624 bp, Homo Sapiens
gcacgaggtgcagacccgcgtgtggcgcaggcaaggaccctcaaaataaacagcctctaccttgcgagccgtcttccccaggcctgcgtccgagtctccgccgctgcgggcccgctccgacgcggaagatctgactgcagccatgagcagcaatgagtgcttcaagtgtggacgatctggccactgggcccgggaatgtcctactggtggaggccgtggtcgtggaatgagaagccgtggcagaggtttccagtttgtttcctcgtctcttccagatatttgttatcgctgtggtgagtctggtcatcttgccaaggattgtgatcttcaggaggatgaagcctgctataactgcggtagaggtggccacattgccaaggactgcaaggagcccaagagagagcgagagcaatgctgctacaactgtggcaaaccaggccatctggctcgtgactgcgaccatgcagatgagcagaaatgctattcttgtggagaattcggacacattcaaaaagactgcaccaaagtgaagtgctataggtgtggtgaaactggtcatgtagccatcaactgcagcaagacaagtgaagtcaactgttaccgctgtggcgagtcagggcaccttgcacgggaatgcacaattgaggctacagcctaattattttcctttgtcgcccctcctttttctgattgatggttgtattattttctctgaatcctcttcactggccaaaggttggcagatagaggcaactcccaggccagtgagctttacttgccgtgtaaaaggaggaaaggggtggaaaaaaaccgactttctgcatttaactacaaaaaaagtttatgtttagtttggtagaggtgttatgtataatgctttgttaaagaaccccctttccgtgccactggtgaatagggattgatgaatgggaagagttgagtcagaccagtaagcccgtcctgggttccttgaacatgttcccatgtaggaggtaaaaccaattctggaagtgtctatgaacttccataaataactttaattttagtataatgatggtcttggattgtctgacctcagtagctattaaataacatcaagtaacatctgtatcaggccctacatagaacatacagttgagtgggagtaaacaaaaagataaacatgcgtgttaatggctgttcgagagaaatcggaataaaagcctaaacaggaacaacttcatcacagtgttgatgttggacacatagatggtgatggcaaaggtttagaacacattattttcaaagactaaatctaaaacccagagtaaacatcaatgctcagagttagcataatttggagctattcaggaattgcagagaaatgcattttcacagaaatcaagatgttatttttgtatactatatcacttagacaactgtgtttcatttgctgtaatcagtttttaaaagtcagatggaaagagcaactgaagtcctagaaaatagaaatgtaattttaaactattccaataaagctggaggaggaaggggagtttgactaaagttctttttgtttgtttcaaattttcattaatgtatatagtgcaaaataccatattaaagaggggaatgtggaggactg

SEQ ID NO: 19526 - DNA, 1176 bp, Homo Sapiens
gcacgagggaatatagtaaaaagtccgatttagatacttcccaaccactcagtgaaaaaccaattacacacaaagttgaggaagaggatggcaagactgcaactcaaccactgttgaaaaaagaatccaaaggccctattgtgcctttaaatgtagctgaccaaaagcttcttgaagctagtacacagtttcagaaaaaacaaggaaagaatactattgatgtctggtggctttttgatgatggaggtttgaccttattgataccttaccttctgacgaccaagaaaaaatggaaagactgtaagatcagagtattcattggtggaaagataaacagaatagaccatgaccggagagcgatggctactttgcttagcaagttccggatagacttttctgatatcatggttctaggagatatcaataccaaaccaaagaaagaaaatattatagcttttgaggaaatcattgagccatacagacttcatgaagatgataaagagcaagatattgcagataaaatgaaagaagatgaaccatggcgaataacagataatgagcttgaactttataagaccaagacataccggcagatcaggttaaatgagttattaaaggaacattcaagcacagctaatattattgtcatgagtctcccagttgcacgaaaaggtgctgtgtctagtgctctctacatggcatggttagaagctctatctaaggacctaccaccaatcctcctagttcgtgggaatcatcagagtgtccttaccttctattcataaatgttctatacagtggacagccctccagaatggtacttcagtgcctagtgtagtaactgaaatcttcaatgacacattaacatcacaatggcgaatggtgacttttctttcacgatttcattaatttgaaagcacacaggaaagttgctccattgataacgtgtatggagacttcggttttagtcaattccatatctcaatcttaatggtgattcttctctgttgaactgaagtttgtgagagtagttttcctttgctacttgaatagcaataaaagcgtgttaactttttgattgatgaaagaagtacaaaaagcctttagccttgaggtgccttctgaaattaaccaaatttcatccatatatcctcttttataaacttatagaatgtc

SEQ ID NO: 19527 - DNA, 748 bp, Homo Sapiens
gcacgaggtagttaaattttttttatttcacgttaccatgccatttcacattaccataccatcagatagcatggcttattgtgggcatttctgcagtgaatacattttccaaaacagttaaattgtctgtttggatttgctttaaagtcttgtgtaaaagagaagaaactatttctataataaaaagcactctcatcagatatctgacataattagatacaatataacattttactaagttcagtattcatgttttaaaggtgtttatactgatttgattgtgctggcaaatatactgtattgttaatattgaactgtttatttttctcttagtcttcttatttaattaacttcattgccgctggattctgttcagcctttaaaaatatttcttactggtcattgctctgcagaactcaaaaagaaaattgtacttgttcatagacatttttaaagggttaatttattgttcagccttatcccttggcacgtaaacagactactaaacttattgtaggttcgtttgagctttgtgttgtaaaattaaagatgcttctgtaaagttttcaaggtagggagtgattttattattgtgtatatctaatatattaagtatgtgtgatactaaggtttgactgctatactaatttggactgttgatcacatgtacttaaacatctgatactgtattctaagacaggttgtttttgcaattaaattaattttaacaacacgatcatgaataaac

SEQ ID NO: 19528 - DNA, 2352 bp, Homo Sapiens
gcacgaggagaaggccagctggttgggggaacagccccagttctggtcgaagacgcaggttctggactggatcagctaccaagtggagaagaacaagtacgacgcaagcgccattgacttctcacgatgtgacatggatggggccaccctctgcaattgtgcccttgaggagctgcgtctggtctttgggcctctgggggaccaactccatgcccagctgcgagacctcagtgagtccaggcccctggaggctggggagcagctccacatgttgagcccagtcgagttcagtgtggccgtaggcaggccctggagctctgggccagctgcacagccagagagagcccttgagggagggattaggggagtgtgacccttccttccttccttgtcagcttccagctcttctgatgagctcagttggatcattgagctgctggagaaggatggcatggccttccaggaggccctagacccagggccctttgaccagggcagcccctttgcccaggagctgctggacgacggtcagcaagccagcccctaccaccccggcagctgtggcgcaggagccccctcccctggcagctctgacgtctccaccgcagggactggtgcttctcggagctcccactcctcagactccggtggaagtgacgtggacctggatcccactgatggcaagctcttccccagcgatggttttcgtgactgcaagaagggggatcccaagcacgggaagcggaaacgaggccggccccgaaagctgagcaaagagtactgggactgtctcgagggcaagaagagcaagcacgcgcccagaggcacccacctgtgggagttcatccgggacatcctcatccacccggagctcaacgagggcctcatgaagtgggagaatcggcatgaaggcgtcttcaagttcctgcgctccgaggctgtggcccaactatggggccaaaagaaaaagaacagcaacatgacctacgagaagctgagccgggccatgaggtactactacaaacgggagatcctggaacgggtggatggccggcgactcgtctacaagtttggcaaaaactcaagcggctggaaggaggaagaggttctccagagtcggaactgagggttggaactatacccgggaccaaactcacggaccactcgaggcctgcaaaccttcctgggaggacaggcaggccagatggcccctccactggggaatgctcccagctgtgctgtggagagaagctgatgttttggtgtattgtcagccatcgtcctgggactcggagactatggcctcgcctccccaccctcctcttggaattacaagccctggggtttgaagctgactttatagctgcaagtgtatctccttttatctggtgcctcctcaaacccagtctcagacactaaatgcagacaacaccttcctcctgcagacacctggactgagccaaggaggcctggggaggccctaggggagcaccgtgatggagaggacagagcaggggctccagcaccttctttctggactggcgttcacctccctgctcagtgcttgggctccacgggcaggggtcagagcactccctaatttatgtgctatataaatatgtcagatgtacatagagatctattttttctaaaacattcccctccccactcctctcccacagagtgctggactgttccaggccctccagtgggctgatgctgggacccttaggatggggctcccagctcctttctcctgtgaatggaggcagagacctccaataaagtgccttctgggctttttctaacctttgtcttagctacctgtgtactgaaatttgggcctttggatcgaatatggtcaagaggttggaggggaggaaaatgaaggtctaccaggctgagggtgagggcaaaggctgacgaagaggggagttacagatttcctgtagcaggtgtgggcttacagacacatggactgggctgggaggcgagcaaaggaagcagctgagactgttggagaacgcttacaagacttcatgcaagcaaggacatgaactcagaacactgaggtcagaagcatcctgctgtcatgacaccgctcgagtgaccttgaccttgaccaagtctgtcctgtttaggactgatttttcctattaggctagggtttggacctgatgttctcaagatgtctagaattgcatggctggccttgtggaatagatggttttgcattccagccaagtgtgctgtaaactgtatatctgtaatatgaatcccagcttttgagtctgacaaaatcagagttagttataataggaaagcctcgtgccgaattcctgcagcccgggg

SEQ ID NO: 19529 - DNA, 556 bp, Homo Sapiens
gcacgaggattcttcaacatttaatggtgccacagggttaaataatggccttacttttttggcctgaattttgccaaaattagcttcaaactctttttttgatccatttagatttgctagatgtccatcctttattctgtagcctgaggaattcagtttccttatcctgtactgtactatctgtggtgttaattcaagaaccattggcgtctctcttatctgagctatggaaattccttctctcaataatccttgcattctctcttctaaaactggaacagaataatataaaagggcaggacatttcaaaactaattgcttcaggtcatgatctgtgcatttaaaagcatttttagagaaggaaatactattctgtatacttcttgggcaaagttgaaaaagaaatcctttgagtttggatagaagctggagaatttcaaagctggtgaaaccttgctcctggagaaattctagtgtttcctttatagctgtgggagaatttaacaaaataaatgggttttggcttaacaattttagtagccaaactttcatcgga

SEQ ID NO: 19530 - DNA, 984 bp, Homo Sapiens
gcacgaggccgggaggtgcttgtgtgcctggtgcgggagctacggggcccagggattgtgtttaaagtagtgcttctaccaacatgtcccgtggttccagcgccggttttgaccgccacattaccattttttcacccgagggtcggctctaccaagtagaatatgcttttaaggctattaaccagggtggccttacatcagtagctgtcagagggaaagactgtgcagtaattgtcacacagaagaaagtacctgacaaattattggattccagcacagtgactcacttattcaagataactgaaaacattggttgtgtgatgaccggaatgacagctgacagcagatcccaggtacagagggcacgctatgaggcagctaactggaaatacaagtatggctatgagattcctgtggacatgctgtgtaaaagaattgccgatatttctcaggtctacacacagaatgctgaaatgaggcctcttggttgttgtatgattttaattggtatagatgaagagcaaggccctcaggtatataagtgtgatcctgcaggttactactgtgggtttaaagccactgcagcgggagttaaacaaactgagtcaaccagcttccttgaaaaaaaagtgaagaagaaatttgattggacatttgaacagacagtggaaactgcaattacatgcctgtctactgttctatcaattgatttcaaaccttcagaaatagaagttggagtagtgacagttgaaaatcctaaattcggattcttacagaagcagagattgatgctcaccttgttgctctagcagagagagactaaacattgtcgttagtttaccagatccgtgatgccacttacctgtgtgtttggtaacaacaaaccaacatcatggaggtccctggattgaaaaaggagcctctcccactcctcctaccaccgaagtggttaggactctatataaataaaaacaaggctcttgg

SEQ ID NO: 19531 - DNA, 803 bp, Homo Sapiens
acataatttaattattgaagatttcattggcaaaattaaaaacaaaaattctgctcaaaatgaagccaaaatattctgagtatttgcaaaacaatgttgatactatgagtggagttgttaatgttttgtgttcaaatacaatgtgtgaaacataaggaagctcagtaacttttgtgtggggtaacttttggattagaataataaatttcaatataagcccataaggttttatattattatttttcatagcttaaaaatcattgacatagaataattccaactaaagtacatattaaattcctggaaaataaattttgacttaacagggtaagttgtgaaaagacgttttgtcgcaggaaaaaggaaatcctccatttaaaaccctccatgctggaataaaggaggagtcccatcttttggtcattccacttcaggcttttgatataactaatcccttttcttcttctttcctgttttggcaagctttcggaaacaaaacaggcaacattttgtgatcataaatatcatagttgccacgcaggccagcaggaatgctatcacatccaaagagtggtactggatccaggtgaggttgtgggctgcgacccgaaggtgcttggctcctttatggcgcatgacaaactcaatccagaaaactgctcgatccaggggcttcaccggttgatcatgatgaattcttgataatttcatgatattctctttatagatagggtcattaatgactgacttccatgcattgagcaatctctacttgacatggtcctgatgtcaccctgaggggc

SEQ ID NO: 19532 - DNA, 957 bp, Homo Sapiens
ctgctagaaatgagtttattacagagagaggagacagggctccgacaggacgcacacacacggcactcatgctcctaaaacactgggtttgtgaagggacattataaaaatgaggaaataagctgtgatgttcagcatgtgtcagtttctaggaatacagagaaggggagagctgcaaggtggagcgattctgagggctgaaaatccctttcccagtacgaagacagcatccttcaatcccgccagctcatgtgcatctgagggtggggctctgtcttcatgctagaaaccaaactgctctcacagcttcctgctaaatcaccacggctaacggataagcagagacggactatccagtctgactactgagcactcaagtcgtcagtccagtggctacccgggaacgggggcagacagtgtgcgtgcacgtctacggggctggacagagtgtggttaaccggggaactgggcaagccggcgccgagcctgcgtcagccgtgcaagccgctccttcaggaacttccgcttgtcgctggtgtcgctccgctccttcaggagccagctgtaggtgtccttgtcctgcaggagctgcagcatggccttctgaagctgctggccgtacgtctggagcatgaagaactggatgatcaaagggatgtggctggagatgcgcttgctggcctcctggtgataggccatcaggtgctgaaagatctcctccatggaagagtctgttgccgagctggactggaaagccccaaaatcccaggatttcttcttcttttcttcttccagctccttctctctgaccttctgcaatgcacccctgtatacctgggtcctggcagtagacaatctgttcatctggaagtggaggccgatcagcttctcaccttctctcttctgttctgctctaatgtcttcattttggacttggcggttctgggaggttaaaaa

SEQ ID NO: 19533 - DNA, 931 bp, Homo Sapiens
gcacgaggcccgcctccccacccctgagcagcacctcacccaccactgctgcggccactatgcctgtggtgccctctgtggccagcctggcccctccgggggaggcctcgctctgcctggaagaggtggccccccctgccagtgggacccgcaaagctcgggtgctctatgactacgaggcagccgacagcagtgagctggccctgctggctgatgagctcatcactgtctacagcctgcctggcatggaccctgactggctcattggcgagagaggcaacaagaagggcaaggtccctgtcacctacttggaactgctcagctaggcaggtgcccccatcccccccgcattctggcctaggcaggagaggatgggcgcagccctgccacttaacttgtttgttggtgacacagttgttcagagtggggagaattcaccccattctgtccctgcccctagtcacctagctgtgagggtgcctgaggctgaatggctccacccctcccccagccctgcttctgacctgtggctctggagcccctgcccctgcctgcatccccgagcaccccaccctccaggctccactaaggagggaggggctgtctgcagcagctgcactcagcacctaggccagggtggggccgccgcagatgggctcaggaagccccaggtgcactcagcgagagccctgcctttcagttgccaaaagctgcatcaggggaatgcggcaaggcacacagggctctggcagccctggggactgggcgctgcccctgggaggggagagcctggccagggctggtgttggggcccggagcagcatcttccgggtgctatcctcccctcccacccctcacagctcaggccaaagtccagcggccgcagtcttcacctctccacactcacttttttatctggtgtttttacttc

SEQ ID NO: 19534 - DNA, 1180 bp, Homo Sapiens
  misc_feature (169)..(178): n is a, c, g, or t
gcacgaggagttaatataatagggcctgtgaaaacagaggcttttgcattgtctcttgacatcagaagttacaataggcatatgggcaaaatggtgtagcaggctcactggccgtttgttttttaaacacattttcacaagtttttgagacactggatttctttaattnnnnnnnnnntgccaagaaacattatttatacagggttgattgctttcatgttgttattctgtaccctatagtagcctccatgagaatctggtatttcttgctgcttggaactactttgcagtgattacttggttgcagtccaagtactctcgtttagtctgagcctggagatgttctagacttgcttctcccacctctgagattaggacaggaaaaatgtgaaatttcccaattacaggattatacggtaccatcacatcatttgtggaaattggggtgactgtatagctgggattgggctaaggactgtggtcttatctgtccacatacagccaaaatgcctatccagaaatccagttcgttggaaaggaaaattggtactcctgtgccacaggggttccagaaaagggaagtcactttaccttgcggtggtgggatcctgatgtctttcatccatttgtagtaaaagctggtaaagcttttcttactcctggttccctaccagtatttctaaacatgtcgcactttctccacaggcatgtggttttgacctttttttcaatcttctagaaagggaacggaagcagaagtgggacatcgagggctctgctgtcctctgcgctgggtgtggaatgctgctgcacctgtcccttctgctggctcagggaagtgtcttcttgcccacatttctgtggggaaaggtttttaatcctctgatgcttccatcttcctgtttaggccatgtgcccagaaacctggactgatctttctttaatagtgaacccctgggccactgaagagtaacatggctccactggacacaaaagagggatggaatcaacaggcagggggccttttataagccttagaaaagaaaatgaaactatttcatctttggacttttcatactattggagtgattttttttctttctaaacagggaaaataatgttacaaagcatctttttgttatttgtttgcatccctccccacaccctggtgttttaaatg

SEQ ID NO: 19535 - DNA, 1012 bp, Homo Sapiens
  misc_feature (899)..(935): n is a, c, g, or t
gcacgagggaaaccaaagagcctccccacaaacagctttgtgggatgcctgaagaactttcagctggattcaaaacccttgtataccccttcttcaagcttcggggtgtcttcctgcttgggtggtcctttggagaaaggcatttatttctctgaagaaggaggtcatgtcgtcttggctcactctgtattgttggggccagaatttaagcttgttttcagcatccgcccaagaagtctcactgggatcctaatacacatcggaagtcagcccgggaagcacttatgtgtttacctggaggcaggaaaggtcacggcctctatggacagtggggcaggtgggacctcaacgtcggtcacaccaaagcagtctctgtgtgatggacagtggcactcggtggcagtcaccataaaacaacacatcctgcacctggaactggacacagacagtagctacacagctggacagatccccttcccacctgccagcactcaagagccactacaccttggaggtgctccagccaatttgacgaccctgaggatccctgtgtggaaatcattctttggctgtctgaggaatattcatgtcaatcacatccctgtccctgtcactgaagccttggaagtccaggggcctgtcagtctgaatggttgtcctgaccagtaacccaagcctatttcacagcaaggaaattcaccttcaaaagcactgattacccaatgcacctccctccccagctcgagatcattcttcaattaggacacaaaccagacaggtttaatagcgaatctaattttgaattctgaccatggatacccatcactttgggcattcagtgctacatgtgtattttatataaaaatcccatttcttgaagataaaaaaattgttattcnnnnnnnnnnnnnnnnnnnnnnnnnnnnnnnnnnnnnttccactaaaaaattaaatgtcttttaagaaacattcttttccacttgtttaaaaaattaaatatattttaaagcac

SEQ ID NO: 19536 - DNA, 860 bp, Homo Sapiens
gcacgaggcctgaagggtcaagtgctgtctaccatcaacaccaaccagatgaacaacacacacgctgctgtatctccctgtggcagatttgtagcctcgtgtggcttcaccccagatgtgaaggtttgggaagtctgctttggaaagaagggggagttccaggaggtggtgcgagccttcgaactaaagggccactccgcggctgtgcactcgtttgctttctccaacgactcacggaggatggcttctgtctccaaggatggtacatggaaactgtgggacacagatgtggaatacaagaagaagcaggacccctacttgctgaagacaggccgctttgaagaggcggcgggtgccgcgccgtgccgcctggccctctcccccaacgcccaggtcttggccttggccagtggcagtagtattcatctctacaatacccggcggggcgagaaggaggagtgctttgagcgggtccatggcgagtgtatcgccaacttgtcctttgacatcactggccgctttctggcctcctgtggggaccgggcggtgcggctgtttcacaacactcctggccaccgagccatggtggaggagatgcagggccacctgaagcgggcctccaacgagagcacccgccagaggctgcagcagcagctgacccaggcccaagagaccctgaaaagcctgggtgccctgaagaagtgactctgggagggcccggcgcagaggattgaggaggagggatctggcctcctcatggcactgctgccatctttcctcccaggtggaagcctttcagaaggagtctcctggttttcttactggtggccctgcttcttcccattgaaactactcttgtc

SEQ ID NO: 19537 - DNA, 858 bp, Homo Sapiens
gcacgaggcccagcctcatctacaccccaggagccctggcctggtgagagggagtgggctcgggcctgggcaagggtgggcagcctccaggggcatgggggtggtgggcttctctcagctgcctggggctccacccccgtcctttggggtccctgggcacccctttagagtcactttccccggcaggccctaccgcccccagccctaccagccgcccgccctgggctgtggaccctgcgtttgccgagcgctatgccccggacaaaacgagcacagtgctgacccggcacagccagccggccacgcccacgccgctgcagagccgcacctccattgtgcaggcagctgccggaggggtgccaggagggggcagcaacaacggcaagactcccgtgtgtcaccagtgccacaaggtcatccggggccgctacctggtggcgctgggccacgcgtaccacccggaggagtttgtgtgtagccagtgtgggaaggtcctggaagagggtggcttctttgaggagaagggcgccatcttctgcccaccatgctatgacgtgcgctatgcacccagctgtgccaagtgcaagaagaagattacaggcgagatcatgcacgccctgaagatgacctggcacgtgcactgctttacctgtgctgcctgcaagacgcccatccggaacagggccttctacatggaggagggcgtgccctattgcgagcgagactatgagaagatgtttggcacgaaatgccatggctgtgacttcaagatcgacgctggggaccgcttcctggaggccctgggcttcagctggcatgacacctgcttcgtctgtgcgatatgtcagatcaacctgg

SEQ ID NO: 19538 - DNA, 1539 bp, Homo Sapiens
  misc_feature (953)..(1039): n is a, c, g, or t
  misc_feature (1254)..(1265): n is a, c, g, or t
gcacgaggatcaaggtttgcagacaagccaggatgcacgcttttatgctctgtcggccagtttcgagcctttcagcaacaaaggccagacgctggtggtgcagttcacggtgaaacatgagcagaacatcgactgtgggggcggctatgtgaagctgtttcctaatagtttggaccagacagacatgcacggagactcagaatacaacatcatgtttggtcccgacatctgtggccctggcaccaagaaggttcatgtcatcttcaactacaagggcaagaacgtgctgatcaacaaggacatccgttgcaaggatgatgagtttacacacctgtacacactgattgtgcggccagacaacacctatgaggtgaagattgacaacagccaggtggagtccggctccttggaagacgattgggacttcctgccacccaagaagataaaggatcctgatgcttcaaaaccggaagactgggatgagcgggccaagatcgatgatcccacagactccaagcctgaggactgggacaagcccgagcatatccctgaccctgatgctaagaagcccgaggactgggatgaagagatggacggagagtgggaacccctcagtgattcagaacccctgagtacaagggtgagtggaagccccggcagatcgacaacccagattacaagggcacttggatccacccagaaattgacaaccccgagtattctcccgatcccagtatctatgcctatgataactttggcgtgctgggcctggacctctggcaggtcaagtctggcaccatctttgacaacttcctcatcaccaacgatgaggcatacgctgaggagtttggcaacgagacgtggggcgtaacaaaggcagcagagaaacaaatgaaggacaaacaggacgaggagcagaggcttaaggaggaggaagaagacaagaaacgcannnnnnnnnnnnnnnnnnnnnnnnnnnnnnnnnnnnnnnnnnnnnnnnnnnnnnnnnnnnnnnnnnnnnnnnnnnnnnnnnnnnnnnaggaagatgtccccggccaggccaaggacgagctgtagagaggcctgcctccagggctggactgaggcctgagcgctcctgccgcagagcttgccgcgccaaataatgtctctgtgagactcgagaactttcatttttttccaggctggttcggatttggggtggattttggttttgttcccctcctccactctcccccaccccctccccgcccnnnnnnnnnnnngtattttatctttgattctccttcagccctcacccctggttctcatctttcttgatcaacatcttttcttgcctctgtccccttctctcatctcttagctcccctccaacctggggggcagtggtgtggagaagccacaggccctgagatttcatctgctctcctttcctggaacccagaaggagggcagcaaaaggggtggtgtctccaaccccccagcacctgaggaagacggggcttcttctcattcacccctcccttttccccctgcccc

SEQ ID NO: 19539 - DNA, 1288 bp, Homo Sapiens
gaattcggcacgaggcctcccccctcccaaagtgctaggattacaggcatgagccactgcgcccagcccttataaatttttgtatagacattcctttggttggaagaatatttataggcaatacagtcaaagtttcaaaatagcatcacacaaaacatgtttataaatgaacaggatgtaatgtacatagatgacattaagaaaatttgtatgaaataatttagtcatcatgaaatatttagttgtcatataaaaacccactgtttgagaatgatgctactctgatctaatgaatgtgaacatgtagatgttttgtgtgtatttttttaaatgaaaactcaaaataagacaagtaatttgttgataaatatttttaaagataactcagcatgtttgtaaagcaggatacattttactaaaaggttcattggttccaatcacagctcataggtagagcaaagaaagggtggatggattgaaaagattagcctctgtctcggtggcaggttcccacctcgcaagcaattggaaacaaaacttttggggagttttattttgcattagggtgtgttttatgttaagcaaaacatactttagaaacaaatgaaaaaggcaattgaaaatcccagctatttcacctagatggaatagccaccctgagcagaactttgtgatgcttcattctgtggaattttgtgcttgctactgtatagtgcatgtggtgtaggttactctaactggttttgtcgacgtaaacatttaaagtgttatattttttataaaaatgtttatttttaatgatatgagaaaaattttgttaggccacaaaaacactgcactgtgaacattttagaaaaggtatgtcagactgggattaatgacagcatgattttcaatgactgtaaattgcgataaggaaatgtactgattgccaatacaccccaccctcattacatcatcaggacttgaagccaagggttaacccagcaagctacaaagagggtgtgtcacactgaaactcaatagttgagtttggctgttgttgcaggaaaatgattataactaaaagctctctgatagtgcagagacttaccagaagacacaaggaattgtactgaagagctattacaatccaaatattgccgtttcataaatgtaataagtaatactaattcacagagtattgtaaatggtggatgacaaaagaaaatctgctctgtggaaagaaagaactgtctctaccagggtcaagagcatgacgcatcaatagaaagaaactcgggggaaa

SEQ ID NO: 19540 - DNA, 1539 bp, Homo Sapiens
gcacgaggccgctgtcctgtctagcagatacttgcacggtttacagaaattcggtccctgggtcgtgtcaggaaactggaaaaaaggtcataagcatgaagcgcagttcagtttccagcggtggtgctggccgcctctccatgcaggagttaagatcccaggatgtaaataaacaaggcctctatacccctcaaaccaaagagaaaccaacctttggaaagttgagtataaacaaaccgacatctgaaagaaaagtctcgctatttggcaaaagaactagtggacatggatcccggaatagtcaacttggtatattttccagttctgagaaaatcaaggacccgagaccacttaatgacaaagcattcattcagcagtgtattcgacaactctgtgagtttcttacagaaaatggttatgcacataatgtgtccatgaaatctctacaagctccctctgttaaagacttcctgaagatcttcacatttctttatggcttcctgtgcccctcatacgaacttcctgacacaaagtttgaagaagaggttccaagaatctttaaagaccttgggtatccttttgcactatccaaaagctccatgtacacagtgggggctcctcatacatggcctcacattgtggcagccttagtttggctaatagactgcatcaagatacatactgccatgaaagaaagctcacctttatttgatgatgggcagccttggggagaagaaactgaagatggaattatgcataataagttgtttttggactacaccataaaatgctatgagagttttatgagtggtgccgacagctttgatgagatgaatgcagagctgcagtcaaaactgaaggatttatttaatgtggatgcttttaagctggaatcattagaagcaaaaaaacagagcattgaatgaacagattgcaagattggaacaagaaagagaaaaagaaccgaatcgtctagagtcgttgagaaaactgaaggcttccttacaaggagatgttcaaaagtatcaggcatacatgagcaatttggagtctcattcagccattcttgaccagaaattaaatggtctcaatgaggaaattgctagagtagaactagaatgtgaaacaataaaacaggagaacactcgactacagaatatcattgacaaccagaagtactcagttgcagacattgagcgaataaatcatgaaagaaatgaattgcagcagactattaataaattaaccaaggacctggaagctgaacaacagaagttgtggaatgaggagttaaaatatgccagaggcaaagaagcgattgaaacacaattagcagagtatcacaaattggctagaaaattaaaacttattcctaaaggtgctgagaattccaaaggttatgactttgaaattaagtttaatcccgaggctggtgccaactgccttgtcaaatacagggctcaagtttatgtacctcttaaggaactcctgatgaaactgagagaaattaataaagctctaaataaaaaaatgggtttg

SEQ ID NO: 19541 - DNA, 807 bp, Homo Sapiens
  misc_feature (111)..(124): n is a, c, g, or t
gcacgaggcctccctgcatctgaccagcagcgcctttcccaactctagctgggggtgggccaggctgatgggacagaattggatacatacaccagcattccttttgaacgnnnnnnnnnnnnnntgggggctctcatgttttcaactgccaaaatgctctagtgccttctaaaggtgttgtcccttctagggttattgcatttggattggggtccctctaaaatttaatgcatgatagacacatatgagggggaatagtctagatggctcctctcagtactttggaggcccctatgtagtccgtgctgacagctgctcctagagggaggggcctaggcctcagccagagaagctataaattcctctttgctttgctttctgctcagcttctcctgtgtgattgacagctttgctgctgaaggctcattttaatttattaattgctttgagcacaactttaagaggacgtaatggggtcctggccatcccacaagtggtggtaaccctggtggttgctgttttcctcccttctgctactggcaaaaggatctttgtggccaaggagctgctatagcctggggtggggtcatgccctcctctcccattgtccctctgccccatcctccagcagggaaaatgcagcagggatgccctggaggtggctgagcccctgtctagagagggaggcaagccctgttgacacaggtctttcctaaggctgcaaggtttaggctggtggcccaggaccatcatcctactgtaataaagatgattgtgaaataaaactggctttggcttcttaaaaaa

SEQ ID NO: 19542 - DNA, 1390 bp, Homo Sapiens
atcccccgggctgcaggaattcggcacgagggttgctgtccgcggagtggaagcgcgtgcttttgtttgtgtccctggccatggcgctgcagctctcccgggagcagggaatcaccctgcgcgggagcgccgaaatcgtggccgagttcttctcattcggcatcaacagcattttatatcagcgtggcatatatccatctgaaacctttactcgagtgcagaaatacggactcaccttgcttgtaactactgatcttgagctcataaaatacctaaataatgtggtggaacaactgaaagattggttatacaagtgttcagttcagaaactggttgtagttatctcaaatattgaaagtggtgaggtcctggaaagatggcagtttgatattgagtgtgacaagactgcaaaagatgacagtgcacccagagaaaagtctcagaaagctatccaggatgaaatccgttcagtgatcagacagatcacagctacggtgacatttctgccactgttggaagtttcttgttcatttgatctgctgatttatacagacaaagatttggttgtacctgaaaaatgggaagagtcgggaccacagtttattaccaattctgaggaagtccgccttcgttcatttactactacaatccacaaagtaaatagcatggtggcctacaaaattcctgtcaatgactgaggatgacatgaggaaaataatgtaattgtaattttgaaatgtggttttcctgaaatcaggtcatctatagttgatatgttttatttcattggttaatttttacatggagaaaaccaaaatgatacttactgaactgtgtgtaattgttccttttatttttttggtacctatttgacttaccatggagttaacatcatgaatttattgcacattgttcaaaaggaaccaggaggtttttttgtcaacattgtgatgtatattcctttgaagatagtaactgtagatggaaaaacttgtgctataaagctagatgctttcctaaatcagatgttttggtcaagtagtttgactcagtataggtagggagatatttaagtataaaatacaacaaaggaagtctaaatattcagaatctttgttaaggtcctgaaagtaactcataatctataaacaatgaaatattgctgtatagctccttttgaccttcatttcatgtatagttttccctattgaatcagtttccaattatttgactttaatttatgtaacttgaacctatgaagcaatggatatttgtactgtttaatgttctgtgatacagaactcttaaaaatgttttttcatgtgttttataaaatcaagttttaagtgaaagtgaggaaataaagttaagtttgttttaaatttgtctt

SEQ ID NO: 19543 - DNA, 1109 bp, Homo Sapiens
  misc_feature (168)..(184): n is a, c, g, or t
  misc_feature (190)..(239): n is a, c, g, or t
gcacgaggggaggatatggcttgggcttggaacgattcttaacgtggattctgaataggtatcacatccgagacgtgtgcttataccctcgatttgtccagcgttgcacgccataaccattttctccagaagcatggaggaaagattatgaaaggaacaggctctttnnnnnnnnnnnnnnnnngccagnnnnnnnnnnnnnnnnnnnnnnnnnnnnnnnnnnnnnnnnnnnnnnnnnnactaccataaaaactatctcaaatcacctgaacatcaagtgatattaaggttgtcatcttaagaaaaaatatccatttttttcttaagttcgggaaacaaagttcggggaaaatacctggcatgaaactgtagttagggatacatttcagcattttactcactttatccaagttattcgttttattcaagttatatgtatgtataattcaacaattttagattatggtgtaagatactccagtaacttatctttctgtccttttaagtgtaccttgaattctttgatttattttattgcatcaatgaattaaaacaaaaatcttgggggaagaaattggcaatatcgtataaaaatctgctcatattagaacacagtataattcagcagtaaacactagaatcaaatgaatagccttttgtatcagttattaatcttttctaactctgcttagctgctaataatcctgaggcatagaaattgaagaatttgtaaaaatagaattgccttaaaggatttgaagtaagaacataattttggggagagttttttagtgattcacagtatccctcttagcattaatttaaggtaaagaggcagattgattttccctctttcctggtaattcctaagtaattaagaataaataagttccaaaagaaattgtagctggaatcttaataacaattgtgagtggctgtttgagttgcccccaccatgtccttagatctaatctgtgctaccttattaactcacagcaggcttactgaatggcttcatttcagatttagttgatttctccaccaaatgcatgtcatgtattctcaataggctgtattcccagcagtcaataaatgaacacccgtaaaaa

SEQ ID NO: 19544 - DNA, 908 bp, Homo Sapiens
gcacgagggcggcagcagcggctgcttgagatctgtttctggggcctctggcggtggcggcctggggcggcgcgacggctggtgcgcaggtacactgatgctgaagtactatgagccttcggaacttgtggagagactacaaagttttggttgttatggtccctttagttgggctcatacatttggggtggtacagaatcaaaagcagccctgttttccaaatacctaaaaacgacgacattcctgagcaagatagtctgggactttcaaatcttcagaagagccaaatccaggggaagtagcaggcttgcaatcttcaggtaaagaagcagctttgaatctgagcttcatatcgaaagaagagatgaaaaataccagttggattagaaagaactggcttcttgtagctgggatatctttcataggtgtccatcttggaacatactttttgcagaggtctgcaaagcagtctgtaaaatttcagtctcaaagcaaacaaaagagtattgaagagtgaagtaaaataaatatttggaattactaatttgtcattaaatcattctatgctgattagcttcataaacattgaactttttgattttatagccacaatgctgcatattcatactttaattcctaaagaataatttttaatgttaaaacgtgataatgcaataaatagaaaaatgtggtttacaaaaataaaaacggtcttcactagttaccacctgaagtaagatgtctcgtttggaagctaagaagccatcattgtgtaagagtgaaccactgacaactgagagagtcaagaccacactttctgtcttgaaaagaattgtaacatcatgctatgggctctcaggtaagctgaagcagctgcacaatggctttggaggtacgtgtgtacaacc

SEQ ID NO: 19545 - DNA, 1353 bp, Homo Sapiens
  misc_feature (936)..(948): n is a, c, g, or t
gcacgaggcccacttcgatgctataagagatgcagaaattcttcgtaaggcaatgaagggttttgggacagatgagcaggcaattgtggatgtggtggccaaccgttccaatgatcagaggcaaaaaaattaaagcagcatttaagacctcctatggcaaggatttaatcaaagatctcaaatcagagttaagtggaaatatggaagaactgatcctggccctcttcatgcctcctacgtattacgatgcctggagcttacggaaagcaatgcagggagcaggaactcaggaacgtgtattgattgagattttgtgcacaagaacaaatcaggaaatccgagaaattgtcagatgttatcagtcagaatttggacgagaccttgaaaaggacattaggtcagatacatcaggacattttgaacgtttacttgtgtccatgtgccagggaaatcgtgatgagaaccagagtataaaccaccaaatggctcaggaagatgctcagcgtctctatcaagctggtgaggggagactagggaccgatgaatcttgctttaacatgatccttgccacaagaagctttcctcagctgagagctaccatggaggcttattctaggatggctaatcgagacttgttaagcagtgtgagccgtgagttttccggatatgtagaaagtggtttgaagaccatcttgcagtgtgccctgaaccgccctgccttctttgctgagaggctctactatgctatgaaaggtgctggcacagatgactccaccctggtccggattgtggtcactcgaagtgagattgaccttgtacaaataaaacagatgttcgctcagatgtatcagaagactctgggcacaatgattgcaggtgacacgagtggagattaccgaagacttcttctggctattgtgggccagtaggagggannnnnnnnnnnnnaatgaaaaaaatttctattcttagcttatccttcagagcaatgacctgcatgcagcaatatcaaacatcagctaaccgaaagagctttctgtcaaggaccgtatcagggtaatgtgcttggtttgcacatgttgttattgccttaattctaattttattttgttctctacatacaatcaatgtaaagccatatcacaatgatacagtaatattgcaatgtttgtaaaccttcattcttactagtttcattctaatcaagatgtcaaattgaataaaatcacagcaatctctgattctgtgtaataatattgaataattttttatagggttactgaaagctctgcctccgggaatccctctaagtctgcttgatatagtggatagtatgttaaaactgtgtacttt

SEQ ID NO: 19546 - DNA, 700 bp, Homo Sapiens
gcacgaggaccagcagattatgagcttacagaaagcctggcctacattttactctttttggatttcttcctcatcaagagactgctgcggtgcctgtcatgtgacagcggcatggacatatgccccaggctttcctgctggggtccatccatgagcctgcaggtgccctcatggagccccagccctgccctggaagcttggctgagagcttcctggaggaggagcttcggctcaatgctgagctgagccagctgcagttttcggagcctgtgggcatcatctacaatcccgtggagtatgcatgggagccacatcgcaactacgtgactcgctactgccagggccccaaggaagtactcttcctgggcatgaaccctggaccttttggcatggcccagactggggtgccctttggggaagtaagcatggtccgggactggttgggcattgtggggcctgtgctgacccctccccaagagcatcctaaacgaccagtgctgggactggagtgcccacagtcagaaggaccaagacaaagcatgggacatgaaattaagagtgaacttcttatgggaggctgcagctggatcagaggaaaaatccagtgtgacagagtgcaagtcagaagacctggcttttcatcccagctttgaaacttggaactttttgattgacaaattaataaacctctctatgcctc

SEQ ID NO: 19547 - DNA, 2112 bp, Homo Sapiens
gcacgagggttgaaagtgatcttcctggagaactaccgtgtgtccttggctgagaaagtgatcccggccgctgatctgtcgcagcagatctccactgcaggcaccgaggcctcaggcacaggcaacatgaagttcatgctcaacggggccctcaccatcggcaccatggacggcgccaacgtggagatggccgaggaggccggggccgagaacctcttcatcttcggcctgcgggtggaggatgtcgaggccttggaccggaaagggtacaatgccagggagtactacgaccacctgcccgagctgaagcaggccgtggaccagatcagcagtggctttttttctcccaaggagccagactgcttcaaggacatcgtgaacatgctgatgcaccatgacaggttcaaggtgtttgcagactatgaagcctacatgcagtgccaggcacaggtggaccagctgtaccggaaccccaaggagtggaccaagaaggtcatcaggaacatcgcctgctcgggcaagttctccagtgaccggaccatcacggagtatgcacgggagatctggggtgtggagccctccgacctgcagatccccgccccccaacatcccccgggactaggcacaccctgccttggcgggaccagcgggcatttgttttcttgctgactttgcacctccttttttccccaaacactttgccagccactggtggtccctgcttttctgagtaccatgtttccaggaggggccatgggggtcagggtggttttgagagagcagggtaaggaaggaatgtgctagaagtgctcctagtttcttgtaaaggaagccagagttgacagtacaaagggtcgtggccagccctgcagcttcagcacctgccccacccagagtgggagtcaggtggagccacctgctgggctcccccagaactttgcacacatcttgctatgtattagccgatgtctttagtgttgagcctctggattctggggtctgggccagtggccatagtgaagcctgggaatgagtgttactgcagcatctgggctgccagccacagggaagggccaagccccatgtagccccagtcatcctgcccagccctgcctcctggccatgccgggaggggtcggatcctctaggcatcgccttcacagccccctgccccctgccctctgtcctggctctgcacctggtatatgggtcatggacccagatggggctttccctttgtagccatccaatgggcattgtgtgggtgcttggaacccgggatgactgagggggacactggagtgggtgcttgtgtctgctgtctcagaggccttggtcaggatgaagttggctgacacagcttagcttggttttgcttattcaaaagagaaaataactacacatggaaatgaaactagctgaagccttttcttgttttagcaactgaaaattgtacttggtcacttttgtgcttgaggaggcccattttctgcctggcagggggcaggtctgtgccctcccgctgactcctgctgtgtcctgaggtgcatttcctgttgtacacacaagggccaggctccattctccctccctttccaccagtgccacagcctcgtctggaaaaaggaccaggggtcccggaggaacccatttgtgctctgcttggacagcaggcctggcactgggaggtgggggtgagcccctcacagccttgcccctccccaaggctggcaacctgcctcccattgcccaagagagagggcagggaacaggctactgtccttccctgtggaattgccgagaaatctagcaccttgcatgctggatctgggctgcggggaggctctttttctccctggcctccagtgcccaccaggaggatctgcgcacggtgcacagcccaccagagcactacagccttttattgagtggggcaagtgctgggctgtggtcgtgccctgacagcatcttccccaggcagcggctctgtggaggaggccatactcccctagttggccactggggccaccaccctgaccaccactgtgcccctcattgttactgccttgtgagataaaaactgattaaacctttgtggctgtggttggctga

SEQ ID NO: 19548 - DNA, 803 bp, Homo Sapiens
gaattccgcacgaggattacaaaaaaaatactgccttggtctgtgcaggctgctgtaatgaaatactatgaacttggcagcttataaacaacagaaatttatttctcgctgttctcaatggtgggaagtccaagattaagggatcaacaaattaggcctctggatcatacatggcattttctagctgtgtccttatacataaaaggaaaaaggtagctctctcgagtctctttaataaagatactaattctcatgactgaatcaccctccaaaggccccacctcctaataccatcactctggggactaggtgtcagcatgtgaattttggaaaacacaaaaattcagaacatagcaaatacctttgaagtataaaagataaaattcatttttagtgaaccctgtaatttattcgtgtatatttactaaacagctgtatctttgaaattgttagtaatgattctgcttcaataactatggtcagggaatttataatattatatttttatatactgaactgccatagatgctggaaaaaaggaactgatgttttcagcatattttcaaaatattgataagggaagttattacttttatatagtattcaacttttttcaggtaatagaagtgaataatttattgtgaaataattcattttataaatgtataattatttttataaattttattgttggaaatcaaaaattagtagattttttaccatgttaaattatagtgagattaaagtattactaaactgtgatgctatgtttgtttcactaaactttctaaataaaaactgag

SEQ ID NO: 19549 - DNA, 1251 bp, Homo Sapiens
gcacgagggttcgtccaataatgcaccatccaccaaaccagattgatgacttagagacacagtggggtgtggggagttcccctcagagagatgatctaaaacttctttgtgaacaaaatgaagaagaagtctctccacagttgtttactttccacgaagctgtttcacaaatggtagaaatggaagaacaagttgtagaagatcacagggcagtgttccaggaatctattcggtggttagaagatgaaaaggccctcttagagatgactgaagaagtagattatgatgtcgattcatatgctacacaacttgaagctattcttgagcaaaaaatagacattttaactgaactgcgggataaagtgaaatctttccgtgcagctctacaagaggaggaacaagccagcaagcaaatcaacccgaagagaccccgtgccctttaaaccggcatttgctgctaaaggatacccagaaccctcactactgtaacatacaacggttcagctgtaagggccatttgaaagtttggaattttaagtgtctgtggaaaatgttttgtccttcacctgaattacatttcaattttgtgaaacactcttttgtctacaaaatgcttctagtccaggaggcacaaccaagaactgggattaatgaagcattttgtttcatttacacaaatagtgatttacttttggagatccttgtcagttttattttctatttgatgaagtaagactgtggactcaatccagagccagatagtagggggaagccacagcatttccttttaactcagttcaatttttgtagtgagactgagcagttttaaatcctttgcgtgcatgcatacctcatcagtgattgtacataccttgcccactcctagagacagctgtgctcaccttttcctgctttgtgccttgattaaggctactgaccctaaatttctgaagcacagccaagaaaaattacattccttgtcattgtaaattacctttgtgtgtacatttttactgtatttgagacattttttgtgtgtgactagttaattttgcaggatgtgccatatcattgaacggaactaaagtctgtgacagtggatatagctgctggaccattccatcttatatgtaaagaaatctggaattattattttaaaaccatataacatgtgattataatttttcttagcattttctttgtaaagaactacaatataaaactagttggtgtataataaaaagtaatgaa

SEQ ID NO: 19550 - DNA, 1434 bp, Homo Sapiens
ctgaagtctagttttccagtgatagaaaactggaaacaaatttcttctttaccagctgagtggtaacacagtcaaccaggttgcctctggcaacaaagagttcttggttatgatggactgaaactggcagagacctcgctgctgggtgagactagccagggagcttaggggtaaggagggcaccccctgtccaacagggagattcttaggtcagggagcacctggctggcttcctcactcaccgccgaagtgggcattggatttgacctattacgaacctggagcaggaccagggatgccctggttgctctgcagaatgtggctcagaggtaagtgatctgctcgggatacccagtcactgtgctcagagccatgcctccccgggcagccggaggacatggatgtgctctggaatgtctttaacaccctttttttgttagttccagaccccctgagccacagaaagctccttccagaccttatcaggataccagaggaagttatggcagtgatgccgaggaggaggagtaccgccagcagctgtcagaacactccaagcgcggttactatggccagtctgcccgataccgggacacagaattatagatgtctgagcacggactctcccaggcctgcctgcatggcatcagactagccactcctgccaggccgccgggatggttcttctccagttagaatgcaccatggagacgtggtgggactccagctcgtgtgtcctcatggagaacccaggggacagctggtgcaaattcagaactgagggctctatttgtgggactgggttagaggagtctgtggctttttgttcagaattaagcagaacactgcagtcagatcctgttacttgcttcagtggaccgaaatctgtattctgtttgcgtacttgtaatatgtatattaagaagcaataactatttttcctcattaatagctgccttcaaggactgtttcagtgtgagtcagaatgtgaaaaaggaataaaaaatactgttgggctcaaactaaattcaaagaagtactttattgcaactcttttaagtgccttggatgagaagtgtcttaaattttcttcctttgaagctttaggcagagccataatggactaaaacattttgactaagtttttataccagcttaatagctgtagttttccctgcactgtgtcatcttttcaaggcatttgtctttgtaatattttccataaatttggactgtctatatcataactatacttgatagtttggctataagtgctcaatagcttgaagcccaagaagttggtatcgaaatttgttgtttgtttaaacccaagtgctgcacaaaagcagatacttgaggaaaacactatttccaaaagcacatgtattgacaacagttttataatttaataaaaaggaatacattgcaatccgt

SEQ ID NO: 19551 - DNA, 992 bp, Homo Sapiens
  misc_feature (99)..(146): n is a, c, g, or t
  misc_feature (567)..(579): n is a, c, g, or t
  misc_feature (717)..(747): n is a, c, g, or t
tttttttggcaccacactgttttatttaaacctgcaaacaatataaagaggtaaggacttctgacgccaaaccatgcaagtaataacaaaggaacagannnnnnnnnnnnnnnnnnnnnnnnnnnnnnnnnnnnnnnnnnnnnnnngtacttcacatttcacagcagtgctttggcagtactggcaagcatttctggtcaactgcttccaacagcaggaatatgaagaaacccccagatcttagcaaaagtgtaacaacattttctccctgacagcttacattccaagtcattccataccataccgctccactccacagttttataaacctgatcttaagatgtaactaggtactatgtgtgctcacaataaaaactaactaaaaacaaatcagagggtagcagacaagtaaacaaagtttccagtaaggcatcaggagatcactgctggtgggcccctcactttaccagcttaaagaagttttgatttttatttctcagcaaactcaatattcagaagctttaccagcagactcaagtcaaaggttttaaatacagtttacctcannnnnnnnnnnnnggtaaatatttcatataaaacatgaactcaagttctacttcatttaaaaaactgaatattttaatagtaaaaatatatgtttatatttctctttttaaaaagacatttaataacaatacttcataagactggatttannnnnnnnnnnnnnnnnnnnnnnnnnnnnnnaccacaagttgtccaggcagagatacattaaggcaaaggctcctggagaggtacgtccaccttggctgtgggctggagactcaaggtgaacacactctgctccttgcagggtcaacagaaaggcttctccctcatgttcactgagccatcctgcatcccaaagtagactctctcagccatgttgatgaataggcctgtgtccaccacacctgggatcattttgatagctgtattcaccctcgtgc

SEQ ID NO: 19552 - DNA, 2098 bp, Homo Sapiens
gcacgaggattaaccatctcacattcttgaaggtggcattgaagagcactaagatcggaagatgagtgagcttgaccagttacggcaggaggccgagcaacttaagaaccagattcgagacgccaggaaagcatgtgcagatgcaactctctctcagatcacaaacaacatcgacccagtgggaagaatccaaatgcgcacgaggaggacactgcgggggcacctggccaagatctacgccatgcactggggcacagactccaggcttctcgtcagtgcctcgcaggatggtaaacttatcatctgggacagctacaccaccaacaaggtccacgccatccctctgcgctcctcctgggtcatgacctgtgcatatgccccttctgggaactatgtggcctgcggtggcctggataacatttgctccatttacaatctgaaaactcgtgaggggaacgtgcgcgtgagtcgtgagctggcaggacacacaggttacctgtcctgctgccgattcctggatgacaatcagatcgtcaccagctctggagacaccacgtgtgccctgtgggacatcgagaccggccagcagacgaccacgtttaccggacacactggagatgtcatgagcctttctcttgctcctgacaccagactgttcgtctctggtgcttgtgatgcttcagccaaactctgggatgtgcgagaaggcatgtgccggcagaccttcactggccaccagtctgacatcaatgccatttgcttctttccaaatggcaatgcatttgccactggctcagacgacgccacctgcaggctgtttgaccttcgtgctgaccaggagctcatgacttactcccatgacaacatcatctgcgggatcacctctgtctccttctccaagagcgggcgcctcctccttgctgggtacgacgacttcaactgcaacgtctgggatgcactcaaagccgaccgggcaggtgtcttggctgggcatgacaaccgcgtcagctgcctgggcgtgactgacgatggcatggctgtggcgacagggtcctgggatagcttcctcaagatctggaactaacgccagtagcatgtggatgccatggagactggaagaccattccaacttggacgcgttaccatgagagcatatcctatccaaccgtactaacgtggacaccctacacctcccctcagaacttcaaaagggcaagatcttttttccttcacttattgctgaaaccaagagcacaattcccattgagagaaagatctctgtgctgtaaactaaaacaaattgtgcattccttccggggccatcgtctttgttttcttttttgtcttgaatgaattttaaaaggaaatatataataaaaatgttaaccagaaggtaaacttgagtgtaattgtcagacagacacacttttccaccagtgtatttgaattttagaccagtgaccctgttttgtggcattcatgcaaaacatgctgagggctttgttcatctggtcatcgtgtccaaatttcagtcatgtttgtagcaagattttggaagcattcatatttcctttttaaaatgtattcctttgtgttcaacagttaatcaaaaccagagagtctagggcagcctctctgatgttgtcaatgatgtaaattcagtccctggtttttaattttctgtctgatgtcacagatcattgttgcacacaaacgtggcatagaaaagaacatgttcagaagccatggggccaagcacatgcggggacggtctcaaatgcgtgatcagagaatccttcacctttgctgaaaagtgagctcagatccagcaccatgttcctcctgacccatcctgtctatcttctcagttgagtttttaatctcactttgggtttccttgtgaagttggagggaagtttataatagcctaacactaccccacccccaactaggaggaacctctgttttcaagagagatgcctgtcctgtgcttggatagtcagtcaattatttgtgtatgaaacaatgtacaatcaatgttttgaaaataatgatctccaactttctaagttaaattttaaaattttgattgtttgcc

SEQ ID NO: 19553 - DNA, 936 bp, Homo Sapiens
gcacgaggcaagagagttcctgcattcatcatagggatcttagatgtcttcattataaataaatatggttctccctcctccactaataggaaaatgtgaaacatgcttggtaggaaacatgtacaggggcagaatgggacaaaggcggagaaaaagttatagagatgacactcctcaattgtagtaagtgtgcaaattctacttctaaaagggataaaaaagaattggcttttaaaaacactgcactcaaagtaatgtttccaataataacctttaaagtttcaatgaaaaagaaaaatctgtgcttatgggcacatgggatttctgattgtgttacttcattttaggtcattcaaaatggacttggtttaatgcatacactatggcaataacttacggagggccacagttcctcctcaaccaaatcaaatctagctgagaacactctggagtgaaggcatgtggtgatgagtttttcaaaagtctaatcaaccaccccaaatctctacatcctctcagggagttaacttcccctagacaatcaaggactctgaaagtctagttttgctataaatataaaatatttgtagcagaaaaatatagcctctctaagaagcagatttcatgtttcttgttcactgacgaaactctgagttggctggacaacatgagttaccacataactgtagaccacagatcagcacctcaaattccagctctacttaaacaaaactttaaaagcactttagccatctggtcaggtataaatgttggttcccttcttccccaagggaggaaattcagaatagagtcaacagtgactgccctgttagagagtccctttcgctgaagcggggtgggaaatggcaggggtaggaaatggcagcgccaagtcctcctgtgcagacctcgaggtggcacccatgtgctgtggct

SEQ ID NO: 19554 - DNA, 1445 bp, Homo Sapiens
  misc_feature (870)..(889): n is a, c, g, or t
  misc_feature (1285)..(1299): n is a, c, g, or t
gcacgaggggtcctgggaaagctggaatcaggatctatttgtaaaggccagcagcttgtgatgatgccaaacaagcacaacgtggaagttcttggaatactttccgatgatgtagagactgataccgtagccccaggtgaaaacctcaaaatcagactgaaaggaattgaagaagaggagattcttccagggtttatactttgtgatcctaataatctttgtcattctggacgcacatttgatgcccagatagtgattatagagcacaaatccatcatctgcccaggctataatgcggtgctgcatattcatacctgtattgaggaggtggaaataacagccttaatctgcttggtagacaaaaaatcaggagaaaaaagtaagacccgaccccgttttgtcaaacaagatcaagtatgcattgctcgcttaaggacagcaggaaccatctgccttgagacctttaaagacttccctcagatgggtcgtttcaccttaagagatgagggtaagaccattgcaattggaaaagttctgaaactggttccagagaaagactaagcattttcttgatgaccctgcacaatactgtgaggaaaattgactgcagaagcctacttcacaccgccttctcttattttctgcccattgataaacctctccccatattttgcaaagaggaaattcacagcaaaagtccacattatgtcagctttctcatattgagagctctgctatgccactgttgaatttttcccaagattcctgtccctagccctcacttcaaactctgcttccttggacagatttggcaatagctttgtaagtgatgtggacataattgcctacaataatgaaaacctacaggannnnnnnnnnnnnnnnnnnnccccttaggcatatttagtatttttcccccaggcagatcattctgagtgtgcgagtgtgtgtgcacatgttacaaaggcaactaccatgttaataaaatattcaatttgaaatccttttcggtatttgaattgcttttgaataatgttttttatctggatgtaacattgttgcattagctttttaactttcccaagtaattgaatacattttattacttggacttttataaactctttccctacccactataaatgagacattcacagcgttcaagtttgtattaaaggaaaggattagtttgaccccttcttttgatggttaatgcatacatgcagttaaatccctttatgcaaatgtgacactgctttactaggtcttttagttatttatttannnnnnnnnnnnnnngccaatttatattgtaacatgatttcttgaacacagtaagttgttttaaaataaaagaacagcatactgtagtttttataagtaaagcgtaatgaaattgtacccctagagaaaatccattaacttgttaattagtggaattaaca

SEQ ID NO: 19555 - DNA, 908 bp, Homo Sapiens
gcacgagggggcatcggagacatcgttatgcctggtctcctactatgctttgtccttcgctatgacaactacaaaaagcaagccagtggggactcctgtggggcccctggacctgccaacatctccgggcgcatgcagaaggtctcctactttcactgcaccctcatcggatactttgtaggcctgctcactgctactgtggcgtctcgcattcaccgggccgcccagcccgcccttctctatttggtgccatttactttattgccactcctcacgatggcctatttaaagggcgacctccggcggatgtggtctgagcctttccactccaagtccagcagctcccgattcctggaagtatgatggatcacgtggaaagtgaccagatggccgtcatagtccttttctctcaactcatggtttgtttcctcttagagctggcctggtactcagaaatgtacctgtgtttaaggaactgccgtgtgactggatttggcattgaaagggagctcgtttgcaggagagaggtgctggagccctgtttggttccttctcttcctgcggatgtagaggtggggccccttccaagagggacaggcctctccccagcgcgccttcctcccacgtttttatggatctgcaccagactgttaccttctgggggagatggagatttgactgtttaaaaactgaaaacagcgaggagtctttctagaacttttgaacactaaaaggatgaaaaaaattagcaaaccgaagtttcttcaatgactcctcgagaactttgggaccagtttcctatgggggactcagtttcagagaactgagacagaagctcttctgtcgttatattcttctttcccttttttggattattaaatattttctgtggtgtgaagtgacttatt

SEQ ID NO: 19556 - DNA, 728 bp, Homo Sapiens
attactgtttcttttaataacatatcaatgaaatctatttaaagtactacctacaaatacacattctctcatgattcagtgagaatattaagttattgaatacatttttttactctcatggcacttacatttggtaacactaataagggaaatttaaataacacttaaatcatgattatgaatgtttaattgaatattttcctttctgtagctgtgaaatgtaaagcttaaatttgcttccatcaggcctcttaaaccaaacttcatcatggttaattgttgtaattacagcacttggaggacattcatcttttttatcaatacatattgtttgtccacgtatataccattccccatcataatatagtcttccctcttcaaatctagcactgggcaaatgtttttccagtttcacagggggttccgttttcactctgtgtggccccaatgtagccattgccttcctaattgttgtccagtcttcaaaaatatcaagatcttgtagcatataaactatatatggacctgaaacaacaactggcttctttttgtcaggactgaaaggatccttcctcttttttcttgactgaagctcatcattccacagctctgaggtaatatcaatgctgtgcctatcctcttcaagccttcttatcttctcctctagttcactctggactgtatcatatagcaacagcttttcgctctcacaatgctggcgagaagct

SEQ ID NO: 19557 - DNA, 1520 bp, Homo Sapiens
  misc_feature (1231)..(1240): n is a, c, g, or t
cacctgttgaagtatgagtaccagcctttcgctgggaagatcaaagacattgcttggactgaagacagtaagaggatcgccgtggtcggggaaggaagtgcttcagcatcgacaaccccggctacgagcccgaagttgtggcagtgcaccccggcggggacacggtggcaattgggggtgtggacggcaacgtccgcctgtattccatcctgggcaccacgctgaaggatgagggcaagctcctagaggccaagggccccgtgaccgacgtggcctactcccacgacggcgccttcctcgcggtgtgcgacgccagcaaggtggtcacagtgttcagcgttgctgacggctactcggagaacaatgtttttttatggacaccatgcaaaaatcgtctgcctggcctggtccccagacaatgaacactttgcctccggtggcatggacatgatggtgtatgtttggaccctgagtgacccggaaaccagagtcaagatccaagatgcacaccggctgcaccatgtcagcagcctggcctggctggacgagcacacgctggtcacgacctcccatgatgcctctgtcaaggagtggacaatcacctactgaggagccccacccccgcctctggatggaccgaatcagggactagagtttaactgcagcggaacatgtcatttctctatttctgtgacgcgcccccatgcccccaccccaccacaagaggcaggagggcccagtcatgaccctcgtctctgcagggtgtctgtacacgttcttctgaaagctttagacagtaacagtttgcacatgaaaaataaagcgagcacctaaacaatgtgtggagcataactaaaacccacagcccaaccaaaccttgagaatgcgaaacattccagaggcagtagcctccaaagcacacagagcccctggccccgccgcggctctcactatctgtcaggggaggttgtacaggtgaatgagccggggggctcatgttcctgcctgcagaacatttctgtactagtgagaagagggaatatgcattgcagttcagcaaagccggaattctgtgttgaacagatgtctgtctccctagtgtgtgactcacaccttgtggctgccttcagagcgccacctccagatcagatggggacacacaacccctggatatgtttcattgtcagattttgtgcttgattttaagaatggaattgtgggtatctttccnnnnnnnnnnaatgtatcttaactgttgcctgtcagtgtttacaaactagtgcgttgacggcaccgtgtccaagtttttagaacccttgttagccagaccgaggtgtcctggtcaccgtttcaccatcatgcttttgatgttcccctgtctttccctcttctgctctcaagagcaaaggttattttaaggacaaagatgaagtcactgtaaactaatctggtcttgtttttacctttcttttctttttcagtgcagaaataaaagtaaataataagcacggtgattggga

SEQ ID NO: 19558 - DNA, 821 bp, Homo Sapiens
gcacgaggtgctgctcgtctcaggctcgtagttcgccttcaacatgccggaaccagcgaagtccgctcccgcgcccaagaagggctcgaagaaagccgtgactaaggcgcagaagaaggacggcaagaagcgcaagcgcagccgcaaggagagctactccgtatacgtgtacaaggtgctgaagcaggtccaccccgacaccggcatctcctctaaggccatgggaatcatgaactccttcgtcaacgacatcttcgaacgcatcgcgggtgaggcttcccgcctggcgcattacaacaagcgctcgaccatcacctccagggagatccagacggccgtgcgcctgctgctgcccggggagttggccaagcacgccgtgtccgagggcaccaaggccgtcaccaagtacaccagcgctaagtaaacttgccaaggagggactttctctggaatttcctgatatgaccaagaaagcttcttatcaaaagaagcacaattgccttcggttacctcattatctactgcagaaaagaagacgagaatgcaaccatacctagatggacttttccacaagctaaagctggcctcttgatctcattcagattccaaagagaatcatttacaagttaatttctgtctccttggtccattccttctctctaataatcatttactgttcctcaaagaattgtctacattacccatctcctcttttgcctctgagaaagagtatataagcttctgtaccccactggggggttggggtaatattctgtggtcctcagccctgtaccttaataaatttgtatgccttttctctt

SEQ ID NO: 19559 - DNA, 1149 bp, Homo Sapiens
gcacgaggtacaagctttgaaaaaatgctctaattcaaaaatctgaaatccagaagcttcaaaatctgaatctttttgagcactgacttgaccccacaagtggaaaattccccacccgacacctttgctttctgatggttcagtttaaacagattttgtttcttgcacaaaatttttgtataaattactttcaggctatatgtataaggtggatgtgaaacatgaattatgtaattagagtcgggtcccgttgtgtatatgcagatattccaaacctgaaatccaaaacacttctggtccctagcattttggataagggatactcagcttgtacctatatattcatatatattcactgttgttagaaatgtttaagttgctgttctgtgatgaatctaaatcttttctcttgctaccaagctattgtcactgcagtgcattataccaaagagcgaagtcagtgccactgaaaatacagaacccattaatatcgtggctatctgattacatttatattccaagatgaaccttttttatatatgctaaaaattttggggaatatgttttgggatgtattatggagctaaaactctaacctcttaatagttttatagaacttaaaaattttttatacaattacccaattggtgatatgatcttaagcttttgtgtcagattatttaatatgatgacttcatgctttattatgccttattatggctgacgtattactgtggtgaaacaaaatatctttaaaagttaaaacatccagatatataagctattttttcctaaggataaagtacctttgagcatgagtgtatcacagctttcattaggaaaacttttcattacatacttgtttaaactctgtcttccagggtaaaaataataaggttgaatcattttattaaaaatactttttaagaaaataactatgaacatctgaatattaaagatataaaaaatgcacataattcatatttcaggtggtatttgcattcagtgccttactggtattctcagaacattttaatgatttctaacatttctaacagtcatagatatatacatttttcattttttgtacttgaatatttctaaataaaactgacattttactcttgacaattaaacatataatttact

SEQ ID NO: 19560 - DNA, 1156 bp, Homo Sapiens
  misc_feature (275)..(287): n is a, c, g, or t
gcacgaggaaaggagaccttgaggaatatggtcaggatcttctccatactgtcttcaagaatggcaaggtgacaaaaagctattcatttgatgaaataagaaaaaatgcacagctgaatattgaactggaagcagcacatcattaggctttatgactgggtgtgtgttgtgtgtatgtaatacataatgtttattgtacagatgtgtggggtttgtgttttatgatacattacagccaaattatttgttggtttatggacatactgccctttcannnnnnnnnnnnnccagtgtttaggtgatctcaaattaggaaatgcatttaaccatgtaaaagatgagtgctaaagtaagctttttagggccctttgccaataggtagtcattcaatctggtattgatcttttcacaaataacagaactgagaaacttttatatataactgatgatcacataaaacagatttgcataaaattaccatgattgctttatgtttatatttaacttgtatttttgtacaaacaagattgtgtaagatatatttgaagtttcagtgatttaacagtctttccaacttttcatgatttttatgagcacagactttcaagaaaatacttgaaaataaattacattgccttttgtccattaatcagcaaataaaacatggccttaacaaagttgtttgtgttattgtacaatttgaaaattatgtcgggacataccctatagaattactaaccttactgccccttgtagaatatgtattaatcattctacattaaagaaaataatggttcttactggaatgtctaggcactgtacagttattatatatcttggttgttgtattgtaccagtgaaatgccaaatttgaaaggcctgtactgcaattttatatgtcagagattgccctgtgctctaatatgcaccctcaagattttaaggagataatgttttttaagagaattctgcttccctatagaatatatacataaatgtaaatacttacaaaatgggagtagtgtattttaaagtaattacacttctgaatttatttttcatattccatagttggatgactaaatgaattactggagtgggaaggagtgacttaaatggttccattctgtatatttttattaatttttaaaaatta

SEQ ID NO: 19561 - DNA, 1127 bp, Homo Sapiens
ttcatacgttttatttgataatagttcattttattaaataatttataaagtcagaccagtgcattgggcttgttaggggaaaccattccttcctactgtcacatagcctggcagattatatcaggtgccaaaacattcccttttattcaatttattaatgagagtgtggaattaaagtagatccttgcatgtcaggaaagctgcaacacatctggtttaagtggagcacaaaggtaagttattccacattcaccaacttccccacttgacctcccaccagttcctgtctgctttttccatcaatcaactctaagatgccctaaacccaaacagttcccattcaactgtgcacaaaggtatagatatggaagacatctcactccaactctcacctttggaattaaataaacctggaacagggaaggtgaactatggctgaaaccaagtgaagatttttaagaagctttgacagaaacattaagaataacacctgaatgcaaatccagaaaaaagcgctactgggggaaaatagtcttagccaatgttctaaaaatgctcataaggaagggttggggaattaccctttagacacaagctctaagaactctggatacaacgggaacttggatggatacagtctgggcctgctgggccagatgttccgagggcggcccggcaagcagcctgtcttgcacattgcaactgactggcttaatctacggcaagagtccttcagctccgtcacagagtactctccaatgtgttatagttatccttaaagctcttcaattcaaggaagtgcttggcacgtttactcttctgactggaggggaggtatgtcacctggatggttgttggggagacctcaggggactgagttaggtctttggctgctgactggtgatgtcgctgagagctcccaattcgtgctttaaccgcagtggccagctcactcagggcctcctgatagcgtaggtactcattctggccaaagacccctgtcccatagcgggctgtttcatagccatccaaaagggtatcaatgagtgctttgcgtacacccttgaaaggcgtactagtgtttcgcagatccagcaggtaggagcggaaattcttgcccattaagg

SEQ ID NO: 19562 - DNA, 912 bp, Homo Sapiens
gcacgaggcagagaaggaaacaaaatgaggggtggcagggataaaaagtcacctccattctctacctcccatgcagcatgaacacaatttctctccacctggctcccaaatttaaagatgtggaccaaggcctgtgggtactccaggggcaaggagagccctggggtcagtgacactgtcaggccaaccatgcactccacaaaggggagcatttggaaatgaaggactagctcctatgtatcaggttaagagcaagggagagctggccagggacagcagtttgcacagcagaggggaatgtagcaacagcagggcctcctaggccccatcttccatttcttaggtaagaagagcatttcctcagactcccaggcggaggactgagcctagccttcagcaaccaaggttctcctgggacccaaagtttatgggagaagggcaaagacttcatgggaagagagaaggaaggccctgggtagaaacgcttggtgctgttctctttggcctttaagacaaagcgctcatcttgccctctacctcctgataggcttgagggtttgccaaccacactgtggctacaggtggagggaagaggactccttcctccagagtgctatgttcaggaagtttctttaaccccatatggcccaagagtagctcgtaggaggccctttaaagacggaacaagtaatttaccagttctactggggttcctgcccaccgtcccaaggtgggcgaggcctaggaagagggtcattcttaagccacacattagctgcactgcgtggctgcagccaaaacaaagaactgggtgttgagtattcatcaactaaaaccaaaatccagggcactcatatgtgaaggataagaactcacttccttactcctccaaaaagaagtggggaagaacca

SEQ ID NO: 19563 - DNA, 1334 bp, Homo Sapiens
  misc_feature (1259)..(1267): n is a, c, g, or t
atcccccgggctgcaggaattcggcacgaggctcaggtcgcggggcgcctaggcctgggttgtcctttgcatctgcacgtgttcgcagtcgtttccgcgatgctgcctctgctgcgctgcgtgccccgtgtgctgggctcctccgtcgccggcctccgcgctgccgcgcccgcctcgcctttccggcagctcctgcagccggcaccccggctgtgcacccggcccttcgggctgctcagcgtgcgcgcaggttccgagcggcggccgggcctcctgcggcctcgcggaccctgcgcctgtggctgtggctgcggctcgctgcacaccgacggagacaaagcttttgttgatttcctgagtgatgaaattaaggaggaaagaaaaattcagaagcataaaaccctccctaagatgtctggaggttgggagctggaactgaatgggacagaagcgaaattagtgcggaaagttgccggggaaaaaatcacggtcactttcaacattaacaacagcatcccaccaacatttgatggtgaggaggaaccctcgcaagggcagaaggttgaagaacaggagcctgaactgacatcaactcccaatttcgtggttgaagttataaagaatgatgatggcaagaaggcccttgtgttggactgtcattatccagaggatgaggttggacaagaagacgaggctgagagtgacatcttctctatcagggaagttagctttcagtccactggcgagtctgaatggaaggatactaattatacactcaacacagattccttggactgggccttatatgaccacctaatggatttccttgccgaccgaggggtggacaacacttttgcagatgagctggtggagctcagcacagccctggagcaccaggagtacattacttttcttgaagacctcaagagttttgtcaagagccagtagagcagacagatgctgaaagccatagtttcatggcaggctttggccagtgaacaaatcctactctgaagctagacatgtgctttgaaatgattatcatcctaatatcatgggggaaaaaataccaaatttaaattatatgttttgtgttctcatttattatcatttttttctgtacaaatctattatttctagatttttgtataacatgatagacataaaattggtttatctcctccaaggcagtttgtctttttctattcctcccccttcaacctgcgtcacaaaagaccaagaacagatgtcggaaaagnnnnnnnnncttcagtattgtttaaaagtttcaatacaaaataagttataaataaaaggcttgtatgtacaaaaag

SEQ ID NO: 19564 - DNA, 974 bp, Homo Sapiens
  misc_feature (200)..(208): n is a, c, g, or t
gcctcagcattttatcattccatggaaggagaatcttttgaaagaaagcattgcctcctaccagaactagacagtgaattagatcggtattatggaaatgcatacaagtaatgtcactagggcttaataagcagccgtttgctaatgtgcttcctttcaaagggttggacctttaaattgctgcaaaaggtaaattgtannnnnnnnnaagtattggtgttctttactctagctaggctaaaatttgctaaatgccttggtttcttttaaaagttcatgtaatatttctgatttttcagaatatttgcaataagagtctggattttaaaaaacacatgcatacacacaattaagagctcatgtcttagcaagatctgggaaaccaacattgcgagagtagctattttgaaagaataattctccagaagttaacatctaatatctagtatcaccaaacagtatcgctgttctcttttattcatttgaaatgaatataattatataactaacaattgtccaaatagatgagagagcaaatcatgtgagaaaattcagaataccatctgtttcatagccgcacagattttggactttcacaaacattgggaactaaatttagaattggcaaaagtctagaagatgggtatcaaaacagaagacattccaggagctagcaattttaagaggtgtccctccaaagtgacctgatggaagtcctgaacttggaaattaggttctactcacttggacatccctgcatcatggactgttgctgctccctgttccatatgctcgcaatctcagctatttggaagctaccaggaatgctttctaattatcatttgcaactagaactgtaatcagaaagaaattttgtatttttgtataacttgattgtgtgccattttatataacaggtcctgttttacaaataaattttgtttactaacattgtgttagaattaatctatgtg

SEQ ID NO: 19565 - DNA, 936 bp, Homo Sapiens
ggacgatggtttctttgtgccccatgggtacctgtctgaggacgaaggtgtgacagaggagtgtgccgaccctgagaaccataaggtccgccagaaactgaaggccaaggagtgggacgagttcctggctaaggggaagcgctttcgcgtcctgcaacctgtgaagatcggctgcgtgtgggcggctgacagagactgcgcaggcgatgacctgaaggtactgcagcagttcgcagcctgcttcctggagaccctgccggcccaggaggagcagacgcccaaggcctccaagcgggagaggagagacgagcagatcctggcccagctgctgccgctcctgcacggcaatgtgaacgggagcaaggtcatcatccgggagttccaggagcactgccgccggggactgctcagcaaccacaccggcagcccgcggagcccctccaccacctacctgcacacccccacccccagcgaggatgccgccatcccctctaagtcccggctcaagcggctcatttccgagaactcagtgtatgagaagcggcctgacttcaggatgtgctggtacgtgcacccgcaggtgctacagagcttccagcaggagcacctgcccgtgccgtgccagtggagctatgtgacatcggtgccctcggcccccaaagaggacagtggcagcgtcccctccacggggcccagccagggcactcccatctcgctgaagaggaagtcagcgggcagcatgtgcatcacccatttcatgaagaagcgcaggcacgacggccaagattggtgctgaagacatggacggcttccaggcaggacacgggaggaggaggaagaggaggagggcgactgtatgatcgtggatgtccctggatgctgccgaagtccaagcccgtgtggagccgctttcggagctggggggtggtgtggggg

SEQ ID NO: 19566 - DNA, 2226 bp, Homo Sapiens
gcacgagggagaaagaccttgacgaaaagaagaaagaacctgcaattacatcgcagaacagccctgaggcaagagaagaaagtacttccagcggcaatgtaagcaacagaaaggatgagacaaatgctcgagatacttatgtttcatcctttcctcgggcaccaagcacttctgattctgtgcggttgaagtgtagggagatgcttgctgcagctcttcgaacaggggatgactacattgcaattggagctgatgaggaagaattaggatctcaaattgaagaagctatatatcaagaaataaggaatacagacatgaaatacaaaaatagagtacgaagtaggatatcaaatcttaaagatgcaaaaaatccaaatttaaggaaaaatgtcctctgtgggaatattcctcctgacttatttgctagaatgacagcagaggaaatggctagtgatgagctgaaagagatgcggaaaaacttgaccaaagaagccatcagagagcatcagatggccaagactggtgggacccagactgacttgttcacatgtggcaaatgtaaaaagaagaattgcacttacacacaggtacaaacccgtagtgctgatgaaccaatgacaacatttgttgtctgtaatgaatgtggaaatcgatggaagttctgttgagttggaagaattggcaaaatatctggaccattaagaaaacggattttgtaactagctttaaactaggccaagcaactagttttcctgcaaatcaaatttttaaagcaacttgggttagactttgtttttgacctaacatcccttccttaaatgccttctgtagtttcagatcagtagggagaccatataataattttatggtacctgtttcaaaacatattttttctgtttttataagtaagttgatattaattaaactcttggcaatatttcttctttcttaaaggaaaatataccttaactttttttcttttacactgtgaaacatacacagtagaaattctgttactctctgttattaatacataaatgaaaatacatttttttccatattggcatgtagctacaaatattaaaggaggagaaaaggtaatataattttaggtttaccaaatatggtgtgtattcaaataatacttgaccagcttatctaaaatgtacataattttgaggtagcttatgaatttgattttaattattatgttcacaagcttggaatattagatattattttgcatctgtaactaaccgtgatcatcatttcttgtaatttcttgtacatgtatattacttgttcttaatagatttttggaaacaagactttattgagatcagtttggttttcctgttaatttacctgtttgactttataatgtgttttagttttgcagaagaacactgttgtagtttagaaggcttttcataaatcccctcataggcaaagatgaaaacttcccactatttttttcccctcttaggaagacatactggaaagaaaatgtttagcatcttagtgtagtatagctattgtaaacagttcatgactagattttgattcggaaatctatactgaccaaggattaatcttaaggattgtataattcattaaagctgtggtctttccatgtggagactgatagaaaataattttgtcccaagtcttatttgctgactttttctgtcatgagtgagattgttgaacaaactgaatatatgggctatagcaagtagctttacagtacagatcttacaattaagttttgcttttgttaaagtgtgtaccattttttctgtttggagtaagacaaaaattgttttgacataggttccctagggtacacttgctctagcatactttaaaggccactgttgcaaagtctacattttatgctgaatctgcattctgtcaggcacccgtagaaagacctcagtacatgctttgcactctcctttgctccctttttccaatttcttattgcatatcattttgttgtaatacagaaagcagcatttttaaatgtccgtgttaagaattggcccactggtaccaactcacctctattttgtcagttcatagttgaagattttgttttatttcaaaaacaaagtacatttttgaaataatgtttcagaataaaataatctcacttttaagtgatccattttaaaatttgtaattcaataaagttttttttgttgttaaacataaacctcgtgc

SEQ ID NO: 19567 - DNA, 1673 bp, Homo Sapiens
  misc_feature (1057)..(1066): n is a, c, g, or t
  misc_feature (1334)..(1345): n is a, c, g, or t
gcacgagggagccattaaaaattgtgaagaagaatttcgatctccgccctggggtcattgtcagggatctggatctgaagaagccaatttatcagaggactgcagcctatggccactttggtagggacagcttcccatgggaagtgcccaaaaagcttaaatattgaaagtgttagccttttttccccagacttgttggcgtaggctacagagaagccttcaagctctgagggaaagggccctccttcctaaattttcctgtcctctttcagctcctgaccagttgcagtcactctagtcaatgacatgaattttagcttttgtgggggactgtaagttgggcttgctattctgtccctaggtgttttgttcaccattataatgaatttagtgagcataggtgatccatgtaactgcctagaaacaacactgtagtaaataatgctttgaaattgaacctttgtgccctatcacccaacgctccaaagtcataattgcattgactttccccaccagatgctgaaaatgtccttgtgatgtgcacgtaaagtacttgtagttccacttatagcctctgtctggcaatgccacagccctgtcagcatgaatttgtaatgtcttgagctctattatgaatgtgaagccttccccttatcctccctgtaacttgatccatttctaattatgtagctctttgtcagggagtgttccctatccaatcaatcttgcatgtaacgcaagttcccagttggagctccagcctgacatcaaaaaaggcagttaccattaaaccatctccctggtgcttatgctcttaattgccacctctaacagcaccaaatcaaaatctctccactttcagctgtcttttggaggacgtacgtaataaggttttaatttagtaaaccaatcctatgcatggtttcagcactagccaaacttcaccaactcctagttctagaaaaacaggcacttggcagccttgtgatgtcatacagagaagtcacagggcagtacctgagggtctgtaggttgcacactttggtaccagataacnnnnnnnnnnctttataagaaagcctgagtactccacactgcacaataactcctcccagggttttaactttgttttattttcaaaaccaggtccaatgagctttctgaacagctggtgtagctacagagaaaccagcttccttcagagagcagtgcttttggcggggaggaggaaatcccttcatacttgaacgttttctaattgcttatttattgtattctggggtatggcgtaagtacagagaagccatcacctcagatggcagcttttaaaagannnnnnnnnnnnctctcaacaccatgattcctttaacaacatgtttccagcattcccaggtaggccaaggtgtcctacagaaaaaccttgggttagacctacagggggtctggctggtgttaacagaagggagggcagagctggtgcggctggccatggagaaagctgacttggctggtgtggtacagagaagccagcttgtttacatgcttattccatgactgcttgccctaagcagaaagtgcctttcaggatctatttttggaggtttattacgtatgtctggttctcaattccaacagtttaatgaagatctaaataaaatgctaggttctacctt

SEQ ID NO: 19568 - DNA, 971 bp, Homo Sapiens
gcacgaggcaaaactgtagggtcctgaggacaccgtgagccagccaggcctggccgctgggcctgaccggccccccagcccctacaccccgcttctcccggactctcccagcggacagccccccagccccacagcctgagcctcccagctgccatgtgcctgttgcacacctgcacacacgccctggcacacatacacacatgcgtgcaggcttgtgcagacactcagggatggagctgctgctgaagggacttgtagggagaggctcgtcaacaagcactgctctggaaccttctctccacgtggcccacaggcctgaccacaggggctgtgggtcctgcgtccccttcctcgggtgagcctggcctgtcccgttcagccgttgggcccaggcttcctcccctccaaggtgaaacactgcagtcccggtgtggtggctccccatgcaggacgggccaggctgggagtgccgccttcctgtgccaaattcagtggggactcagtgcccaggccctggccacgagctttggccttggtctacctgccaggccaggcaaagcgcctttacacaggcctcggaaaacaatggagtgagcacaagatgccctgtgcagctgcccgagggtctccgcccaccccggccggactttgatccccccgaagtcttcacaggcactgcatcgggttgtctggcgcccttttcctccagcctaaactgacatcatcctatggactgagccggccactctctggccgaagtggccgcaggctgtgcccccgagctgcccccaccccctcacagggtccctcagatataggtgcccaggctgaggtgaagaggcctgggggccctgccttccgggcgctcctggaccctggggcaaacctgtgacccttttctactggaatagaaatgagttttatcatctttgaaaaaaattcactctggagtataaacgtttaaaaatggg

SEQ ID NO: 19569 - DNA, 1315 bp, Homo Sapiens
gcacgaggggaagggggagcggcgagaggcggagacggagcccgacaggggcggcaccacggcacgagccccgcacagtccagtgtgaggggagcggcgctaagagcaggcgacgccgccgccgccaccaccaccgccatagatacactctcatcctacgggccacgcctgggccttgctgccaggaagcttcggccccgcagctcggcttgctgcggtctcaggtttctttacctccagaaagaagaatattggccccttgaattctggaagttcattgaagagtctgaaattagggacttatttcaaatttggacatggctagtcgaggcgcaacaagacccaacgggccaaatactggaaataaaatatgccagttcaaactagtacttctgggagagtccgctgttggcaaatcaagcctagtgcttcgttttgtgaaaggccaatttcatgaatttcaagagagtaccattggggctgcttttctaacccaaactgtatgtcttgatgacactacagtaaagtttgaaatatgggatacagctggtcaagaacgataccatagcctagcaccaatgtactacagaggagcacaagcagccatagttgtatatgatatcacaaatgaggagtcctttgcaagagcaaaaaattgggttaaagaacttcagaggcaagcaagtcctaacattgtaatagctttatcgggaaacaaggccgacctagcaaataaaagagcagtagatttccaggaagcacagtcctatgcagatgacaatagtttattattcatggagacatccgctaaaacatcaatgaatgtaaatgaaatattcatggcaatagctaaaaaattgccaaagaatgaaccacaaaatccaggagcaaattctgccagaggaagaggagtagaccttaccgaacccacacaaccaaccaggaatcagtgttgtagtaactaaacctctagtttgaactagctggaatagtcttctgcttcctaaatgttaataacaatggaattggagcatttaaccagcccagtatgacttccaaaagaagagacttatgatagagtcaagtttctaatacagaattattttaagtgttttgaacttaatttttaataacatgcatgggtccctctcactaatgtttcaacaatagggaaaaatgagaactatgtggacacttgtttcattggaaggttagggggaataatttctcatcactaggaatatagacaaatgactgtctgggcccacacagttaaccagcccatttctccacactggtacagtagtcacctgtg

SEQ ID NO: 19570 - DNA, 1246 bp, Homo Sapiens
aggatctgtaaactacatttattgaatacttactggacacatcatatacaaaaaaggatgggggcaggtaagaacttgaagaaattaaatatacacattaagtttcttcactaattctagccactaaagaagtacaaaatttgtacaagtaatactttataatgaaattttgatgcctgtcaaaagggtaataagctatacatatactacaataaacatttttaaaaactgtgcttaatatcatagaattttcttaaaatgggttggtaaaatacctatatagcatccattcttacacacatattttccattaaagattgcttacatagtacaaattcctattgctaagaaattcatggtcaacagctgtatatgaagttcctctaaaaaacatcacagcatttgcagtaagtccatttctccagtgaagcccaccttattttcagtttagcttactaccaagttctcatgagaactgtttatatgtcttttgcttggtcatcttcttcaagttttctgatttcattttttaaacaatttatagtttcacgacttgcttttaatctctccttaagctctgcaatctcaaagcttgtttttttcttagcagcttctaatttttctctggttttcacttcaagctctgcaaattctgtttcatgcttataggctcctaatgttagctgacgagatgttgtcaataattgttgcatcattgctgttgggtcttgaaatatcatttcatcatagaactctgaaaccactgtctttttccccagcattgcattggtgtctgattgaaacagctttagcaaatgatacagggttacaggtctttcattagggtcaatgaaaaatattttgatgattatttcgaattcaccccatcctgtttcagtaatttcatatggaggtttagtaacaactaaagacagaaaaaaatagtaaattatcggtttagtttcctagccatttttaactttggatattgtgaatcaaaagactatattgtacctcttaaaggattgccatagctttcatgtaatttaaactggattttcttcacatatgctgacatatcctaaaatataaggaattagttagttttatgatctacaaatgaaaactaggaaaaaaaatacactgagcgtatatacttagttttataaaaaacatacttcccttcaaattttatggaatctaattttctaaaaaacatgaactacacctgggaagttcctcgtgc

SEQ ID NO: 19571 - DNA, 839 bp, Homo Sapiens
  misc_feature (95)..(104): n is a, c, g, or t
gcacgaggtttggtttgtgctaggcccccgggtgtgaagcacagaccccttccaggggtttacagtctatttgagactcctcagttcttgccacnnnnnnnnnnaatctccaccagtcatttttcagaccttttaactcctcaattccaacactgatttccccttttgcattctccctccttcccttccttgtagccttttgactttcattggaaattaggatgtaaatctgctcaggagacctggaggagcagaggataattagcatctcaggttaagtgtgagtaatctgagaaacaatgactaattcttgcatattttgtaacttccatgtgagggttttcagcattgatatttgtgcattttctaaacagagatgaggtggtatcttcacgtagaacattggtattcgcttgagaaaaaaagaatagttgaacctatttctctttctttacaagatgggtccaggattcctcttttctctgccataaatgattaattaaatagcttttgtgtcttacattggtagccagccagccaaggctctgtttatgcttttggggggcatatattgggttccattctcacctatccacacaacatatccgtatatatcccctctactcttacttcccccaaatttaaagaagtatggggaatgagaggcatttcccccaccccatttctctcctcacacacagactcatattactggtaggaacttgagaactttatttccaagttgttcaaacatttaccaatcatattaatacaatgatgctaattgcattcctgctcctaggggaggggagataagaaaccctcactctctacaggtt

SEQ ID NO: 19572 - DNA, 1725 bp, Homo Sapiens
gcacgaggggaaaactgagcgtgggcctcagaaagaagttaaggcacccgcgagccgggcaactgccctccttccgcgccggcggagcgattaaagtgaagaaacaatggccagcaatcacaaatcttcagcagctcgccctgtttcaagaggtggagttgggttaacaggaaggcctccttctgggatacgacccctatcaggaaatattcgagtggcaactgcaatgccacctgggacagcaagaccaggttctcgtggttgtcccatagggactggtggagttctgtcttctcaaatcaaagttgcccatcgccctgtaacacaacaaggtttgactggaatgaaaactgggacgaaaggtccccagaggcaaattttagacaaatcttactatcttgggcttcttagaagtaaaataagtgaacttacaactgaagttaataaacttcagaagggaatagaaatgtacaatcaagagaattcagtatatttgtcatatgaaaagagggctgagactttagctgttgagataaaagagcttcaaggacaactagcagactacaacatgttggtagataaacttaataccaacactgaaatggaagaagtaatgaatgattacaatatgcttaaagctcaaaatgatcgagaaacacaaagtttggatgtcatatttactgaaagacaagcgaaagaaaaacaaatcagaagtgtcgaagaagaaattgaacaggaaaaacaagcaacagatgacattatcaaaaatatgtcttttgaaaaccaagtcaagtacctagagatgaaaaccacaaatgagaaactgttacaggaattagatacacttcaacaacaattggattcacagaacatgaaaaaagagagcctggaagcagaaatagctcactcccaggtgaaacaggaggcggtattgctgcatgaaaaactttatgagttggagtcccatcgagatcaaatgattgcagaagacaaaagcataggatctccaatggaagagagagagaaattacttaagcagattaaagatgataatcaggaaatagccagcatggaaagacagttaacagatacaaaagaaaagataaatcagtttattgaagaaattagacaacttgacatggatttagaggaacaccaaggtgaaatgaaccagaaatacaaggagctaaagaaaagggaggaacatatggacacttttattgagacttttgaggaaacaaagaatcaggaactgaaacgaaaggcacagatagaagccaacattgttgcactcttggagcactgcagtcgaaatataaatcgtatagaacagatatcctctatcaccaatcaagagctaaagatgatgcaggatgacctcaattttaaatctactgaagtgcagaaatcacaaagtacagctcagaatttgacttcagacattcaacgtctgcagttggatctgcagaaaatggagcttctagaaagtaagatgactgaagaacagcattctctaaaaagcaaaattaagcaaatgacaactgatctggagatatataatgatttgccagctttaaaatcatcaggtgaagaaaagataaagaaattacatcaggagagaatgatattatcaacccacagaaatgcctttaagaaaataatggagaagcaaaacatagagtatgaggcactaaaaacacaattgcaagaaaatgagacacattc

SEQ ID NO: 19573 - DNA, 2011 bp, Homo Sapiens
  misc_feature (1931)..(1944): n is a, c, g, or t
gcacgaggaaaaaacttcccaagggcacggtttcatttcattcccattcagatcaccgttttctgggcacggtagaaaaagaagccactttttccaatcctaaaaccactagcccaaataaaggcaaagagaaggaggctgaggatggcattattgcttatgatgactgtggggtgaaactgactattgcttttcaagccaaggatgtggaaggatctacttctcctcaaataggagataaggttgaatttagtattagtgacaaacagaggcctggacagcaggttgcaacttgtgtgcgacttttaggtcgtaattctaactccaagaggctcttgggttatgtggcaactctgaaggataattttggatttattgaaacagccaatcatgataaggaaatctttttccattacagtgagttctctggtgatgttgatagcctggaactgggggacatggtcgagtatagcttgtccaaaggcaaaggcaacaaagtcagtgcagaaaaagtgaacaaaacacactcagtgaatggcattactgaggaagctgatcccaccatttactctggcaaagtaattcgcctcctgaggagtgttgatccaacacagactgagtaccaaggaatgattgagattgtggaggagggcgatatgaaaggtgaggtctatccatttggcatcgttgggatggccaacaaaggggattgcctgcagaaaggggagagcgtcaagttccaattgtgtgtcctgggccaaaatgcacaaactatggcttacaacatcacacccctgcgcagggccacagtggaatgtgtgaaagatcagtttggcttcattaactatgaagtaggagatagcaagaagctctttttccatgtgaaagaagttcaggatggcattgagctacaggcaggagatgaggtggagttctcagtgattcttaatcagcgcactggcaagtgcagcgcctgtaatgtttggcgagtctgtgagggccccaaggctgttgcagctcctcgacctgatcggttggtcaatcgcttgaagaatatcactctggatgatgccagtgctcctcgcctaatggttcttcgtcagccaaggggaccagataactcaatggggtttggtgcagaaagaaagatccgtcaagctggtgtcattgactaaccacatccacaaagcacaccattaatccactatgatcaagttggggggaatctggtgaagggttctgaatatctccctcttcatccctcccgaaatctggaatacttattctattgagctattacaccagttttaacaccttcctcgtgttatgtttaaaaaaataaataaatttaagaaaaccattttaaataatgcacagttgcagcctggaaaaacttaaggtggcgccttatagtatcaattttaggagctttatttggtgcatttaacgcaactggtaattgcagaatccactttgcctgtgtaagtgaaaaatatagactgttatcttgttggccctatgaaattctgcacttttcattatatactctaccttcattaattacttctggcaagatgttctgccttagcactcagttgcattcttttcctttttcttcctgttcattatgctttaattctgaggaccatatgagggtagaatatattatcttttaaaaattacaaaaatttgtataggcaaaccatttcttaaagttgatggccaaattttaaaatgttatttttcatatcatttataatcttgtcacaatccacttaaagaagtttggttatatttcagtgaaaattttcttccagagtaggttttttttcgtgggttggggggtaactttactacaattagtaagtatggtgcagaatttcatgcaatgaggagtgccagcagtgtgataatttaaacatatttaaacnnnnnnnnnnnnnntgaatgcacaaacttgctgctgcttagatcactgcagcttctaggacccggtttcttttactgattt

SEQ ID NO: 19574 - DNA, 889 bp, Homo Sapiens
gcacgaggcaccatttcacaagacctccacaggagccccagctgccatcaagaaactctaccaggtgaaggggaagaagaacatccgtgccaccgagcgggcactgaactgggacagcttcaacactggggactgcttcatcctggacctgggccagaacatcttcgcctggtgtggtggaaagtccaacatcctggaacgcaacaaggcgagggacctggccctggccatccgggacagtgagcgacagggcaaggcccaggtggagattgtcactgatggggaggagcctgctgagatgatccaggtcctgggccccaagcctgctctgaaggagggcaaccctgaggaagacctcacagctgacaaggcaaatgcccaggccgcagctctgtataaggtctctgatgccactggacagatgaacctgaccaaggtggctgactccagcccatttgcccttgaactgctgatatctgatgactgctttgtgctggacaacgggctctgtggcaagatctatatctggaaggggcgaaaagcgaatgagaaggagcggcaggcagccctgcaggtggccgagggcttcatctcgcgcatgcagtacgccccgaacactcaggtgaggagatgcgcacaaccacagccctcttcctagggctcttcctgtggcccctgacccctcaaattggccaggaagggcaggagagccttgggcactgtcagaacaaccaggcctccctcttagacccatccagtgggaaagcccatctcattcttcaaatgtcaaaatacttattattttcaaagaggatgttgggcagcactctcctgggtgcccagagaactgggtactcctcctctgggccgttgtccctggctgggtgcc

SEQ ID NO: 19575 - DNA, 834 bp, Homo Sapiens
gcaaatcaaatcataacattccctactccaccacagcagcaaggaagcagaagccttagttctacttattccttaactgtacctgctttatagattttgaagtaaaatattttggtacaagttaccaaccaattaaattagcttttgctttttcagtcaactttcggactcgtcctctactagaagttccaaaagttaaagaggtgtcttcgaacaacagctgcctttgctcctcttcagagtcatcctcattatagaaagctgtccttcgaccttgatttctagttctcatgtggggttcagagcctttgagttcttcaaactcttcttcctcatctataggatcatctatcttttttcggttacttctccttaacactttgacacttgcagggactaggagatctgcatctaatttttgtgtcttcatcttccttttgggcttcctacctccacgattctttttctgtaacaaatcttcctttacattattagtttcagaaagaaaattgcatgttgaagaaggaagtacttcatctctgatgggatgcacattattttgctctaaatcttctggctttgcatactgtagctttttgggctttctaccccttttcttgtgtataatttcaccactattggtattaacttctactttaggtttccttccaggtcccctcttcacaagttttgatggctgtcctccatggccatttacttgaatggttcctgggacaagagcgttgttcttacatctccttgctcatgacagctgatgactttgaagagtggacgcctttgggagtacagatgacttcattttacgtttgactg

SEQ ID NO: 19576 - DNA, 1362 bp, Homo Sapiens
gcacgagggcagagcacacaccagtttattttgaaatgcaacacagatcagtattttatgaatacaacttattactacaccgatcaggtaaaaacagctttcaaatgcatgcatagaaagttaagcgtagtctctggactccttatttctaaatatacaaaaaatacatttaaattatataattttagtgaatcaaagacttataaaattacaattttggttttcacaacatagaaaaaatacaaaaatgactatatatacggttgtacaattttttacccaaatttcaaaggagcagtatgtattgaatttaatgttttataatgttttatctgaaactcagaactgcaagtaatttgcaggttgtaccatatcaatgccaaccttttattataaatgaataaccaaaaaaataagtgaaaaatgagggcacgatctcttcttacacctcttcaactctccagcatctaaacctttcctgtcagaagtctgctctggagacttttttcatctgcaaggacagtgctttattccatgactaactctccatggtgcctctggataatggttggtacgtgttaaatgaataagcccaacctcagcaaacagaacgcagcaagatgtagattagcagtctgtgctgacaaaagcactactgcggacctcaaagaattctctgtcagaaagaaggcccccacggagggatctgaaatacataatcaagtgggtagttgggaggatgatgcctttgactatgccctgaaatgaaacctctaagtctgacaaaatacccacaaaaacatgaccttccttgttcacactttataagaaggtgtgacatttggtggtgtggttgttctcaatttataaaataataaatgacttcaaaggagaaatgaattcatgttagggataaagaaaccagttactgagagaggttactgaaggacacagtgacatgccttacttatctgccataagtattctaaatgttgatgtacaaaaatacacactggggttgagaccctttttgaaaagggagctgtgtgctgtgttctcattgccaaagttcaattcaatgcaacaccactgtttgcaacagaatgttttttataagtagtgacaaattataataaggaggcccaaataaaacccccagtccagcaaccctggaaaagctgcatttttcatcctgatttctagaatttttccaaaaacaactgaaaaaatctaacagaacaaagtaaatgacaaatataacccaagttgattctattttatagtagaaatacattatggaagaataaaatgagagaaaagtcatgcaaaaaatctttcccacatattttgtgtacctcgtgc

SEQ ID NO: 19577 - DNA, 697 bp, Homo Sapiens
gcacgaggctgcaacgtgcgtggcctcaattgcgtcatatccggcccttgcgatcagggcttgaggaacccgcgccatgaagtgcgtgtttgttaccgtagggaccaccagctttgacgacctcattgcgtgtgtgtcggcgcccgacagtctgcaaaaaatcgagagccttggttacaaccgacttatcctgcaaattggtagaggaacggtggtacctgaacccttcagtactgagtcgtttactctggatgtttacaggtacaaggattccttgaaagaagacattcagaaagcagatcttgttattagtcacgcaggtgcaggaagctgtttggagactctggaaaaaggaaagccactcgtagtggttataaacgaaaagttgatgaacaatcatcagctggaactggcaaagcagctacacaaagagggtcatctcttctattgtacctgcagcacgcttcctgggctgttacagtcaatggacttatcaacactgaaatgttatcctcctggccagccagaaaaattttctgcatttttggataaagttgttggattacaaaaataaacactaaactctcaacactttaaaagcaacccccaaattcaacctatgtaatgtgattaaatcaaattaaatacataatatatatttacaaaataatataattaataaacttcctacatctat

SEQ ID NO: 19578 - DNA, 1488 bp, Homo Sapiens
ccacgcgtccgaggttgcagtgagctgaccgggtagccatggccttgcggctcctgaagctggcagcgacgtccgcgtccgcccgggtcgtggcggcgggcgcccagcgcgtgagaggaattcatagcagtgtgcagtgcaaactgcgctatggaatgtggcatttcctacttggggataaagcaagcaaaagactgacagaacgcagcagagtgataactgtagatggcaatatatgtactggaaaaggcaaacttgcaaaagaaatagcagagaaactaggcttcaagcactttcctgaagcggggattcattatccagacagtaccacaggagatgggaagcccctcgccaccgactataatggcaactgtagtttggagaaattttacgatgatccgagaagcaatgatggcaacagttaccgcctgcagtcctggttgtacagcagtcgcctgctgcagtactcagatgccttggagcacttgctgaccacaggacaaggtgttgtgttggagcgctccatcttcagtgactttgtgttcctggaggcgatgtacaaccagggattcatccgaaagcagtgtgtggaccactacaacgaggtgaagagcgtcaccatctgcgattacctgcccccccacctggtgatttacatcgatgtgcccgttccagaggccagaggcggattcagaagaaaggagatccacatgaaatgaagatcacctctgcctatctacaggacattgagaatgcctataagaaaacctttctccctgagatgagtgaaaaatgtgaggttttacagtattctgcaagggaagctcaagattcaaaaaaggtggtagaggacattgaatacctgaagttcgataaagggccgtggctcaagcaggacaatcgcactttataccacctgcgattactggttcaggataagtttgaggtgctgaattacacaagcattcctatctttctcccggaagtcaccattggagctcatcagactgaccgtgtcttacatcagttcagagagctgccgggccgcaagtacagccctgggtacaacaccgaggtgggagacaagtggatctggctgaagtgaacgggccgccttctgctccagctgcatcacagtgatggccaagctgcatcagccgcactctcctggacgccatatagctttaagatcgggggagggtaaataatgcaaaaattgcacagtggaagaaggggtctcacaaaaagcaatccatcctgtagtataggtaatggagttgggggaagcagcttccattctggatgtttggaaccctttagctttgttttggaatggccaccatttctcactggaaaacagtggtctgctgtgaaaggccagctctcggcagcccctgtgggtttcagcgctgccgctctgtgtcattcaagttgtgcacattgtttttcttctgacttccagaaataaaagtgtttccatgggaaaaa

SEQ ID NO: 19579 - DNA, 1879 bp, Homo Sapiens
cttttgtttggttgctgagtcacctgaaccttaattttaattggtaattacagcccctaaaaaaaacacatttcaaataggcttcccactaaactctatattttagtgtaaaccaggaattggcacactttttttagaatgggccagatggtaaatatttatgcttcacggtccatacagtctctgtcacaactattcagttctgctagtatagcgtgaaagcagctatacacaatacagaaatgaatgagtgtggttatgttctaataaaacttatttataaaaacaaggggaggctgggtttagcctgtgggccatagtttgtcaaccactggtgtaaaaccttagttatatatgatctgcattttcttgaactgatcattgaaaacttataaacctaacagaaaagccacataatatttagtgtcattatgcaataatcacattgcctttgtgttaatagtcaaatacttacctttggagaatacttacctttggaggaatgtataaaatttctcaggcagagtcctggatataggaaaaagtaatttatgaagtaaacttcagttgcttaatcaaactaatgatagtctaacaactgagcaagatcctcatctgagagtgcttaaaatgggatccccagagaccattaaccaatactggaactggtatctagctactgatgtcttactttgagtttatttatgcttcagaatacagttgtttgccctgtgcatgaatatacccatatttgtgtgtggatatgtgaagcttttccaaatagagctctcagaagaattaagtttttacttctaattattttgcattactttgagttaaatttgaatagagtattaaatataaagttgtagattcttatgtgtttttgtattagcccagacatctgtaatgtttttgcactggtgacagacaaaatctgttttaaaatcatatccagcacaaaaactatttctggctgaatagcacagaaaagtattttaacctacctgtagagatcctcgtcatggaaaggtgccaaactgttttgaatggaaggacaagtaagagtgaggccacagttcccaccacacgagggcttttgtattgttctactttttcagccctttactttctggctgaagcatccccttggagtgccatgtataagttgggctattagagttcatggaacatagaacaaccatgaatgagtggcatgatccgtgcttaatgatcaagtgttacttatctaataatcctctagaaagaaccctgttagatcttggtttgtgataaaaatataaagacagaagacatgaggaaaaacaaaaggtttgaggaaatcaggcatatgactttatacttaacatcagatcttttctataatatcctactactttggttttcctagctccataccacacacctaaacctgtattatgaattacatattacaaagtcataaatgtgccatatggatatacagtacattctagttggaatcgtttactctgctagaatttaggtgtgagattttttgtttcccaggtatagcaggcttatgtttggtggcattaaattggtttctttaaaatgctttggtggcacttttgtaaacagattgcttctagattgttacaaaccaagcctaagacacatctgtgaatacttagatttgtagcttaatcacattctagacttgtgagttgaatgacaaagcagttgaacaaaaattatggcatttaagaatttaacatgtcttagctgtaaaaatgagaaagtgttggttggttttaaaatctggtaactccatgatgaaaagaaatttattttatacgtgttatgtctctaataaagtattcatttgataacctcgtgc

SEQ ID NO: 19580 - DNA, 843 bp, Homo Sapiens
gcacgaggaccaattgaaaaacgactgtggcttgatgttgatacacatttgaattttttttaaaaaaagaaagttatcgtagccagcctgtaaatacttgatgcattcgtttcctcagtgctgcaatacatcatggacgtaaacatcttatttatctgataaactcagccttaccttgtggaatctgaagattgaaatatccaaaggtttaaacaagatggaaatcaatgaaaaagaggccttgtttatatatgggtagcttcacatttaatttataaagttaacaatctggaaactgtgagcccataaaacagtattttttagaagttgtgttacaactgtagcaaattttccttttaaaaaatccaggcaatggcattaaacattcttgctatcatttaccatggatttcctacatttctgagatccctgtattcaaaaacaaatgacagggttgttaagttgtactatattaaacaacttggtctggtttatatcattttaacaagttttttggaaatgtaaaagaaaaaagtaaagctccatttttgtgaattgcattgtttctaaaggaagtattttgagtattttcatctgtttgtattgtttcgactatgatatcagatatccagtgtgtccattctggcagtggttttgagttacttcatggaacttggacatacaccaccaggtcctttatgtgttgttctcctggggagacttctttttttaaatgccagggctacttctgctttacctcagtggtatcagcacatttgtaaattacgttaaaacacacaactcactgtgatctatgggagtgatatcaatacaaacgatgtt

SEQ ID NO: 19581 - DNA, 1026 bp, Homo Sapiens
gcacgaggctgtttcattttatgaagatctgaagaaccactacaaggacatccttcagagttgtcaaaccagtgaagaatgtgaattagcaagggctaacagtacatctgatgaactatgagtaactgaagaacatttttaattctttaggaatctgcaatgagtgattacatgcttgtaataggtaggcaattccttgattacaggaagcttttatattacttgagtatttctgtcttttcacagaaaaacattgggtttctctctgggtttggacatgaaatgtaagaaaagatttttcactggagcagctctcttaaggagaaacaaatctatttagagaaacagctggccctgcaaatgtttacagaaatgaaattcttcctacttatataagaaatctcacactgagatagaattgtgatttcataataacacttgaaaagtgctggagtaacaaaatatctcagttggaccatccttaacttgattgaactgtctaggaactttacagattgttctgcagttctctcttcttttcctcaggtaggacagctctagcattttcttaatcaggaatattgtggtaagctgggagtatcactctggaagaaagtaacatctccagatgagaatttgaaacaagaaacagagtgttgtaaaaggacaccttcactgaagcaagtcggaaagtacaatgaaaataaatatttttggtatttatttatgaaatatttgaacattttttcaataattcctttttacttctaggaagtctcaaaagaccatcttaaattattatatgtttggacaattagccaccagtcagatagttagaatcgaagtttttcaaatccattgcttagctaactttttcattctgtcccttggcttcaattttaatattttcctattatatgaaaatgtatcctttgggtgtttgaattttccttccttccttggtaatagttctgaagttctggcaaatgccgtggaaagtatttggcattataaagaaaaattctt

SEQ ID NO: 19582 - DNA, 1498 bp, Homo Sapiens
  misc_feature (465)..(512): n is a, c, g, or t
cccccgggctgcaggaaaaaacagagtcacgccgccagcgctgctcctcaggccagctccccaccggactacacaatggcctgggcagaatattacagacagcaggtcgctttctacggacagacgttagggcaggcgcaggcccacagccaggagcagtaggacagcgtcctcgtggccaactctcccctcaaaatcattgtcaaagaaaacctatttgtaacagaggtttttacatttgcaaaccttttgatgaagaactgttgttttgttctgtgaaacactatatttagattaacggaatttttctaaaaatcaggaaaattagttactaaaaattgctgatcatttttgtttcattatttttgttatttcaaatgtataagctctgggattctttttggagcaatacctacaaagtcaggcaccagaatgtgcctcagagctgtgacatttcaacatgannnnnnnnnnnnnnnnnnnnnnnnnnnnnnnnnnnnnnnnnnnnnnnnctgttgcaacagaaagtggcttggaagtcttaggtggtatgtaacaaattctttttaaaaattttaaagcagtatttaagtattcttaaatgtgtaaattcatttaatgtttttacttctaatttcttgtatcttggctgtctggtttttatagcatttttaaaaaaactgaactattatgtattgtaatgaatgatgtgaattctgaactgagacagataattgtattgctgttcaacaggggttggggaggggcattttgtagggtttgtataatttctagagttcgaaaggggtaatataaaaaatgtggctcgtgtgtttagcctacgttttttctcatgcctccattaccagttgcaattgtgtatctaagacctccaagcttgtttttaaaacaaaacaaaaaacctttctctattatctcagaaatataaatactgttatttttaatattaagaaattcaatataacttttaacacacactgtggaacattaaaccgtataaaaatgtagttataactatttttaattccaaggtgttgtttgcttttttcttttaaatattttcttaatattttgtcagattaactagatgaataaataaatctagtattaaccgcattatgaattaaataattttgatttaatgaaagggataatatgatttccagtgtttactgtagtgtatcttgtacagataacatgtatttttaaaggaaaaaaaacggaattgaagctattttttcttgcatttctaattgacctgagggacattccgtttgaaatgtactgaagttacagtttctggttttttctccttatttttcttataatgcttgaaatgtctaactattaaaaaagacaattggaaaatgttatgcatggggtttttaagaaaacaaagtgttctttttatttgactgacaattcattttacactctatataataaaatctccacaaggcatcttgtgggcaaagtc

SEQ ID NO: 19583 - DNA, 1162 bp, Homo Sapiens
gcacgaggtcttacttcaatttgaacccatttgaggttcttcagatagatcctgaagttacagatgaagaaataaaaaagaggtttcggcagttatccatcttggtgcatcctgacaaaaatcaagatgatgctgacagagcacaaaaggcttttgaagctgtggacaaagcttacaagttgctactggatcaggagcaaaagaagagggccctggatgtaattcaggcaggaaaagaatacgtggaacacactgtgaaagagcgaaaaaaacaattaaagaaggaaggaaaacctacaattgtagaggaggatgatcctgagctgttcaaacaagctgtatataaacagacaatgaaactctttgcagagctggaaattaaaaggaaagagagagaagccaaagagatgcatgaaaggaaacgacaaagggaagaagagattgaagctcaagaaaaagccaaacgggaaagagagtggcagaaaaactttgaggaaagtcgagatggtcgtgtggacagctggcgaaacttccaagccaatacgaaggggaagaaagagaagaaaaatcggaccttcctgagaccaccgaaagtaaaaatggagcaacgtgagtgaccgcccaaggtcacaggcacagaacctttcccctgctatctcccttcctgcttcgaaggactcattctttcctcccacttccaccccaacatagagtagtatttgctttttagtccattttgttttcaatacgatttaatatcgatcagagtaattcttttgtacattgaaatgaggggcttggtttaaaaaaagacctttccctctccctgcccctagaacaaccagtattaaaaggtgccaccattggtgctgccttctcttcccacagcctgtaactcagtgttttgtacttcactgaattgtgatggttagaaacttcgttggatagtttgtggaaatcatccaattaaaacatactgctttaaaacagttgttgctgtgacttcagagacaagcctggaaaggggcaccttaagaagcccccttcgcttcagttgctcgcttctgggtgtgctcccttcgaaggcccagataggaagggaacacttgtgagccacagacagcatctgatgcctgtggtgtttggcatgtgcccctgtcta

SEQ ID NO: 19584 - DNA, 1675 bp, Homo Sapiens
  misc_feature (933)..(941): n is a, c, g, or t
gcacgagggaggaacctcagcagcagaagcaggagccgctgggcagcgactccgaaggtgttaactgtctggcctatgatgaagccatcatggctcagcaggaccgaattcagcaagagattgctgtgcagaaccctctggtgtcagagcggctggagctctcggtcctatacaaggagtatgctgaagatgacaacatctatcaacagaagatcaaggacctccacaaaaagtactcgtacatccgcaagaccaggcctgacggcaactgtttctatcgggctttcggattctcccacttggaggcactgctggatgacagcaaggagttgcagcggttcaaggctgtgtctgccaagagcaaggaagacctggtgtcccagggcttcactgaattcacaattgaggatttccacaacacgttcatggacctgattgagcaggtggagaagcagacctctgtcgccgacctgctggcctccttcaatgaccagagcacctccgactaccttgtggtctacctgcggctgctcacctcgggctacctgcagcgcgagagcaagttcttcgagcacttcatcgagggtggacggactgtcaaggagttctgccagcaggaggtggagcctatgtgcaaggagagcgaccacatccacatcattgcgctggcccaggccctcagcgtgtccatccaggtggagtacatggaccgcggcgagggcggcaccaccaatccgcacatcttccctgagggctccgagcccaaggtctaccttctctaccggcctggacactacgatatcctctacaaatagggctggctccagcccgctgctgccctgctgcccccctctgccaggcgctagacatgtacagaggtttttctgtggttgtaaatggtcctatttcacccccttcttcctgtcacatgannnnnnnnnatgttttattaaagggggtgctggtggtgagccgtgtgtgcgtgtccctgctctgctgcccgcctggctgctctgtctgctgccccctccccccaggtgggtccccctgcttttcacctatctactcctgagcttccccaacaggagcaggtttgaggggccaggcctcttggaggcccctcctgcttcgttgggttctgcttccttcccttcttagctggctcaggggcttctatgggatcctggaagttccttagggacttgcccagggtcccagggccacccacacttcatctgctccctcataggccccacctccacgtcccggctgggccccagaccccagcttcctgccctccaccgggagtctgcatggttgggagtcctgggtggaggggcctttgtgaggctggacccggctcagggcaggtggaggagctgggcctcccacagggtgcccgggcagtgccatcctggtgggggagggcagccttcaaacgtgtggggtctacagtcctcaggtctaggcagggctgccggttctccacctccccatccgccccaggccccctgcctgtgcctgccttgcaccccctctgcttgggccacggtgtctctgcattgcctgcctttttgccttcacctcttttcttccccgccccctgcacattcggggtctcagcccccaggctgtgagctccttgggggcaggccctcaataaatgtgaactgct

SEQ ID NO: 19585 - DNA, 1308 bp, Homo Sapiens
cccccgggctgcaggaattcggcacgaggctcacatcttacctgcctcctcccttgttgagacatcgtttgaagactcatacaactgtgattcaccaactggacaaggctttggcaaagctggggattggccagctgactgctcaggaagtaaaatcggcttgttatctccgtggcctgaattctacgcatattggtgaagataggtgtcgaacttggctgggagaatggctgcagatttcctgcagcctgaaagaagctgagctgtctctcttgctgcacaacgtggtcctgctctccaccaactaccttgggacaaggcgctgaatgaaccatggagcggatggcattgtcctgcagtcgtatagtatagcagtgcaggaacaaacagcacttgccagcaaagtctgtgtgtactgttaagtgtgtgggaggcagagagaggagcaggggccatgggcttcacagcatggcacacatgtgggaactgcagacattcctctcacagctagaactgaaacaaaccctcttgctaggggtggtccgtgtgaggtgtcatcctgtccccctcataattactaatagctggaactggcagcagcctctactgggcttttactgtgatgtgttcagttcatgtcctaggaagtcagcttttgccccaggtgggaatccttatttggcttaggactgatccacttccatgttacttacatctgtgggtttttgttgttgctgttagaaaatttttggctggtgaaaacagcactcctttggctggagcacttgtgtccatgcatgtacttgggtgtttccctccatcctttctgatatgaccaaaaatcaagttgttttgttttttgtcaccttcactggcatgggctaaccacttctttttcaaaccctctgaacacctttttctgatgggtaacttgcaggaatattctattggaaaagataacaggaagtacaagtgcttcttgaccccttcctcaatgtttctagccttcactctccattgtcttttctgggctgtattacagccctctgtggatcttcaactctgctgcctccactgtgatgcagcagtccaactgtaactgacagtggctgccttctctgggccatggatcacacctgtaaggtactaattactgcccagcctggggagatcaggagaggtctgcatagttagtaagttgggtttagcttttgtgtgtgcatcagtgacttagagttctgtaataacttattgtaaatgcatgaagcactgtttttaaacccaagtaaagactgcttgaaacctgtt

SEQ ID NO: 19586 - DNA, 1108 bp, Homo Sapiens
gcacgaggctcttctgaagctgctaactggagagctactacccacagatggcatgatccgaaaacactctcatgtcaagatagggcgttaccatcagcatttacaagagcagctggacttagatctctcacctttggagtacatgatgaagtgctacccagagatcaaggagaaggaagaaatgaggaagatcattgggcgatacggtctcactgggaaacaacaggtgagcccaatccggaacttgtcagacgggcagaagtgccgagtgtgtctggcctggctggcctggcagaacccccacatgctcttcctggatgaacccaccaatcacctggatatcgagaccatcgacgccctggcagatgccatcaatgagtttgagggtggtatgatgctggtcagccatgacttcagactcattcagcaggttgcacaggaaatttgggtctgtgagaagcagacaatcaccaagtggcctggagacatcctggcttacaaggagcacctcaagtccaagctggtggatgaggagccccagctcaccaagaggacccacaacgtgtgagccctctacctgggttcgggtcaggagctccatctgggaactaacagctgctaacctgaccagccgctcaggacaggaccctggggctacactcctgcattgctgcaatactgctcccccagcctctcccctgcccctcaacctgccttagctgcactctcttacctacagctggacagtacctgtctgtttcctgtcctccttccagttacatctgtccatgtctggactcggctggccgttccctccagccccttgctggttatcttactctgagtgtgatgcagtcagaggcacctgcgggttagcccaggggcccaagccctggatttggcctgcggaggagcttaagatcctcgttttctgggttttggtgatgttggaggagtaccccccagcccaccgccccgattcctttttgcttctggtttggagctccggaccaggaccttcgtcctggtcagttttaaataataatttagcagtggaacttttaaacctgcgtgacatctacaagcgcccataaaggaagaggatgcc

SEQ ID NO: 19587 - DNA, 663 bp, Homo Sapiens
acagtttcaatcttatatttattctcttgtggaatgctaggtttaatgttacagtatggttgtcaaagctaatgaaatgtgacaaatgtctaaatgctgcaaaacagtataattttaattaaacaaaacacctgttattgtacagctgaggtctgatggttgttaaactgatgcctatgtgtatggccagccacaaaccttggggatgtttattacctgtacatatatatacaaatatatcccatacatatgtatgcacacaggcatgtattaatttatgcgtgaaacttataaaattatatatacaaacacatacatgcacatctatctacatatacctaccctcaccattgagtaatcagcctcatgcccaattattattgctgcccagtataactacatgattttagtgccaataccaggcacctttttgggtgcaggataggtacatctatgcatatagatatgcatattcatgtatgtttgtgtatataaagaaattctctctcccttttatgcttcagccatgcattactacaataaacagtctttccactgtaggtgttggaattctaaacagtgtaaaatctatttctggaaaactgtgtatgttcatagttaccaaaaatatattatatatatgattgaaaacctattgagtac

SEQ ID NO: 19588 - DNA, 762 bp, Homo Sapiens
gcacgagggacaacaaggccgggagggtggggggggtgcacaggtagccccgaccctctcaggcattccagccacagaacatcaaagtgagcgagtactgcgctggctgtggcttcagagaacctgtatgtgccacatggaaaaacaggacaccagagcccaccagacagtgccggccagcagagaagcagagagccagcgccacacaacatcaagaaggccgacaaccaggttggaaaccaagacggagctcagacccaccacatcgccccagaggcttttccagcacccatgatgtttcggactgacctaaaaactaattgtcgagaagccaagggtgaggaggcaggaagcacctccggttggaggcacccaggcttgccagccacagagcgccccaaagtcaccgtcatcccagcccctggccttcctgctgccctccggggccatggcactgctgttcagctcaggcacaggggcacagcagaggtttgggaagcggtctccccaccggcactgggattggcgggtccaagcccagcaaccggcttcgctccacaacacacaccacacctgggactgtttttaatacatagcaacagactgggttatttatttaagatgtgtattgtgtcatatgaagtttaagagacataaatggcattttgttatttattaagacaaactccaattgttctctggctgtttttttcagttgtgtctagcaaatacttatctgccctttgaaataaaatgtttttg

SEQ ID NO: 19589 - DNA, 1108 bp, Homo Sapiens
cccgggctgcaggaattcggcacgagggcggcgcctgctctgtagagccggcggaaccgggtagcttggccaggttgtgaggaaccgcagcgcgccgcaggaccgggccgctgagcctgcagccgccccgcgccgtgacctgcgaccctagaccccgactccctttggctcagcccgcgcgccccaggcccggcccgggcggcgcgacgggaggatgagcggcgggcggcggaaggaggagccgcctcagccgcagctggccaacggggccctcaaagtctccgtctggagtaaggtgctgcggagcgacgcggcctgggaggataaggatgaatttttagatgtgatctactggttccgacagatcattgctgtggtcctgggtgtcatttggggagttttgccattacgagggttcttgggaatagcaggattctgcctgatcaatgcaggagtcctgtacctctacttcagcaattacctacagattgatgaggaagaatatggtggcacgtgggagctcacgaaggaagggtttatgacctcttttgccttgttcatggtcatttggatcatcttttacactgccatccattatgactgatggtgtacagctcccaagtgctccctatccagtccaaaggaccctcttgattacagcacaggaacttgatcgttggggaaccccagccccttggaacttggaagacccgtgtttcctggaccgcgaatcagtgtgttgggcatcagtgttttctgcaagggttgtgacctgaaactttttaaaaaccacccacctttggggaagcatttctgaatttatccatcaccaaccatttcttcttggataccatcaagtaacagctattatttgccaagtggagctgtcatttaatttgatgcacctctggattcagatgaaacattaaattgtcttcctcgattctccatcgggtgtagagtttttaaactatcaatggcatttcaagtcttctgaaacaacatggctgtatgtgcgtggtccatagcacagtacatgcagcatctaataagagtttccattgtagaatgttttcacatacttgaataaatcaaatctttaattgag

SEQ ID NO: 19590 - DNA, 1152 bp, Homo Sapiens
gcacgaggcaaacgtgcggctcgtggtgtgagtgccagaagctgcctccgtggtttggtcaccgtgtgcatcgcaccgtgctgtaaatgtggcagacgcagcctgcggccaggctttttatttaatgtaaatagtttttgtttccaatgaggcagtttctggtactcctatgcaatattactcagctttttttattgtaaaaagaaaaatcaactcactgttcagtgctgagaggggatgtaggcccatgggcacctggcctccaggagtcgctgtgttgggagagccggccacgcccttggctttagagctgtgttgaaatccattttggtggttggtttttaacccaaactcagtgcattttttaaaatagttaagaatccaagtcgagaacacttgaacacacagaagggagaccccgcctagcatagatttgcagttacggcctggatgccagtcgccagcccagctgttcccctcgggaacatgaggtggtggtggcgcagcagactgcgatcaattctgcatggtcacagtagagatccccgcaactcgcttgtccttgggtcaccctgcattccatagccatgtgcttgtccctgtgctcccacggttcccaggggccaggctgggagcccacagccaccccactatgccgcaggccgccctacccaccttcaggcagcctatgggacgcagggccccatctgtccctcggtcgccgtgtggccagagtgggtccgtcgtccccaacactcgtgctcgctcagacactttggcaggatgtctggggcctcaccagcaggagcgcgtgcaagccgggcaggcggtccacctagacccacagcccctcgggagcaccccacctctgtgtgtgatgtagctttctctccctcagcctgcaagggtccgatttgccatcgaaaaagacaacctctacttttttcttttgtattttgataaacactgaagctggagctgttaaatttatcttggggaaacctcagaactggtctatttggtgtcgtggaacctcttactgctttcaatacacgattagtaatcaactgttttgtatacttgttttcagttttcatttcgacaaacaagcactgtaattatagctattaaataaaatctcttaactatttc

SEQ ID NO: 19591 - DNA, 994 bp, Homo Sapiens
gcacgaggccccaaccaccccctccacatccgggagaaccgcagtgcggccctgaagaaggcggatgtcattgtcctagcaggaactgtgtgtgacttccgcctatcctatggccgtgtcctcagccacagcagcaagatcatcatcgtcaatcgtaatcgggaagagatgttgctcaactcagacatcttctggaagccccaggaggctgtgcagggagatgtgggttccttcgtgctgaagttagtggagggccttcagggccagacctgggccccagactgggtggaggagctgcgggaagccgaccggcagaaggagcagacctttcgggagaaggcagcgatgcctgtggcccagcacctgaacccagtgcaggtgctgcagctggtggaggaaacgctacctgacaactcaattctggtggtggatggtggggacttcgtgggcactgctgcccatctggtacagccccgcggccccctgcgctggcttgatcctggggcctttgggactctgggagttggtgcaggatttgcacttggggccaagctgtgccggccagatgctgaggtctggtgcctgtttggggacggagcttttggctacagcctcatcgaatttgatacattcgtcagacacaagatcccagtgatggccttggtagggaatgatgctggctggacacagatttctcgggagcaggtgccctctctgggcagcaacgtggcctgtggcctggcctacactgattatcacaaggcagccatgggtctgggggcccggggcttgctgctctcacgggagaacgaggatcaggtggtcaaggtgcagcacgatgcccagcagcagtgccgagacggccacccggttgtggtcaacatcctcattgggaggacggactttccgcgatggctccattgctgtatagggccttgtgggtcaagacgcttggctgcctttcctgcccctggactgtgtcagctggtttgga

SEQ ID NO: 19592 - DNA, 1010 bp, Homo Sapiens
gcacgaggagatcatgagccatcagctcctctggggccagctataggacaacagaactctcaccaaaggaccagacacagtgagcaccatgggacagtgtcggtcagccaacgcagaggatgctcaggaattcagtgatgtggagagggccattgagaccctcatcaagaactttcaccagtactccgtggagggtgggaaggagacgctgaccccttctgagctacgggacctggtcacccagcagctgccccatctcatgccgagcaactgtggcctggaagagaaaattgccaacctgggcagctgcaatgactctaaactggagttcaggagtttctgggagctgattggagaagcggccaagagtgtgaagctggagaggcctgtccgggggcactgagaactccctctggaattcttggggggtgttggggagagactgtgggcctggagataaaacttgtctcctctaccaccaccctgtaccctagcctgcacctgtcctcatctctgcaaagttcagcttccttccccaggtctctgtgcactctgtcttggatgctctggggagctcatgggtggaggagtctccaccagagggaggctcaggggactggttgggccagggatgaatatttgagggataaaaattgtgtaagagccaaagaattggtagtagggggagaacagagaggagctgggctatgggaaatgatttgaataatggagctgggaatatggctggatatctggtactaaaaaagggtctttaagaacctacttcctaatctcttccccaatccaaaccatagctgtctgtccagtgctctcttcctgcctccagctctgccccaggctcctcctagactctgtccctgggctagggcaggggaggagggagagcagggttgggggagaggctgaggagagtgtgacatgtggggagaggaccagctgggtgcttgggcattgacagaatgatggttgttttgtatcatttgattaat

SEQ ID NO: 19593 - DNA, 1242 bp, Homo Sapiens
  misc_feature (932)..(940): n is a, c, g, or t
gcacgaggggtgcaggcctggtatatggacgacgccccgggcgacccgcggcaaccccaccgccccgaccccggccgcccagtgggcctggagcagctgcggcggctcggggtgctctactggaagctggatgctgacaaatatgagaatgatccagaattagaaaagatccgaagagagaggaactactcctggatggacatcataaccatatgcaaagataaactaccaaattatgaagaaaagattaagatgttctacgaggagcatttgcacttggacgatgagatccgctacatcctggatggcagtgggtacttcgatgtgagggacaaggaggaccagtggatccggatcttcatggagaagggagacatggtgacgctccccgcggggatctatcaccgcttcacggtggacgagaagaactacacgaaggccatgcggctgtttgtgggagaaccggtgtggacagcgtacaaccggcccgctgaccattttgaagcccgcgggcagtacgtgaaatttctggcacagaccgcctagcagtgctgcctgggaactaacacgtgcctcgtaaaggtccccaatgtaatgactgagcagaaaatcaatcactttctctttgcttttagaggatagccttgaggctagattatctttcctttgtaagattatttgatcagaatattttgtaatgaaaggatctagaaagcaacttggaagtgtaaagagtcaccttcattttctgtaactcaatcaagactggtgggtccatggccctgtgttagttcatgcattcagttgagttccaaatgaaagtttcatctcccgaaatgcagttccttaaatgcccatctggacgtgatgcccgcctgccgtggtaagaaggtgcaattctagataacacagctagccagatagaagacacnnnnnnnnnccaaaatgatgccttggggtggggagtggtagggggaagagctcccacccctaaggggcacacactgagttgcttatgccacttccttgttcaaaataaagtaactgccttaatcttatactcatggcttggagttaccttatattcaggtatatgtgatattttgcctggtttgttaaaattgccccatttagattccttctataattgttcttatagataagtaatttatatatgagctgtgttagtattttttcagtgtgagatctctggattctttcacaataaagctgttgaatttt

SEQ ID NO: 19594 - DNA, 936 bp, Homo Sapiens
  misc_feature (800)..(810): n is a, c, g, or t
cccccgggctgcaggaattcggcacgaggccaaaaattcactgaccaaccaaccaaactccacacttcatctgatcccccatagacttggggatggacagctgttctttggccatatggtataagaggatcattcttgtcactacttaagttagcctcatcattttgtgctgctccaacaccagcagggtatctcccaataaagtgttcctaagcagcctgtatactgagtgcaagcaggctatcaattttaataatagtccataccatgtatgtgtttctgtcagcagaatgtacatgttgtacaaaacctccaggttccttaagctttttgctgtccatgaatcctctgtggcaactgtaatcacagagccagaagccagagggccagggatatgagaggctgacaaacatcaggggacatctggggaggagatccctgtcatgtctcttgtgccatggagctattatggctggtcttccatttgctttttctttaagtgaaaaccatttttctactttgcttttctctccatacttaaatggtcagtagctactgagtggtgctttatctgaataggcctggatcgaagtaaaatagaaatgggactggctttccacaggaagtaaactgcttcagagcccacagtcccctgctcagtgtccggaaagaaagtcagtcatccctgttggcagtaaatcttcccacaggccgtccattagagatttaactagatatgttcaataaaaagagtctgaggcagtggaaatgaggaacggaaacttaggttgggagaatannnnnnnnnnnattcattctgtttgcttaattcagagtacagtttgtgctatttcatatctgtactccaggcagaatataacttgaaaatactgtgtctaagaatttcagtgttctatcattaaataatttacttaa

SEQ ID NO: 19595 - DNA, 879 bp, Homo Sapiens
gcacgaggcccgctgcgtgttttcctcttgatcgggaactcctgcttctccttgcctcgaaatggaccccaactgctcctgctcgcctgttggctcctgtgcctgtgccggctcctgcaaatgcaaagagtgcaaatgcacctcctgcaagaagagtgagtgcagggccttccctgcgaatctgggggatgggccaagttagagcagggaacccagagctctgcaggcaggggcaggccaatgaccagcttccccaaacccctccttcaacacctgattcagaatcagacctcaaattgccttaaaaatgggtgagtcccagcctcttattaccaaactagaaactgaggcccagagaggttaccagatagtgttgggaacaaagctggaatgtgaacctaggtctcctgcctcctgatgcagccttcttcacccttctgggtcctgaagcacttaaggcccaggatctggaagaccccgggtgatttcaaacctaatgatccagtcctttcctgcaggggtagcccagagcttccctagccttccccagaactgctgtgtcagggatttgccccctgtccgtctgggaagactttcctcatttaagggtaggttttggggaactggcctccttttgttcctgtacccccaatcactacctgtccagtcttctgtcctgtccccagactcaggtggggctgggcagctttttcatataaaaccctcatcccaaagatctaccagttctcttctgacaagccatgccatcctgaaatgatggtcctctggggctgggaggcagggctcgagccaggcctctgttgggggcagggaggtgcctgattgagtctgctctgacctctcactcccccttcttct

SEQ ID NO: 19596 - DNA, 854 bp, Homo Sapiens
gcacgaggctcacactgtggcggggctgcatccctaccatggctcgggccgtcgtcgtcaatgctgcccagctcgcctcctactcccaatccaagcagttcttactggactcaggctacttctctgacaacatcttgtgccacttctgtgccagcatgatcagcggtcttgtcaccactgctgcctccatgcctgtggacattgccaagacccgaatccagaacatgcggatgattgatgggaagccggaatacaagaacgggctggacgtgctgttcaaagttgtccgctacgagggcttcttcagcctgtggaagggcttcacgccgtactatgcccgcctgggcccccacaccgtcctcaccttcatcttcttggagcagatgaacaaggcctacaagcgtctcttcctcagtggctgaagcggccgggggctcccactcgcctgctgcgcctatagccactgcgccctgggggcctgggctctgctgccctggacccctctatttatttcccttccacagtgtggtttcttcctctgcggtaaaggacttggtctgttctaccccctgctccagcttgccctgctcgtcctgatcctgtgatttctctgtccttggctattcttgcagggagctggaaaacttcctgaggatttctggcctccccctgggttttagtttcagggcacacaggacagcagaagatcccctttgtcagtggggaaaccaaggcagagctgaggggacagggaggagcagaagccatcaagatggtcaaagggcctgcagagggagatgtggcccttcctccccctcattgaggacttaataaattggattgatgcctcgtgc

SEQ ID NO: 19597 - DNA, 1964 bp, Homo Sapiens
gcacgaggctcagattctgcatctgtacagagagcagacactagcttaaacaactgtgaaggtgctgctggcagcacatctgaaaaatcaagaaatgtgcctgtggctgccttgcctgtaactcagcaaatgacagaaatgagcatttcaagagaggacaaaataactaccccgaaaacagaggtgtcagagccagttgtcactcagcccagtccatcagtttctcagcccagtacttctcagagtgaagaaaaagctcctgaattgcccaaaccaaagaaaaacagatgtttcatgtgcagaaagaaagttggtcttacagggtttgactgccgatgtggaaatttgttttgtggacttcaccgttactctgacaagcacaactgtccgtatgattacaaagcagaagctgcagcaaaaatcagaaaagagaatccagttgttgtggctgaaaaaattcagagaatataaattacttcttgtgaagagactgaaactttgtttttattttaatatatcgtaggaaaacattaaagagcagatgcatggccatttttctttgatgttctccagagttttacattacacttgtctgtcttataattgatattttaggatgtttgggtgtttgttacaggcagaattggatagatacagccctacaaatgtatatgccctcccctgaaaaaaattggatgaaaatctgcacagcaaagtgaaacacacagataataggaacaaaatgtagttcccatgtgccaaacaaaataaatgaaatctctgcatgtttgcagcatatctgccttttgggaatgtaatcaaggtataatctttggctagtgttatgtgcctgtatttttttaaaatggtacaccagaaaaggactggcagtctacttctaccatagttaaacttcaccctctttaatttcacaacatattctttggaagcaggaagaaatgctcataaagaggatcagaccttctttcccgtgaaaccagtatttggcgccatatataagcctggttaaattggtcatctaaagctgtcaaataagacattctgtgaaaggtaaacatcgaaactggttataagtaaaaccatcaagccaacaacagggtcttgagataacctttgaagcttattgtactggcctgcaccagaagatgtctgcattactcattgctaaaaatgtgtagcacagaactgcactagggattaatttgtttacaagaagaaatttaaactctacgtttggttttcacatacagcagctctattgaataacatgcatctgaattttaagttgcaaaggtatctgaataatttttcatgtgcatcttttgtcgaatgttttggttcaagaaagaatgtttaaagctttttaaaagacttcagttcttaatgtaactgtacccttctgcatggaaaatcataaccaacatggctgcagtagacttcttagtggtatccagcgccacttgcacaaggctgctttatcatattgtacttgggtgtaggactctagtgttcttgggtgtattgcatgggctgcattatctacagcattgtacaataacaactagaaaaggcagtatacttcactgatgcttgtctggtaataatcacttctgtgttataatggaaggttttttgtgatgtatgaaacttgtgttttttatatataaatgagtatagttagtgttgtggtaatgcctgttttcatctgtaaatagttaagtatgtacacgaggcactacttctgatttattgcaatgttcagtcctagtttttacttttattcttaaagcattcagttttgctttcaattttatgtaccttagttctgagttagacctgcagatgtgtacagatagttcatatttatgtattgcacataatcatgctattcagcattgatgctatattgtattatgtaaataataaaagccatgtacagaggg

SEQ ID NO: 19598 - DNA, 779 bp, Homo Sapiens
  misc_feature (613)..(666): n is a, c, g, or t
attcttataaagctgtcatcaacctgggaaggaattcaggctggaaaggagctcgaggagcagcacggcatccactgcaacatgacgttactcttctccttcgcccaggctgtggcctgtgccgaggcgggtgtgaccctcatctccccatttgttgggcgcatccttgattggcatgtggcaaacaccgacaagaaatcctatgagcccctggaagaccctggggtaaagagtgtcactaaaatctacaactactacaagaagtttagctacaaaaccattgtcatgggcgcctccttccgcaacacgggcgagatcaaagcactggccggctgtgacttcctcaccatctcacccaagctcctgggagagctgctgcaggacaacgccaagctggtgcctgtgctctcagccaaggcggcccaagccagtgacctggaaaaaatccacctggatgagaagtctttccgttggttgcacaacgaggaccagatggctgtggagaagctctctgacgggatccgcaagtttgccgctgatgcagtgaagctggagcggatgctgacagtgagtgttgtgtgaacgaatgttcaatgcagagaatggaaagtannnnnnnnnnnnnnnnnnnnnnnnnnnnnnnnnnnnnnnnnnnnnnnnnnnnnnctgcacgtggcttctgatgaatcttgcgttttttacaaattggagcagggacagatcatagatttctgattttatgtaaaattttgcctaatacattaaagcagtcacttttc

SEQ ID NO: 19599 - DNA, 653 bp, Homo Sapiens
gcacgaggaaaagatatcatcaatcttttatttaactaagcactgcccttcattttgaaggaaatgatacaatttcaaatcggaacttccttctcaagaagtgatataagaatgtaacattgatttaacatacaaccttcaacaaaaataaagtttatacaactcactgggaaataaaatgcatgtggaatttatcctgtttgtcaacataattcttcatgagtcacaagtattatagccaagaacaaaacaacaaaaagctgaatcagttgatagttactctgatttaaaaaacatttcacaaataagatgtagctttccaaacaaatccattcgatgaccattatcacaactatattttattataatttataaaacaaaaaatggttagacaagcacatgatatcaagagtcttcaacacagtggattccattttattaagaaaaaaaatagaaaacaagtagtccttaaattgtcttagctctccatagcatacgttatataaaattaaagttttgcttccaaaaatatgtttccatgtggtcgtggtgttgtccagtgctattagggccaaagcaccaaagacatgagaagtttaaccatcgacttgtcatttttcataaaaactaaacatttcaattatacctcgtgc

SEQ ID NO: 19600 - DNA, 2621 bp, Homo Sapiens
  misc_feature (869)..(883): n is a, c, g, or t
  misc_feature (1183)..(1197): n is a, c, g, or t
  misc_feature (1739)..(1769): n is a, c, g, or t
gcacgaggcgcaggcggatctctgaagagctgggtcgccagcctctcccgcgcacgttgcctggcctccagcacctacttggtcccgcgcgctccctcgtgtcgcccctcggagcagcagccgccgcggtcgccgctacccggaaagaagtcagagacgccgcgaggtcgccgccaccgccatgcccaagaataaaggtaaaggaggtaaaaacagacgcaggggtaagaatgagaatgaatctgaaaaaagagaactggtattcaaagaggatggtcaggagtatgctcaggtaatcaaaatgttgggaaatggacggctagaagcaatgtgtttcgatggtgtaaagaggttatgtcacatcagaggaaaattgagaaaaaaggtttggataaatacctcggacattattttggttggtctccgagactaccaggataacaaagctgatgtaattttaaaatacaatgcagacgaagctagaagtctgaaggcatacggcgagcttccagagcatgctaaaatcaatgaaactgatacatttggtcctggagatgatgatgaaattcagtttgatgacattggagatgatgatgaagatattgatgacatctaaattgaactcaacattttacattccatcttttctgaagattgtcctacaatttggattttgatcatgacaaagaagattaaaatttcattagcatgaatgcaatttgttaaagcagactgatttgtttctaagatatttttggtttttttaaaactgataataatgctgaattatcttaagtgagatgttaagcccactttgttcttttaatgtaatggagcttatgggtagaagaccatgtctactaattacnnnnnnnnnnnnnnnccatgcattgctgcttttcctaccacttccagtaagaaaatgggtgttttgaagaaatcatttgccttgtcctcacggaatctgattaagccctggcctcttgattgtatagagtcattgtgtatattccagttacctagatattcccttgagattttgatacaatttgagggaggcagaagtctgcagttgaagaaaaaaaataagtctgtttgtcatatttaagtagcctgtggctatttttatactgattttgatatcatgttcttttcatagtcgtattttgccaccgtaaacatnnnnnnnnnnnnnnngatttccaaaatgccgttttcagaacctgggttttaatagcagtattgaatttgtaagcttagtagttgcagaaattgaacactaggtggcactcagttatcttaacaggggaagtactgatacaattgttgacttttcttttactatgtgtaagaaataccccaaacatgaaaagattgttttgatcatatgcatgtatgtagaatatttttgcagagcagaaagattatgttagaagtgtgatttttattttcagaagtcatatacatgtaagctacaattttgagtgctttataaacacttaagatatatatataaattttaatttcatagcaacttgtaaaaaataaaatacttgttgaaaagcctttttcaacatatccctaagctaagggaagaggaaggaataacaactcagtgaaaagatggtctccagtttctgaatgaaaaagctacagctgagaaataaaataaaatgtcatgctgcagaatatgttatacccttattttgtgttaaggatatattttattatgtgaatgnnnnnnnnnnnnnnnnnnnnnnnnnnnnnnngcttgtattgggaattagctttactggtaacttccttatttagtttttagtggtcaactctaataaaatgaaactagggctgagctagttagccctcactagccaaactgaaactctatgcaacattaaaagaagagatccatcatgtagcttgtgacacttttattttattagtcaccggggaacttttcagtgatgaaaatacacagggtaataaaccttcacatggcttcaaaaggaaaacaagcaaatcttctctaatctactcttactataatttcctaagtgtacaccaaactctggatttaaaaatctgaagtactatagaacattaagttgaagaatggaaattaagagtacgtattcatggtttatatttcttattctatggagttcgtgaacacatctaggtggaatgcatctgagactaagggctggtttttaatcctcataagaaaccagccttgaagaattaacaattctcttcattggtattctaaacctcctaagatatttaggcttctgtacataaaagtgtttttgctaaatttacagtatatatagatcctttcatattattttactaagaatgtttgaactttgcatatttgatatagttcctggtaggaatagcacagctcaaacattagtttttctacttacctcctctaacacgtggtttgtctggagagtttctaaaaattcagctataaccccagttcatgtatttactggtgattgttcttgctgaggtagtaacagcccaatcttgggctgttaaatcctaggaaatctcgaatcatagtgattaaaatagttggggtaaagttgtattttaagaaaccctcgtgc

SEQ ID NO: 19601 - DNA, 1128 bp, Homo Sapiens
  misc_feature (172)..(201): n is a, c, g, or t
  misc_feature (537)..(547): n is a, c, g, or t
gcacgaggcttctccccaccttattccattcttaactctgcattctggcttctgtatgtagtattttaaaatgagttaaaatagatttaggaatattgaattaattttttaagtgtgtagatgcttttttctttgttgtttaaatataaacagaagtgtaccttttataatnnnnnnnnnnnnnnnnnnnnnnnnnnnnnncacacaaacctgttagtttcaaaaatgacattgcttgcttaaaggttctgaagtaaaggcttgttaagtttctcttagttttgatttgaggcatcccgtaaagttgtagttgcagaatcccaaactaggctacatttcaaaattcagggctgtttaagatttaaaatcacaaacattaacggcagtaggcaccaccatgtaaaagtgagctcagacgtctctaaaaaatgtttcctttataaaagcacatggcggttgaatcttaaggttaaattttaatatgaaagatcctcatgaattaaatagttgatgcaatttttaacgttaattgatatnnnnnnnnnnncaacaaaattaggcttgtaaaactgactttttcattacgtgggttttgaaatctagccccagacatactgtgttgagagatacttagagggagggagtaggttttgaagaggttgatggtggtggggagggaaggcctcctgaattgagtttgatgcagagctttttagccatgaagaatctttcagtcatagtactaataattaaattttcagtatttaaaaagacaaagtattttgtccatttgagattctgcactccatgaaaagttcacttggacgctggggccaaaagctgttgattttcttaagttgacggttgtcaatatatcgaactgttcccaagttagtcaagtatgtctcaacactagcatgatataaaaagggacactgcagctgaatgaaaaaggaatcaaaatccactttgtacataagttaaagtcctaattggatttgtaccgtcctcccattttgttctcggaagattaaatgctacatgtgtaagtctgcctaaataggtagcttaaacttatgtcaaaatgtctgcagcagtttgtcaataaagtttagtccttttttaatc

SEQ ID NO: 19602 - DNA, 1103 bp, Homo Sapiens
gcacgaggtttaagactctgtttggcagggatcttctggatgacctgaaatcagaactaactggaaaatttgaaaaattaattgtggctctgatgaaaccctctcggctttatgatgcttatgaactgaaacatgccttgaagggagctggaacaaatgaaaaagtactgacagaaattattgcttcaaggacacctgaagaactgagagccatcaaacaagtttatgaagaagaatatggctcaagcctggaagatgacgtggtgggggacacttcagggtactaccagcggatgttggtggttctccttcaggctaacagagaccctgatgctggaattgatgaagctcaagttgaacaagatgctcaggctttatttcaggctggagaacttaaatgggggacagatgaagaaaagtttatcaccatctttggaacacgaagtgtgtctcatttgagaaaggtgtttgacaagtacatgactatatcaggatttcaaattgaggaaaccattgaccgcgagacttctggcaatttagagcaactactccttgctgttgtgaaatctattcgaagtatacctgcctaccttgcagagaccctctattatgctatgaagggagctgggacagatgatcataccctcatcagagtcatggtttccaggagtgagattgatctgtttaacatcaggaaggagtttaggaagaattttgccacctctctttattccatgattaagggagatacatctggggactataagaaagctcttctgctgctctgtggagaagatgactaacgtgtcacggggaagagctccctgctgtgtgcctgcaccaccccactgccttccttcagcacctttagctgcatttgtatgccagtgcttaacacattgcctttatttcatactagcatgctcatgacccacacatacacgtcatagaagaaaatagtggtgcttctttctgatctctagtggagatctctttgactgctgtagtactaaagtgtactttatgttactaagtttaatgctgggcaatttcccatttatatatattttttaagaggctagagtgctttagcctttttaaaa

SEQ ID NO: 19603 - DNA, 1596 bp, Homo Sapiens
gcacgaggcttttatatttccatacaatcagaaacagtaaaaaaaatttggagagcacataaaaacatcttaaagttaaaaatataaagccttgtatttaaaaatgcagtcatttaaataatattataagaatctatttgtacataataaacaagtttcaaccagcaagaaattactaatattgactgtggagttttggctgttttaatagttctaactcattattccgtaattcaacacagcactaccaacacagctggcaatgacaagactgggagtatcaaactaggattgttagttcaattaaaatttcagataaacaataatgtacttatactaaaaaattatttgttgtatatctgaaatgaaaatttaactgggtacccaattgtttgtttgtttaatctaaaaaccctgattgaaatttatctaataaaacatcatttaatatctaaaataaaataaatttactataacatctttataactattcaatcaatgattcatcttctatttttccaaattcttgcacaaatatttgatgcttaaataaatacataaataataaataggttaataagttacacttgaaaataatttatgttatgatgaaaaaacttaaagtgcttccacatgtcctcacaacatcactgtgaggtaagatggtggctaatactttttccacttagaaataaaggagaaaccaaggcacagtggaacaaggacttgtggatcctggctagcagactagggttgccagatttaacagaaaaaaatccaggatttccagctaaatttgactttatggcaaaatttattgtcccatcatttttatgtgatgcttcaaatatcacattctagcaaacccattcaattcctgaaattaaagttcggatattctcttggcccttggcctcaattttgctatttgtatattctcccgtgcaatatctaggaaaatccttatatttaaaaattatttgttgttttttgtagattcaaataaataatactttacatataagtatgttctggatatttcatggtacaatgaaaaactattcattgtttactgaaattcaaatttaaccaggaatcttgtattgcatctggcaaccctacaacagacccacacaatacatgaagtgttgaagtagatttgcttgaagtttcactggcatcttcactgattcttggataccacagagaatgaatttttttatgaattctcagccctcttcaaaaacttctccacaaccctctgcacccagttttccttggggtccagacagagctctcttccatcagaaagctttacaataatttctgtgttggcgcagtgtggtccactctcaatcactctcagttctttgataaatttggggtggaaaggtttggagtatgtctttatgcactgacatctaagttctttagcactccttggcaaaactgcaccttcacacagagctgcagaaatcaggaaggctgccaagagagccacggccagcttggaagtcatgtttacacacagtgagatggttccttccggtggtttcttcctggctcttgtcctagaagcttgtgtgctcctcgtgc

SEQ ID NO: 19604 - DNA, 1516 bp, Homo Sapiens
  misc_feature (1237)..(1246): n is a, c, g, or t
gcacgagggcgtcgcagcccccgccgtagccgcctccgagcccgccgccacatcctctgagcagaagatggctgtgccacccacgtatgccgatcttggcaaatctgccagggatgtcttcaccaagggctatggatttggcttaataaagcttgatttgaaaacaaaatctgagaatggattggaatttacaagctcaggctcagccaacactgagaccaccaaagtgacgggcagtctggaaaccaagtacagatgaattttgagactgcaaaatcccgagtgacccagagcaactttgcagttggctacaagactgatgaattccagcttcacactaatgtgaatgacgggacagagtttggcggctccatttaccagaaagtgaacaagaagttggagaccgctgtcaatcttgcctggacagcaggaaacagtaacacgcgcttcggaatagcagccaagtatcagattgaccctgacgcctgcttctcggctaaagtgaacaactccagcctgataggtttaggatacactcagactctaaagccaggtattaaactgacactgtcagctcttctggatggcaagaacgtcaatgctggtggccacaagcttggtctaggactggaatttcaagcataaatgaatactgtacaattgtttaattttaaactattttgcagcatagctaccttcagaatttagtgtatcttttaatgttgtatgtctgggatgcaagtattgctaaatatgttagccctccaggttaaagttgattcagctttaagatgttacccttccagaggtacagaagaaacctatttccaaaaaaggtcctttcagtggtagactcggggagaacttggtggcccctttgagatgccaggtttcttttttatctagaaatggctgcaagtggaagcggataatatgtaggcactttgtaaattcatattgagtaaatgaatgaaattgtgatttcctgagaatcgaaccttggttccctaaccctaattgatgagaggctcgctgcttgatggtgtgtacaaactcacctgaatgggacttttttagacagatcttcatgacctgttcccaccccagttcatcgtcatctcttttacaccaaaaggtctgcagggtgtggtaactgtttcttttgtgccattttggggtggagaaggtggatgtgatgaagccaataattcaggacttattccttcttgtgttgtgnnnnnnnnnngcccttgcaccagagtatgaaatagcttccaggagctccagctataagcttggaagtgtctgtgtgattgtaatcacatggtgacaacactcagaatctaaattggacttctgttgtattctcaccactcaatttgttttttagcagtttaatgggtacatttttagagtcttccattttgttggaattagatcctcccccttcaaatgctgtaattaacaacacttaaaaaacttgaataaaatattgaaacctcaaaaaaaggggggg

SEQ ID NO: 19605 - DNA, 1334 bp, Homo Sapiens
gcacgaggccatccttccacctacttgtggcgatctgagtactctactcttgctcaagaagtaatacgacaatcagaatacaaaccagtaaggcaacacgaataaactaagaaaaaggtaagaactgtctcaaaaacgaaagcacaccacccaagacacagtacccagtcatggtttccccatccaactattagtttcatactttgaaaacttactttcagattattctcaaagaacacagtagcacctaaatctgttttcaattgggcttaaaaattgacatgcaatctcttaagttttttgttcagctacttcacactgagtacctcaaatctgctctggagtcgattatgccacctgtgtgtcaggatgcacctgaaagccctcggctcggtccttagaccatcttcctacattacctggaagggagctgccatctgtccctctgcagagggataccttccaatagtaaattatctggttcctcactgaaacaagttatttttgcttcatatagtcagagtcagactgacatgataaaatatcatgttcctaatctgttgtctcagataagtgaccaagacgggactttccacattttagtctacattctaatcttaaaggaataaagcactgaattgggactaacattctgataggttgcacccttaagagtattcagagagcatcaaaaggagcccacaccttcagcagtgaaggattctaacacagggaatctgcagtttgtagcagaatggtattttcctcaagtagctcataatactgccaaatctcaaaagttaagctgaatttcacaccagatcctacccctttccctgagccacatgtttcacacaagtgtagaaaatgccagggatccaccacaagatggagatggtcagcacaaaccgattctgttcctctttaaagtgtatattagccacttagcaatctctatattctttcaagtaaccaagctgttgactttcttactacttgcagtagcctgtccccaacttttccatccagtgcttaacctaaaaaactccttaactctgccttgacctgaggaagaccatgctaactggtgttattttgtatgtaccctgtgcttaattctataacagtaaaccccatacgcaggtgggaggaggaacaccggtgcctcggtcactctgggggcagtttagatgctgtgaaattaaacctgttctaagtgtacttgtttgaattaattgtattgtaatattatttgttgaatgtagtaattaggtatttatgaatatattgctgtaatttctgacaacatccaaaaaataaaatcttcctaaatt

SEQ ID NO: 19606 - DNA, 2106 bp, Homo Sapiens
  misc_feature (200)..(212): n is a, c, g, or t
  misc_feature (342)..(353): n is a, c, g, or t
gcacgaggcatggtaaaagtactgcctttgcacaggagcctgtttctaaagaaacccatgctgtgaaatagagacttttctactgatcatcataactctgtatctgagcagtgataccaaccacatctgaagtcaacagaagatccaagtttaaaattgcctgcggaatgtgtgcagtatctagaaaaatgaaccgtagnnnnnnnnnnnnnaaatacagaagtcatgttgtttctgcactttataataaagcatggaagaaattatcttagtaggcaattgtaacactttttgaaagtaacccatttcagatttgaaatactgcaataatggttgtctttnnnnnnnnnnnngaaatgtactgttaaggtattactttttttcatgctgatgattcatatctaaattacattattatgttagctgacagtggtactgattttttaggttggttgttttgtggatttctttagtagtgatagtagcctgaaccacattttagataactcaattatgtatgtatgtgcatacacatatacaaacacactaatggtagaatgcttttttatgtgctagactattatatttagtagtatgtcattgtaactagccaatatcacagcttttgaaaaattaaaaaatcacactatattaatattttatatttgccaacagaaacatggcagataggtatcaatatgttttcaatgcctgatgacctataagaagaaagtattgaaaagaagagagattagaactgttagaaggagttgaaattttctaaaagacatagtatttagtttataattaaatgcattcttgaagtccagtgtgaattttattaatgctatcatctcgaccaagctcaaagcctacttattagaaacaatgaagttcacaataggtcataaggtctcttccttttctaaaattgaaagacaagaaatttagtgccaatattgtacagacagaaattccatgtatgagtctcaacaaagactacctttggctaaatgtctagaagcagagaagtaaagtgagcaaaatccagtgttgaggagtcatgacagtactttgatctttatatactctgaagcatttcttcaaacttttctacttttatttgtcattgatacctgtagtaagttgacaatgtggtgaaatttcaaaattatatgtaacttctactagttttactttctcccccaagtcttttttaactcatgattttacacacacaatccagaacttattatatagcctctaagtctttattcttcacagtagataatgaaagagtcctccagtgtcttggcaaaatgttctagtatagctggatacatacagtggagtttctataaactcatacctcagtggacttaaccaaaattgtgttagtctcaattcctaccacactgagggagcctcccaaataactattttcttatctgcagtattcctccagaagagctaaccagggcagggctggcatgagaagtgacatctgcgttacaaagtctatcttcctcataagtctgtaaagagcaattgaatcttctagctttagcaaacctaagccaaaggaaggaaagccacgaagaatgcagaagtcaaaccctcatgacaaagtaggcacaagtctacaataagctaaatcagaatttacaaatacaagtgtcccaggtagcattgactcccgtcattggagtgaaatggatcaaagtttgaattaaggcctatggtaaggtaacattgctttgttgtacttttgaacaagagctcctcctgatcactattacatatttttctagaaaatctaaagttcagaagagaatgtatcactgctgacttttattccaatatttggatggagtaagttttagggtagaattttgttcagtttggatttaatcttttgaaaagtaaattccttgtttactggtttgactataattctctgttatctttacgaggtaaaactgcaagctgactagcatgttctgtgaatctgccattcctaaaaattttataaacacttgatacttttcactgataatggatcgctccaataaacatatattgtgaaaatgcatccacacctcgtgc

SEQ ID NO: 19607 - DNA, 1353 bp, Homo Sapiens
cccgggctgcaggaattcggcacgaggctgcgtccagctgctccggaccgagctcgggtgtatggggccgtaggaaccggctccggggccccgataacgggccgccccccacagcaccccgggctggcgtgagggtctcccttgatctgagaatggctacctctcgatatgagccagtggctgaaattggtgtcggtgcctatgggacagtgtacaaggcccgtgatccccacagtggccactttgtggccctcaagagtgtgagagtccccaatggaggaggaggtggaggaggccttcccatcagcacagttcgtgaggtggctttactgaggcgactggaggcttttgagcatcccaatgttgtccggctgatggacgtctgtgccacatcccgaactgaccgggagatcaaggtaaccctggtgtttgagcatgtagaccaggacctaaggacatatctggacaaggcacccccaccaggcttgccagccgaaacgatcaaggatctgatgcgccagtttctaagaggcctagatttccttcatgccaattgcatcgttcaccgagatctgaagccagagaacattctggtgacaagtggtggaacagtcaagctggctgactttggcctggccagaatctacagctaccagatggcacttacacccgtggttgttacactctggtaccgagctcccgaagttcttctgcagtccacatatgcaacacctgtggacatgtggagtgttggctgtatctttgcagagatgtttcgtcgaaagcctctcttctgtggaaactctgaagccgaccagttgggcaaaatctttgacctgattgggctgcctccagaggatgactggcctcgagatgtatccctgccccgtggagcctttccccccagagggccccgcccagtgcagtcggtggtacctgagatggaggagtcgggagcacagctgctgctggaaatgctgacttttaacccacacaagcgaatctctgcctttcgagctctgcagcactcttatctacataaggatgaaggtaatccggagtgagcaatggagtggctgccatggaaggaagaaaagctgccatttcccttctggacactgagagggcaatctttgcctttatctctgaggctatggagggtcctcctccatctttctacagagattactttgctgccttaatgacattcccctcccacctctccttttgaggcttctccttctccttcccatttctctacactaaggggtatgttccctcttgtccctttccctacctttatatttggggtccttttttatacaggaaaaacaaaacaaagaaataatggtc

SEQ ID NO: 19608 - DNA, 1196 bp, Homo Sapiens
gcacgaggcgaatggacaagtccgaggtgatagttacagtgaaggttgtctgggtcaaacaggtgctcgcatttggcttttcgttggtttcatgttggcctttggatctctgattgcatctatgtggattctttttggaggttatgttgctaaagaaaaagacatagtataccctggaattgctgtatttttccagaatgccttcatcttttttggagggctggtttttaagtttggccgcactgaagacttatggcagtgaacacatctgatttcccacagcacaacagccctgcatgggtttgtttgtttttttactgctcactcccaaccttttgtaatgccattttctaaacttatttctgagtgtagtctcagcttaaagttgtgtaatactaaaatcacgagaacacctaaacaacaaccaaaaatctattgtggtatgcacttgattaacttataaaatgttagaggaaactttcacatgaataatttttgtcaaattttatcatggtataatttgtaaaaataaaaagaaattacaaaagaaattatggatttgtcaatgtaagtatttgtcatatctgaggtccaaaaccacaatgaaagtgctctgaagatttaatgtgtttattcaaatgtggtctcttctgtgtcaaatgttaaatgaaatataaacattttttagtttttaaaatattccgtggtcaaaattcttcctcactataattggtatttacttttaccaaaaattctgtgaacatgtaatgtaactggcttttgagggtctcccaaggggtgagtggacgtgttggaagagagaagcaccatggtccagccaccaggctccctgtgtcccttccatgggaaggtcttccgctgtgcctctcattccaagggcaggaagatgtgactcagccatgacacgtggttctggtgggatgcacagtcactccacatccaccactgaaggaaaggaaaaaagggcagagacttgacactccagtcttagacaggggacaatttctttgtagttgttctgataataaactgggttccatgttgcatttcatctgtgtactgaaccactacctaataaaccagcacggtcaactaaatgacaaacattatctactgggaactcttgttgtctcttcctcttcaaactcttgtcccccagggctccccacttctgc

SEQ ID NO: 19609 - DNA, 723 bp, Homo Sapiens
  misc_feature (171)..(238): n is a, c, g, or t
gcacgagggagactccggcggaagcattcccgggcgggtgacccagcacggtccctcttggaattggattcgccattttatttttcttgctgctaaatcaccgagcccggaagattagagagttttatttctgggattcctgtagacacacccacccacatacatacattnnnnnnnnnnnnnnnnnnnnnnnnnnnnnnnnnnnnnnnnnnnnnnnnnnnnnnnnnnnnnnnnnnnntctttttttaaattaacagtgctaatgttattggtgtcttcactggatgtatttgactgctgtggacttgagttgggaggggaatgttcccactcagatcctgacagggaagaggaggagatgagagactctggcatgatcttttttttgtcccacttggtggggccagggtcctctcccctgcccaggaatgtgcaaggccagggcatgggggcaaatatgacccagttttgggaacaccgacaaacccagccctggcgctgagcctctctaccccaggtcagacggacagaaagacagatcacaggtacagggatgaggacaccggctctgaccaggagtttggggagcttcaggacattgctgtgctttggggattccctccacatgctgcacgcgcatctcgcccccaggggcactgcctggaagattcaggagcctgggcggccttcgcttactctcacctgcttctgagttgcccagga

SEQ ID NO: 19610 - DNA, 998 bp, Homo Sapiens
  misc_feature (678)..(691): n is a, c, g, or t
ccacgcgtccggatctcagtttcaaatctccccaagctgcctaaattgaaaaagcttgaactcagtgaaaatagaatctttggaggtctggacatgttagctgaaaaacttccaaatctcacacatctaaacttaagtggaaataaactgaaagatatcagcaccttggaacctttgaaaaagttagaatgtctgaaaagcctggacctctttaactgtgaggttaccaacctgaatgactaccgagagagtgtcttcaagctcctgccccagcttacctacttggatggctatgaccgagaggaccaggaagcacctgactcagatgccgaggtggatggtgtggatgaagaggaggaggacgaagaaggagaagatgaggaagacgaggacgatgaggatggtgaagaagaggagtttgatgaagaagatgatgaagatgaagatgtagaaggggatgaggacgacgatgaagtcagtgaggaggaagaagaatttggacttgatgaagaagatgaagatgaggatgaggatgaagaggaggaagaaggtgggaaaggtgaaaagaggaagagagaaacagatgatgaaggagaagatgattaagaccccagatgacctgcagaaacagaactgttcagtattggttggactgctcatggattttgtagctgtttnnnnnnnnnnnnnnggtagctgtgatacaaaccccaggacacctacccacccaaagagccaaagaatagttcctgtgacattccgccttccttccatgtagtccctcttggtaatctaccaccaagcttgtggacttcactccaacaaaattgtaagcgttgttaggtttttgtgtaagattcttgctgtagcgtggatagctgtgattggtgagtcaaccgtctgtggctaccagttacactgagattgtaacagcatttttactttctgtactacaaaaagctttgtaaataaaatcttaacattttgggtctgttaaa

SEQ ID NO: 19611 - DNA, 970 bp, Homo Sapiens
gcacgaggctggactcagtctgtcaagtccccgaagcttcctgcagctccaccttgtaaaaatgctgcctttgggaatcttcgaaatatgtacacagagaaaatcacatgaaggagacctggggtccccacttgtgagtgcaactgcaagtaactctggctagagagacacatgtgtcttgtgtcaaggcaggaggataacccggatgaccttctgaggtctcttcagcccttttcgctagtggtcacccaccaccatggttacttgccagcaacatctctattgctggatggtccctgtctataaccttgggctagtatattttttccaatatgggaccttagtcttactactgatgagttctatgggtctcttgctagggggtaaggatttttattcttgggcttatagagccagttagatcataattcttatgaaatagagagtgtcctaaatatcactgaaataaaaagtaggaaaaagaagcttgaattttaagactgaggctgctctgcagattctagtttggctttcagagttcaagagtggtggcatcttcacctgaattcttcaatgccagggtaataaaccaaaatagtcctaatcagtatatgctagttgagcatcggcataattttctttcctctggctgatcccagccctaaaggaagggtagacccgtgtctttccagccctaaaggaagggtagacccgtgtctttccagccctaaaggaagggcagacccgtgtctttccatgcccgagggccacgacgtcactatgcagggcacacgtggcttggtttaaaaaggtcatcttagatttatcttagtaaatgtaataaattattttttagatcttgaaatttataataaaaatactttacctaccctgatcaccaaaacctgatgttttaaatgtgctttctttttgaaatttatgttttcaaataaaatctccctaaagcaat

SEQ ID NO: 19612 - DNA, 1191 bp, Homo Sapiens
  misc_feature (1131)..(1148): n is a, c, g, or t
gcacgagggaagcaactagggccctcatcacttcgccgccgaatccccggcgccgcccagcggggcagagccaggccagggccgcccgcccaacctggtccgctgcctcttcggccatggaagctgccggcagccctgcggctacggagacaggcaagtatatcgcgtcaacacagcgacctgacgggacctggcgcaagcagcggagggtgaaagaaggatatgtgccccaggaggaggtcccagtatatgaaaacaagtatgtgaagtttttcaagagtaaaccagagttgcccccagggctaagccctgaggccactgctcctgtcaccccatccaggcctgaaggtggtgaaccaggcctctccaagacagccaaacgtaacctgaagcgaaaggagaagaggcggcagcagcaagagaaaggagaggcagaggccttgagcaggactcttgataaggtgtccctggaagagacagcccaactccccagtgctccacagggctctcgggcagcccccacagctgcatctgaccagcctgactcagctgccaccactgagaaagccaagaagataaagaacctaaagaagaaactccggcaggtggaagagctgcagcagcggatccaggctggggaagtcagccagcccagcaaagagcagctagaaaagctagcaaggaggagggcgctagaagaggagttagaggacttggagttaggcctctgaggcctttggggaatagggaatggactgcagaacaaaccgtggggctctctggggtctgggggaatacgggcaacagcagtcaggaggggtaccccccatactggcttccacctcctgcggcccagctctgtcctccagagcctagcgtctccctcaatccttcccttttcttcccaacttctactttttggactttccccctcccattcccagtgttcaaaatctcagtgactaccccaggtacctttgctgctgatttgggtgtcttgtttaaaagaaaatcaggtgggtgggaatctcttggagaactgaggctgagggtagagggagtatgcccaagtcttggagtcttggttcctgttcgcggtgtttatgggttatttccctctccatccctcannnnnnnnnnnnnnnnnnaaaaaaagcaaaaatgagaataaacacaagtagaccctcgtgc

SEQ ID NO: 19613 - DNA, 1299 bp, Homo Sapiens
gcacgagggccggaggaggcgcacgcagctgactttgtcttctccgcacgactgttacagaggtctccagagccttctctctcctgtgcaaaatggcaactcttaaggaaaaactcattgcaccagttgcggaagaagaggcaacagttccaaacaataagatcactgtagtgggtgttggacaagttggtatggcgtgtgctatcagcattctgggaaagtctctggctgatgaacttgctcttgtggatgttttggaagataagcttaaaggagaaatgatggatctgcagcatgggagcttatttcttcagacacctaaaattgtggcagataaagattattctgtgaccgccaattctaagattgtagtggtaactgcaggagtccgtcagcaagaaggggagagtcggctcaatctggtgcagagaaatgttaatgtcttcaaattcattattcctcagatcgtcaagtacagtcctgattgcatcataattgtggtttccaacccagtggacattcttacgtatgttacctggaaactaagtggattacccaaacaccgcgtgattggaagtggatgtaatctggattctgctagatttcgctaccttatggctgaaaaacttggcattcatcccagcagctgccatggatggattttgggggaacatggcgactcaagtgtggctgtgtggagtggtgtgaatgtggcaggtgtttctctccaggaattgaatccagaaatgggaactgacaatgatagtgaaaattggaaggaagtgcataagatggtggttgaaagtgcctatgaagtcatcaagctaaaaggatataccaactgggctattggattaagtgtggctgatcttattgaatccatgttgaaaaatctatccaggattcatcccgtgtcaacaatggtaaaggggatgtatggcattgagaatgaagtcttcctgagccttccatgtatcctcaatgcccggggattaaccagcgttatcaaccagaagctaaaggatgatgaggttgctcagctcaagaaaagtgcagataccctgtgggacatccagaaggacctaaaagacctgtgactagtgagctctaggctgtagaaatttaaaaactacaatgtgattaactcgagcctttagttttcatccatgtacatggatcacagtttgctttgatcttcttcaatatgtgaatttgggctcacagaatcaaagcctatgcttggtttaatgcttgcaatctgagctcttgaacaaataaaattaactattgtagtgtgaa

SEQ ID NO: 19614 - DNA, 646 bp, Homo Sapiens
gcacgaggcctcagtactgtagcatgaaacaaaggcttaggggccaacaaggcttccagctggatgtgtgtgtagcatgtaccttattatttttgttactgacagttaacagtggtgtgacatccagagagcagctgggctgctcccgccccagcccggcccagggtgaaggaagaggcacgtgctcctcagagcagccggagggaggggggaggtcggaggtcgtggaggtggtttgtgtatcttactggtctgaagggaccaagtgtgtttgttgtttgttttgtatcttgtttttctgatcggagcatcactactgacctgttgtaggcagctatcttacagacgcatgaatgtaagagtaggaaggggtgggtgtcagggatcacttgggatctttgacacttgaaaaattacacctggcagctgcgtttaagccttcccccatcgtgtactgcagagttgagctggcaggggaggggctgagagggtgggggctggaacccctccccgggaggagtgccatctgggtcttccatctagaactgtttacatgaagataagatactcactgttcatgaatacacttgatgttcaagtattaagacctatgcaatattttttacttttctaataaacatgtttg

SEQ ID NO: 19615 - DNA, 882 bp, Homo Sapiens
gcacgaggaaatgccttagtttcttaaaacgtattttctgatgtggctttacatttcaaaagtgaacttgattcaacctgagaaaactgattaaaaaattagtttaaatttgccagcagggaagtaaaataattatgggaagagtgtcttaagcctaatattaaatcagttttgttaaggggaaaactcaatagttctgttacttaggctgttagatccaagttgatttttgtgtctacagctaaattttgtttacaattaggctattttttaatataggatttagaaaccaagggtatgtgttttaaaattacactttttcttaacctgtctagctgtcggaaaaggtaacagaagatggaactcgaaatcccaatgaaaaacctacccagcaaagaagcatagcttttagctctaataattctgtagcaaagccaatacaaaaatcagctaaagctgccacagaagaggcatcttcaagatcaccaaaaatagatcagaaaaaaagtccatatggactgtggatacctatctaaaagaagaaaactgatggctaagtttgcatgaaaactgcactttattgcaagttagtgtttctagcattatcccatccctttgagccattcaggggtacttgtgcatttaaaaaccaacacaaaaagatgtaaatacttaacactcaaatattaacattttaggtttctcttgcagatatgagagatagcacagatggaccaaagttatgcacaggtgggagtcttttgtatatagttgtaaatattggccttggttatgtaaaatgaaattttttaaacacagtaattgaactgtattcctgttttgtatatttaataaatttctggttttcattcttaaaaaaag

SEQ ID NO: 19616 - DNA, 2242 bp, Homo Sapiens
  misc_feature (458)..(470): n is a, c, g, or t
  misc_feature (943)..(967): n is a, c, g, or t
  misc_feature (1175)..(1187): n is a, c, g, or t
  misc_feature (1956)..(1970): n is a, c, g, or t
ccccgggctgcaggaattcggcacgaggtccgatatttaaagctatctttcaaactattcaaaatcgtaatcctgtgtggtatcaggcactgactcacggtcttaatgaagaacaaagaaaacagttacaggacatagcaactctggctgatcaaagaagagcagcccatgaatccaaaatgattgagaagcatggaggatacaaattcagtgctccagttgtgccaagttctttcaattttggaggcccagcaccagggatgaattgagttatctctttctttcctgctgtgtgcttgtagtgaagagcttgtgttcctcctagtattggttccagaactggttcatgttatctattctaaactaataatcaatagatggacaaaagaaacaacaaccccaggagatgggacctgatcatgcaacctggcactggaaaagaaatcagcgggattttnnnnnnnnnnnnnatgggaggtaccttagagggagtattttctttattttttgaagaaagtaagatcctgactctgaagcttcaaagtgacactgtggaaatctgaaacgaggggatgtcatgaaggcagcttttctttttctgaggaaaaaataggcatgggctacaggactatttaaaatgtctcatttacagtataaaactcaaaggtagatgtaatttttacacctatgagtatttgtccaatttctgtctcttcctcaccattgggtatctattctttatatgtaaataagataaggtcatctgatagccttattcagtcttcatcattttcatcattgttcctatgtagattattggacatttattgtagcactacataactgattataaaaatctgtaaatgaattagcactttcatattgaaacaagcctgctagcctatgtataaaatagcaaaatgtttgctgtttataaaaagannnnnnnnnnnnnnnnnnnnnnnnnatttcaagttattaatttaaaaatgaactagcaattttgtacctggtgactttgtggtgcactcacctctgatagtgacttgaattcggtatgtaaaaaggggttagtggtatttcattgctgctaaaaatgacaactccctctgtgtcctgtttttcttaaagctgtcagtgtacaagtgggtatttgaataccagaccttactgtnnnnnnnnnnnnnggtggtatctagagcatgtaaattggatataaagttctgctcttaaagagttgatctaagagtatggctaaacatctatatatgcaatctattaaaagaacttaattcggctattatgtcttgatttgattgcagttttttcctaattataacaaatttttcctcattggcctgtttttaatcctgtgcctagaaggagtacaaaatgcacactttacaaaattgatatttaacacttacccactcccctttccccatctcttctaccgctcttgttgatcgtggtatctgatcttgactagataggctgaaggcacatggttccctccaaaaaccactattgataccactacaaaaacaagccagcaaaaagatactgtagagaggttggcttgcttccctctcttcctaactgcatgttgaaaaataagccgttattgatcttaaacatcggtcagatgagtcatacattgggttattttttatatacatgtatacacaaaatatttcaaattgaaagcaacatcttaatggattcaaaactattacaagctgttgtctaaaacaggtgagaaaaaaatttataactgtaaaaacaaatgcacatattgatatttaaaatgcgtaattaagaaaacccattgttgttgtgtttttcttgtataccaataattaagccactactgttggcactgtttggttttctgtttaacactgaaggagtgaaagtatttcctatatttatgaatttactactaaaatcttggcnnnnnnnnnnnnnnnttgtctaacatgtgtgggtgaaaactgttaatcaagtgtttctactcccccccgaaaatcccctgaaagttggacaccaactgtataccctagttgcttaaagggatttcactattatataaagtcaataaaaatgaagtagttgtatatatgcaacattgtgtacagaggggaataatgaatagtattaaagaaacattctcgtcttcctttacctttaatcccctaatacctagtctacttttaaatttcagacttcactgctttttgaa

SEQ ID NO: 19617 - DNA, 614 bp, Homo Sapiens
cccccgggctgcaggaattcggcacgaggctgcagtttcttgctttcttcagcacatcttatagtatgagaaggaaggtttgggcatgttgggaagggcggtggagggggagttgcagaaagagagggcagtgagggtgaggagaggggatctggggacttgggtgtgacacctgcttgacagaggcagggctgtggccaggaccaaccttcaattccattccaatcagcctttgcatttgttggatctcgtggcttctttttaatcttttgttggggattagtttcatgctgcacataatggggttgcactggtctgacccaggactttggagccacccacactgggaagactaggctaggcagtcggtcttctgggagtttctcagccccttaggacgcgggtctccttgggctcccccaagggttctgcgaagaggcagtggaagaaggcatgaggagagggtctcttgagaatttgccaataggaaggagtggccacggctgaaaggaacaagacagatcctgacatagctttggcctgggtgttaggtcagaaggagtactggtgcgtgggggccttaccccagggttgagtattttatatgtaaaatg

SEQ ID NO: 19618 - DNA, 1323 bp, Homo Sapiens
gcacgagggatcggaagccggttggggtgtgagagggttttctcgctctagggagattcttcaagcaatcactatgtcaacagacacaggtgtttcccttccttcatatgaggaagatcagggatcaaaactcattcgaaaagctaaagaggcaccattcgtacccgttggaatagcgggttttgcagcaattgttgcatatggattatataaactgaagagcaggggaaatactaaaatgtccattcatctgatccacatgcgtgtggcagcccaaggctttgttgtaggagcaatgactgttggtatgggctattccatgtatcgggaattctgggcaaaacctaagccttagaagaagagatgctgtcttggtcttgttggaggagcttgctttagttagatgtcttattattaaagttacctattattgttggaaataaactaatttgtatgggtttagatggtaacatggcattttgaatattggcttcctttcttgcaggcttgatttgcttggtgaccgaattactagtgactagtttactaactaggtcattcaaggaagtcaagttaacttaaacatgtcacctaaatgcacttgatggtgttgaaatgtccaccttcttaaatttttaagatgaacttagttctaaagaagataacaggccaatcctgaaggtactccctgtttgctgcagaatgtcagatattttggatgttgcataagagtcctatttgccccagttaattcaacttttgtctgcctgttttgtggactggctggctctgttagaactctgtccaaaaagtgcatggaatataacttgtaaagcttcccacaattgacaatatatatgcatgtgtttaaaccaaatccagaaagcttaaacaatagagctgcataatagtatttattaaagaatcacaactgtaaacatgagaataacttaaggattctagtttagttttttgtaattgcaaattatatttttgctgctgatatattagaataatttttaaatgtcatcttgaaatagaaatatgtattttaagcactcacgcaaaggtaaatgaacacgttttaaatgtgtgtgttgctaattttttccataagaattgtaaacattgaactgaacaaattacctataatggatttggttaatgacttatgagcaagctggtttggccagacagtatacccaaacttttatataatatacagaaggctatcacacttgtgaaattctcttgtctaatctgaatttgcattccatggtgttaacatggtatatgtattgttattaaagtaagtcctcgtgc

SEQ ID NO: 19619 - DNA, 1027 bp, Homo Sapiens
gcacgaggatctaagtgcctcacatttttttctacctataacactctaggatgtatattttatataaagtattctttttcttttttaaattaatatctttctgcacacaaatattatttgtgtttcctaaatccaaccattttcattaattcaggcatattttaactccactgcttacctactttcttcaggtaaagggcaaataatgatcgaaaaaataattatttattacataatttagttgtttctagactataaatgttgctatgtgccttatgttgaaaaaatttaaaagtaaaatgtctttccaaattatttcttaattattataaaaatattaagacaatagcacttaaattcctcaacagtgttttcagaagaaataaatataccactctttacctttattgatatctccatgatgatagttgaatgttgcaatgtgaaaaatctgctgttaactgcaaccttgtttattaaattgcaagaagctttatttctagctttttaattaagcaaagcacccatttcaatgtgtataaattgtctttaaaaactgttttagacctataatccttgataatatattgtgttgactttataaatttcgcttcttagaacagtggaaactatgtgtttttctcatatttgaggagtgttaagattgcagatagcaaggtttggtgcaaagtattgtaatgagtgaattgaatggtgcattgtatagatataatgaacaaaattatttgtaagatatttgcagtttttcattttaaaaagtccataccttatatatgcacttaatttgttggggctttacatactttatcaatgtgtctttctaaaaatcaagtaatgaatccaactgcttaaagttggtattaataaaaagacaaccacatagttcgtttaccttcaaactttaggttttttaatgatatactgatcttcattaccataggcaaattatcaccctaccactttactgtcctaacatgtttaaaagaaaaatgacacatctttattc

SEQ ID NO: 19620 - DNA, 1636 bp, Homo Sapiens
  misc_feature (1363)..(1389): n is a, c, g, or t
gcacgaggagaagaagcactctcccatccttacatgagcatatattcttttccaatggatgagccaatttcaagccatccttttcatattgaagatgaagttgatgatattttgcttatggatgaaactcacagtcacatttataactgggaaaggtatcatgattgtcagttttcagagcatgattggcctgtacataacaactttgatattgatgaagttcagcttgatccaagagctctgtccgatgtcactgatgaagaagaagtacaagttgatccccgaaaatatttggatggagatcgggaaaagtatctggaggatcctgcttttgataccaattactctactgagccttgttggcaatactcagatcatcatgaaaacaaatattgtgatctggagtgtagccatacttgtaactacaaaacgaggtcatcatcatatttagataacttagtttggagagagagtgaagttaaccattactatgaacccaagcttattatagatctttccaattggaaagaacaaagcaaagaaaaatctgataagaaaggcaaatcaaaatgtgaaaggaatggattggttaaagctcagatagcgctagaggaagcatcacagcaactggctggaaaagaaagggaaaagaatcaggggatttgattttgattcctttattgcaggaactattcagcttagttcccagcatgagcctactgatgttgttgataaattaaatgacttgaatagctcagtgtcccaactagaattgaaaagtttgatatcaaagtcagtaagccaagaaaaacaggaaaaaggaatggcaaatctggctcaattagaagccttgtaccagtcttcttgggacagccagtttgtgagtggtggggaggactgtttttttcataaatcagttttgtgaggtaaggaaggatgaacaagttgagaaggaaaacacttacactagttacttggacaagttctttagcaggaaagaagatactgaaatgctagaaactgagccagtagaggatgggaagcttggggagagaggacatgaggaaggatttctgaacaacagtggggagttcctctttaacaagcagctcgagtccataggcatcccacagtttcacagtccagttgggtcaccacttaagtcaatacaggccacattaacaccttctgctatgaaatcttcccctcaaattcctcatcaaacatacagcagcattctgaaacatctgaactaaaacactcagcagacatttatctttgtattcttcatgaaatgtgttttgtctttttttattactagtgtttaagtcattttttacttgaatcagatggtgtcatttannnnnnnnnnnnnnnnnnnnnnnnnnntaaaatccagactttctttttctacatgtgagatagttttcattttaactggcatgtcatttgcacacaaaaataaagactagagcaaataatgcaacgcaggaggagaaaagaaatgcactaagacagaacattctctcatagaacattgatctgttttacaggaaacaaaccttgccttgaaattacacagtgagactgtacataattgcatgaaaatagctatttttttccttagacatttttc

SEQ ID NO: 19621 - DNA, 1290 bp, Homo Sapiens
gcacgaggcaagcatcctcagcctttcctacgtactcgtgaatttctttggcaggaagggcacagtgcttttgctaccatggaagaggcagcggaagaggtcttgcagatacttgacttatatgctcaggtatatgaagaactcctggcaattcctgttgttaaaggaagaaagacggaaaaggaaaaatttgcaggaggagactatacaactacaatagaagcatttatatctgctagtggaagagctatccagggaggaacatcacatcatttagggcagaatttttccaaaatgtttgaaatcgtttttgaagatccaaagataccaggagagaagcaatttgcctatcaaaactcctggggcctgacaactcgaactattggtgttatgaccatggttcatggggacaacatgggtttagtattaccaccccgtgtagcatgtgttcaggtggtgattattccttgtggcattaccaatgcactttctgaagaagacaaagaagcgctgattgcaaaatgcaatgattatcgaaggcgattactcagtgttaacatccgcgttagagctgatttacgagataattattctccaggttggaaattcaatcactgggagctcaagggagttcccattagacttgaagttgggccacgtgatatgaagagctgtcagtttgtagccgtcagacgagatactggagaaaagctgacagttgctgaaaatgaggcagagactaaacttcaagctattttggaagacatccaggtcacccttttcacaagggcttctgaagaccttaagactcatatggttgtggctaatacaatggaagactttcagaagatactagattctggaaagattgttcagattccattctgtggggaaattgactgtgaggactggatcaaaaagaccactgccagggatcaagatcttgaacctggtgctccatccatgggagctaaaagcctttgcatccccttcaaaccactctgtgaactgcagcctggagccaaatgtgtctgtggcaagaaccctgccaagtactacaccttatttggtcgcagctactgagggatgaacgaaagccccctcttcaactcctctcactttttaaagcattgatattagtatcttctcagatacagaccgttttatgattttttaaaaagtaaaagttctaaaatgaagtcacacaggacaattattcttatgcctaagttaacagtggataaaagacttttctgtaaacaactccagtaataaatatcatgaactaaa

SEQ ID NO: 19622 - DNA, 1247 bp, Homo Sapiens
gcacgagggtgaatttttgagtacatactatgtgtttcagaaatatgtagaaataaaaatgttgccataaaataacacctaagcatatactattctatgctttaaaatgaggatggaaaagtttcatgtcataagtcaccacctggacaataattgatgcccttaaaatgctgaagacagatgtcatacccactgtgtagcctgtgtatgacttttactgaacacagttatgttttgaggcagcatggtttgattagcatttccgcatccatgcaaacgagtcacatatggtgggactggagccatagtaaaggttgatttacttctaccaactagtatataaagtactaattaaatgctaacataggaagttagaaaatactaataacttttattactcagcgatctattcttctgatgctaaataaattatatatcagaaaactttcaatattggtgactacctaaatgtgatttttgctggttactaaaatattcttaccacttaaaagagcaagctaacacattgtcttaagctgatcagggattttttgtatataagtctgtgttaaatctgtataattcagtcgatttcagttctgataatgttaagaataaccattatgaaaaggaaaatttgtcctgtatagcatcattatttttagcctttcctgttaataaagctttactattctgtcctgggcttatattacacatataactgttatttaaatacttaaccactaattttgaaaattaccagtgtgatacataggaatcattattcagaatgtagtctggtctttaggaagtattaataagaaaatttgcacataacttagttgattcagaaaggacttgtatgctgtttttctcccaaatgaagactctttttgacactaaacactttttaaaaagcttatctttgccttctccaaacaagaagcaatagtctccaagtcaatataaattctacagaaaatagtgttctttttctccagaaaaatgcttgtgagaatcattaaaacatgtgacaatttagagattctttgttttatttcactgattaatatactgtggcaaattacacagattattaaatttttttacaagagtatagtatatttatttgaaatgggaaaagtgcattttactgtattttgtgtattttgtttatttctcagaatatggaaagaaaattaaaatgtgtcaataaatattttctagagagtaaaaaaacctcgtgc

SEQ ID NO: 19623 - DNA, 1291 bp, Homo Sapiens
cgcacgaggcttttttggctagggatggtttgataaaccacaattggctgatattgaaaatgaaagaaacttaaaaggtgggatggataatgattactgtggataattgcagataaatttgattagagtaataattttgttatttaaaaatatagttgtttatattggccatcttaggatgtttccctttcagatttaacgtgggtaaaacattttttggtaaattgtggcgttctatttattttgttagtagccaggagaaatggggatgggggaaatacgacttagtgaggcatagacatccctggtccatcctttctgtctccagctgtttcttggaacctgctctcctgcttgctggtccctgacgcagagaccattgcctcccccacagccgtttgactgaaggctgctctggagacctagagtaaaacggctgatggaagttgtgggacccacttccatttccttcagtcattagaggtggaagggaggggtctccaagtttggagattgagcagatgaggcttgggatgcccctgctttgacttcagccatggatgaggagtgggatggcagcaaggtggctcctgtggcagtggagttgtgccagaaacagtggccagttgtatcgcctataagacagggtaaggtctgaagagctgagcctgtaattctgctgtaataatgatagtgctcaagaagtgccttgagttggtgtacagtgccatggccatcaagaatcccagatttcaggttttattacaaaatgtaagtggtcacttggcgattttgtagtacatgcatgagttaccttttttctctatgtctgagaactgtcagattaaaacaagatggcaaagacatcgttagagtgcacaacaaaatcactatcccattagacacatcatcaaaagcttatttttattcttgcactggaagaatcgtaagtcaactgtttcttgaccatggcagtgttctggctccaaatggtagtgattccaaataatggttctgttaacactttggcagaaaatgccagctcagatattttgagatactaagggattatctttggacatgtactgcagcttcttgtctctgttttggattactggaatacccatgggccctctcaagagtgctggacttctaggacataagatgattgtcagtacattaaacttttcaatcccattatgcaatcttgtttgtaaatgtaaacttctaaaatatggttaataacattcaacctgtttattacaacttaaaaggaacttcagtgaatttg

SEQ ID NO: 19624 - DNA, 1039 bp, Homo Sapiens
gcacgagggctgcttacctgggtgcaggagacagccggagtcgctgggggagctccgcgccgccggacgcccgtgaccatgtggaggctgctggctcgcgctagtgcgccgctcctgcgggtgcccttgtcagattcctgggcactcctccccgccagtgctggcgtaaagacactgctcccagtaccaagttttgaagatgtttccattcctgaaaaacccaagcttagatttattgaaagggcaccacttgtgccaaaagtaagaagagaacctaaaaatttaagtgacatacggggaccttccactgaagctacggagtttacagaaggcaattttgcaatcttggcattgggtggtggctacctgcattggggccactttgaaatgatgcgcctgacaatcaaccgctctatggaccccaagaacatgtttgccatatggcgagtaccagcccctttcaagcccatcactcgcaaaagtgttgggcatcgcatggggggaggcaaaggtgctattgaccactacgtgacacctgtgaaggctggccgccttgttgtagagatgggtgggcgttgtgaatttgaagaagtgcaaggtttccttgaccaggttgcccacaagttgcccttcgcagcaaaggctgtgagccgcgggactctagagaagatgcgaaaagatcaagaggaaagagaacgtaacaaccagaacccctggacatttgagcgaatagccactgccaacatgctgggcatacggaaagtactgagcccatatgacttgacccacaaggggaaatactggggcaagttctacatgcccaaacgtgtgtagtgagtgtaggagataactgtatataggctactgaaagaaggattctgcatttctattcccctcagcctacccactgaagtctttgggtagctcttaagccataactaaggagcagcatttgagtagatttctgaaaaacaatgttatttgttgatttaaaaagaaaactgtatttttattaaataaaatttaaacatcacttcag

SEQ ID NO: 19625 - DNA, 1325 bp, Homo Sapiens
gcacgagggtaggctgggaccataacacaagcatgactatatgaaggaagaggaaggttttcctgaagatgaggcgactgaatcggaaaaaaactttaagtttggtaaaagagttggatgcctttccgaaggttcctgagagctatgtagagacttcagccagtggaggtacagtttctctaatagcatttacaactatggctttattaaccataatggaattctcagtatatcaagatacatggatgaagtatgaatacgaagtagacaaggatttttctagcaaattaagaattaatatagatattactgttgccatgaagtgtcaatatgttggagcggatgtattggatttagcagaaacaatggttgcatctgcagatggtttagtttatgaaccaacagtatttgatctttcaccacagcagaaagagtggcagaggatgctgcagctgattcagagtaggctacaagaagagcattcacttcaagatgtgatatttaaaagtgcttttaaaagtacatcaacagctcttccaccaagagaagatgattcatcacagtctccaaatgcatgcagaattcatggccatctatatgtcaataaagtagcagggaattttcacataacagtgggcaaggcaattccacatcctcgtggtcatgcacatttggcagcacttgtcaaccatgaatcttacaatttttctcatagaatagatcatttgtcttttggagagcttgttccagcaattattaatcctttagatggaaccgaaaaaaattgctatagatcacaaccagatgttccaatattttattacagttgtgccaacaaaactacatacatataaaatatcagcagacacccatcagttttctgtgacagaaagggaacgtatcattaaccatgctgctggcagccatggagtctctgggatatttatgaaatatgatctcagttctcttatggtgacagttactgaggagcacatgccattctggcagttttttgtaagactctgtggtattgttggaggaatcttttcaacaacaggcatgttacatggaattggaaaatttatagttgaaataatttgctgtcgtttcagacttggatcctataaacctgtcaattctgttccttttgaggatggccacacagacaaccacttacctcttttagaaaataatacacattaacacctcccgattgaaggagaaaaactttttgcctgagacataaaacctttttttaataataaaatattgtgctatatattccaagaaaagataacacaaataagcagaaaacttacttactt

SEQ ID NO: 19626 - DNA, 889 bp, Homo Sapiens
gcacgaggctaccaaggctttgaaccattctgtggaagatattgagccagatttattaactccaaggcaagaagcagttcctgttgtctctttaccggcacccagtttttctcatgaagttggaagtgagctggcctcagttcctgttatgcccttaacttctattttgccactacaagtggaagagagcgctctgccatctgcagtgctggcaaatggaggaaagatgcccttcactatgccagaagcttttctagatgatggagatatggtccttggagatgaactagatgacctgcttgattctgcacctgaaactaatgaaactgttatgccgtcagctttagtcagaggaccccttcagacagccagtgtctctcctagcatgcccttttcggcatcgctgttaggaaccttacccattggtgcgaggtatgctcctccaccctccttctcagaattttatccacctttgacttcatccttagaagatttttgttcttctttaaattcattttcaatgagtgaatccaaacgagatctgtccacctcaacttctagagagggaacaccgcttaacaacagtaattcttcccttttacttatgaatggaccaggtagtttgtttgcttcagagaatttcctgggaatttcaagtcagcctagaaatgactttggaaacttttttggaagtgcagttaccaaaccatcttcatcagtgactccaagacatcccctcgaaggaaccatgaattgagacaagcttgccagatctgttttgtaaatcaggccctaagttaatggatttcacttaccatgctacataatcataagttgtaagaaagatattttatcggtaggataaagaatgttgaagataatcatggga

SEQ ID NO: 19627 - DNA, 942 bp, Homo Sapiens
gcacgaggctcagaatgatgatgagctgcccatgaaagaaggagactgcatgacaatcatccacagggaagacgaagatgaaatcgaatggtggtgggcgcgccttaatgataaggagggatatgttccacgtaacttgctgggactgtacccaagaattaaaccaagacaaaggagcttggcctgaaacttccacacagaattttagtcaatgaagaattaatctctgttaagaagaagtaatacgattatttttggcaaaaatttcacaagacttattttaatgacaatgtagcttgaaagcgatgaagaatgtctctagaagagaatgaaggattgaagaattcaccattagaggacatttagcgtgatgaaataaagcatctacgtcagcaggccatactgtgttggggcaaaggtgtcccgtgtagcactcagataagtatacagcgacaatcctgttttctacaagaatcctgtctagtaaataggatcatttattgggcagttgggaaatcagctctctgtcctgttgagtgttttcagcagctgctcctaaaccagtcctcctgccagaaaggaccagtgccgtcacatcgctgtctctgattgtccccggcaccagcaggcccttggggggctcacctgaaggctcgaaggcactgcacacttgtatattgtcagtgaagaactgttagttggttgtcagtgaacaataactttattatatgagtttttgtagcatcttaagaattatacatatgtttgaaatattgaaactaaactacggtaccagtaattaaatgtagaatcttgtttgtaggctgattttaatctgtatttattgtcttttgtatctcagaattagaaacttgctacagacttacccgtaatatttgtcaagatcatagctgactttaaaacagttgtaataaacttttt

SEQ ID NO: 19628 - DNA, 1484 bp, Homo Sapiens
gcacgagggaatggtacgtgacatttagggtagctgatatttttattttgttaaataatttccaagaatagagtatggtgtatattataaatttctttgataagatgtattttgaatgtcttttaatcttcctcctcctctccaaaaaaatcagaaacctctttaagaaaacatgtaggttatatatgctagaattgcatttaatcactgtgaaaagactggtcagcctgcattagtatgacagtaggggggctgttagaattgctgctatactggtggtatggattatcatggcattggaattttcatagtaatgcagatccaatttctttgtggtacctgcagtttacaaaataatttgacttcagtgagcatattggtatctggatgttccaatttagaactaaaccatatttattacaaaaagatattaatccctctactcccaggttccctttatatgttaagatataatggctttgaggggggaaaaaataaacctaggggagaggggagtttcctgtagtgctgtttcattagaggatttcagtaaattaaattccacagctaattcaataaataatggtacatttaagtgttctgattttaataatatatttcacatttatccacacagtaacaatgtaatatgttaatgtaaataaaattggttttgatactcagaaataacaagaatttaattttttaaatttgtttacagtcctgggaaaagtaagaattatttgccaaaataagaggaaagaaaaccttagtattattaatgagtttaccatagaattgttggaaatactgaagacaggtgcaatttactaaacttttgtttttaaactattgtagaggctgcattagaagaaaatgtttataatgacagagcaactatgactatataaaaaagctgaaattaaaactgtgtttagaaatagatcagtaacccagtgccaaggatgccaagctgccaccatggtcttggctctcccacaacccagtgtttctggggtaagtttcacagtttctaggccctggaatagcaggcagtgtaagcctttgataactttagttcgatgtttttcttgtttttgtttgttggtttggtgcatatgatagtgggtgttatgctattttgctcttcccatcaaaataaagaaacttccagaggtttactgttaaaaatactgatatttccataaacgagtttaccaagggtgtagtatttcataccgcctgaaatgatcagcattggcacaaatcaaaattgagccgcctttgaaatgcaaaaatacctttgactagtaagtacatcctaggagtttgaaaacttaactaaggtttaaatttaccttgtttaaagaacttctgacttttgaggaaaatctagctttccaagtaactaaaatgtacatgagataaacctctcaccactatgtgtccctgagaatgcaacacttttttagtcttcatacttg

SEQ ID NO: 19629 - DNA, 903 bp, Homo Sapiens
gcacgaggtgaccagcgtgccatagagaatgagctactggccaggaacatccatgtgatccgacgaacatttgaagatatctctgaaaaggggtctctggaccaagaccgaaggctgtttgtggatggccaggaaattgctgtggtttacttccgggatggctacatgcctcgtcagtacagtctacagaattgggaagcacgtctactgctggagaggtcacatgctgccaagtgcccagacattgccacccagctggctgggactaagaaggtgcagcaggagctaagcaggccgggcatgctggagatgttgctccctggccagcctgaggctgtggcccgcctccgcgccacctttgctggcctctactcactggatgtgggtgaagaaggggaccaggccatcgccgaggcccttgctgcccctagccggtttgtgctaaagccccagagagagggtggaggtaacaacctatatggggaggaaatggtacaggccctgaaacagctgaaggacagtgaggagagggcctcctacatcctcatggagaagatcgaacctgagccttttgagaattgcctgctacggcctggcagccctgcccgagtggtccagtgcatttcagagctgggcatctttggggtctatgtcaggcaggaaaagacactcgtgatgaacaagcacgtggggcatctacttcgaaccaaagccatcgagcatgcagatggtggtgtggcagcgggagtggcagtcctggacaacccataccctgtgtgagggcacaaccaggccacgggaccttctatcctctgtatttgtcattcctctcctagccctcctgaggggtatcctccttaaagacctccaaagtttttatggaagggtaatacctggtacctt

SEQ ID NO: 19630 - DNA, 1448 bp, Homo Sapiens
  misc_feature (798)..(807): n is a, c, g, or t
gcacgaggcgtgagtgttcaggtcaatgctggcccactagcatatgcgcgagctttcttagatgatacaaacacaaagcgatatcctgacaataaagtgaagctgcttaaggaagttttcaggcaatttgtggaagcttgcggtcaagccttagcggtaaacgaacgtctgattaaagaagaccagctcgagtatcaggaagaaatgaaagccaactacagggaaatggcgaaggagctttctgaaatcatgcatgagcagatctgccccctggaggagaagacgagcgtcttaccgaattcccttcacatcttcaacgccatcagtgggactccaacaagcacaatggttcacgggatgaccagctcgtcttcggtcgtgtgattacatctcatggcccgtgtgtggggacttgctttgtcatttgcaaactcaggatgctttccaaagccaatcactggggagaccgagcacagggaggaccaaggggaaggggagagaaaggaaataaagaacaacgttatttcttaacagactttctataggagttgtaagaaggtgcacatatttttttaaatctcactggcaatattcaaagttttcattgtgtcttaacaaaggtgtggtagacactcttgagctggacttagattttattcttccttgcagagtagtgttagaatagatggcctacagaaaaaaaaggttctgggatctacatggcagggagggctgcactgacattgatgcctgggggaccttttgcctcgaggctgagctggaaaatcttgaaaatannnnnnnnnncctgtggcacattcaggttgaatacagaactatttttgtgactagtttttgatgacctaagggaactgaccattgtaatttttgtaccagtgaaccaggagatttagtgcttttatattcatttccttgcatttaagaaaatatgaaagcttaaggaattatgtgagcttaaaactagtcaagcagtttagaaccaaaggcctatattaataaccgcaactatgctgaaaagtacaaagtagtacagtatattgttatgtacatatcattgttaatacagtcctggcattctgtacatatatgtattacatttctacatttttaatactcacatgggcttatgcattaagtttaattgtgataaatttgtgctgttccagtatatgcaatacactttaatgttttattcttgtacataaaaatgtgcaatatggagatgtatacagtctttactatattaggtttataaacagttttaagaatttcatccttttgccaaaatggtggagtatgtaattggtaaatcataaatcctgtggtgaatggtggtgtactttaaagctgtcaccatgttatattttcttttaagacattaatttagtaattttatatttgggaaaataaaggtttttacctcgtgc

SEQ ID NO: 19631 - DNA, 944 bp, Homo Sapiens
  misc_feature (743)..(760): n is a, c, g, or t
gcacgagggttacacatctcccaagaggctgactattaatggaggttcaaatggaggcctcttagtggctgcttgtgcaaatcagagacctgacctctttggttgtgttattgcccaagttggagtaatggacatgctgaagtttcataaatataccatcggccatgcttggaccactgattatgggtgctcggacagcaaacaacactttgaatggcttgtcaaatactctccattgcataatgtgaagttaccagaagcagatgacatccagtacccgtccatgctgctcctcactgctgaccatgatgaccgcgtggtcccgcttcactccctgaagttcattgccacccttcagtacatcgtgggccgcagcaggaagcaaagcaaccccctgcttatccacgtggacaccaaggcgggccacggggcggggaagcccacagccaaagtgatagaggaagtctcagacatgtttgcgttcatcgcgcggtgcctgaacgtcgactggattccataaacagttttcgtgcttcctcctgacagcgacagaaaacctcaagggcttccgcacgttgacaccaagaaaccactgggcataatgcttccccacgggaacattattcctgcactcacaggctacagttgaacagaactgccgtgggaattttatcttttttaggcttctcctttttagcaaggccttggtgtttctttttccaccctgtctaggcacatgtggnnnnnnnnnnnnnnnnnnaagggcatgttgggataaatagctaaatggcaacaaacacattgtgaatattagattgctgaattaaggatcatagtcgggcatacttatctatatccataacctctatatctttaaataaatgtgagaactgttctcatggagaagacttctttgcaacaataataaatgttatttaagaatg

SEQ ID NO: 19632 - DNA, 965 bp, Homo Sapiens
  misc_feature (765)..(775): n is a, c, g, or t
gcacgaggggaggccaaacgttctgagtcctggtaaggacagtcgctctgggggtcctcattttactgcagttcctgcacgccagtgaaagagaggagatagaccctggaaggcagagctgcagatgctcatcatcaggtcaattctggagctacagttttgtttctgactggatagggatgcaccagtgactgtcacatcaagcagtccttttattctctctcctttagtatcgattttaaagggcattaggcactatggttccagagtttcttggggaaaacttgcagattcttattaattggttctgcaatacttaaataaattattttacaattataagttttcagattataacatttgtattaatttttactgattttccaagatacttcttagatttactatttacgtagctttatgtacattctctgtaaaaatagacctctaaatatgaggctttacatgaaatttgtacacacatacacactaatgttagctccttaaattgctgcactaaggtgctggttagtagagatggacggagcctctcgcgttttgctctcagatgtgttaaaggcgcacgtgtacctgctctcagcggcagtgcggcctccccatctgctgggtgcccatggccctccctgcagcctcagtgatgacctcgtctgccagggacacaggttttcatcatttacaggctcttatgtgctagttttgttggtagcacgttatttaatgcataaaggcagaattcttacaagnnnnnnnnnnnaatgtgaacatagatgcagcaccgactttttaaactgaaaaaacgggtataatgttaacttttaaaaataacatttgggacacactagtattgatttttgtttacagattgtttgtttacaaattggtagtctttgtttctatgagatactttagtgtgactttttaaatgtcttagaattaaaagttgt

SEQ ID NO: 19633 - DNA, 875 bp, Homo Sapiens
gaaaatgtgtatttattaccatctttcacattggctatttaaagacaaagacaaattctgtttcttgagaagagaatattagctttactgtttgttatggcttaatgacactagctaatatcaatagaaggatgtacatttccaaattcacaagttgtgtttgatatccaaagctgaatacattctgctttcatcttggtcacatacaattatttttacagttctcccaagggagttaggctattcacaaccactcattcaaaagttgaaattaaccatagatgtagataaactcagaaatttaattcatgtttcttaaatgggctactttgtcctttttgttattagggtggtatttagtctattagccacaaaattgggaaaggagtagaaaaagcagtaactgacaacttgaataatacaccagagataatatgagaatcagatcatttcaaaactcatttcctatgtaactgcattgagaactgcatatgtttcgctgatatatgtgtttttcacatttgcgaatggttccattctctctcctgtactttttccagacacttttttgagtggatgatgtttcgtgaagtatactgtatttttacctttttccttccttatcactgacacaaaaagtagattaagagatgggtttgacaaggttcttcccttttacatactgctgtctatgtggctgtatcttgtttttccactactgctaccacaactatattatcatgcaaatgctgtattcttctttggtggagataaagatttcttgagttttgttttaaaattaaagctaaagtatctgtattgcattaaatataatatgcacacagtgctttccgtggcactgcataccctcgtgc

SEQ ID NO: 19634 - DNA, 851 bp, Homo Sapiens
gcacgaggcttctttcccatgcatttccaagccttccacccagctgtggccccaccacaagggcctgggcccccagagctgggccgtgacactggccgctttgatcgccaggcagccagcgaggcctgcttctacaactccgactacgtggcagcccgtgggcgcctggcggcagcctcagaacaagaagaggagctgctggagagcctggatgtgtacgagctgttcctccacttctccagtctgcatgtgctgcgggcggtggagccggcgctgctgcagcgctaccgggcccagacgtgcagcgcgaggctcagtgaggacctgtaccaccgctgcctccagagcgtgcttgagggcctcggctcccgaacccagctggccatgctactctttgaacaggagcagggcaacagcacctgaccccaccctgtccccgtgggccgtggcatggccacaccccaccccacttctcccccaaaaccagagccacctgccagcctcgctgggcagggctggccgtagccagaccccaagctggcccactggtcccctctctggctctgtgggtccctgggctctggacaagcactgggggacgtgcccccagagccacccacttctcatcccaaacccagtttccctgccccctgacgctgctgattcgggctgtggcctccacgtatttatgcagtacagtctgcctgacgccagccctgcctctgggccctgggggctgggctgtaaaagagttgttggggaaggagggagctgaggagggggcatctcccaacttctcccttttggaccctgcccgaactccctgcctttaataaactggccaagtgtgg

SEQ ID NO: 19635 - DNA, 1435 bp, Homo Sapiens
gcacgagggccattttgattcctgtttgatttatacttctctgttgctacgcaaaaccgatcaaagaaaagtgaacttcagttttacaatctgtatgcctaaaagcgggtactaccgtttattttactgacttgtttaaatgattcgcttttgtaagaatcagatggcattatgcttgttgtacaatgccatattggtatatgacataacaggaaacagtattgtatgatatatttataaatgctataaagaaatattgtgtttcatgcattcagaaatgattgttaaaattctcccaactggttcgacctttgcagatacccataacctatgttgagccttgcttaccagcaaagaatatttttaatgtggatatctaattctaaagtctgttccattagaagcaattggcacatctttctatactttatatacttttctccagtaatacatgtttactttaaaaattgttgcagtgaagaaaaacctttaactgagaaatatggaaaccgtcttaattttccattggctatgatggaattaatattgtattttaaaaatgcatattgatcactataattctaaaacaattttttaaataaaccagcaggttgctaaaagaaggcattttatctaaagttattttaataggtggtatagcagtaattttaaatttaagagttgcttttacagttaacaatggaatatgccttctctgctatgtctgaaaatagaagctatttattatgagcttctacaggtatttttaaatagagcaagcatgttgaatttaaaatatgaataaccccacccaacaattttcagtttattttttgctttggtcgaacttggtgtgtgttcatcacccatcagttatttgtgagggtgtttattctatatgaatattgtttcatgtttgtatgggaaaattgtagctaaacatttcattgtccccagtctgcaaagaagcacaattctattgctttgtcttgcttatagtcattaaatcattacttttacatatattgctgttacttctgctttctttaaaaattagtaaaggatgttttatgaagtcacaagatacatatattttattttgacctaaatttgtacagtcccattgtaagtgttgtttttaattatagatgtaaaatgaaatttcatttgtaattggaaaaaatccaataaaaaggatattcatttagaaaatagctaagatctttaataaaaatttgatatgaaaagcacaatgtgcagaagttatggaaaacctatagaggattacaacaggtaaacgttaaagagaatccattgctgacttatagtgatgtggttaagaagtacatgctttgttgtaaaattgcttgaaagcccattgaaagatgtatctgtttatttacagtctttgaagtaaaagttaccaatgtttgcc

SEQ ID NO: 19636 - DNA, 890 bp, Homo Sapiens
  misc_feature (731)..(740): n is a, c, g, or t
gcacgaggcaccccccggcggctgaaagccggggcagaagtgctggtctcggtcgggattccgggcttggtcccaccgaggcggcgactgcggtaggagggaagaggttttggacgcgctggcctcccgccgctgtgcattgcagcattatttcagttcaaaatgaactatatgcctggcaccgccagcctcatcgaggacattgacaaaaagcacttggttctgcttcgagatggaaggacacttataggctttttaagaagcattgatcaatttgcaaacttagtgctacatcagactgtggagcgtattcatgtgggcaaaaaatacggtgatattcctcgagggatttttgtggtcagaggagaaaatgtggtcctactaggagaaatagacttggaaaaggagagtgacacacccctccagcaagtatccattgaagaaattctagaagaacaaagggtggaacagcagaccaagctggaagcagagaagttgaaagtgcaggccctgaaggaccgaggtctttccattcctcgagcagatactcttgatgagtactaatcttttgcccagaggctgttggctcttgaagagtagggggctgtcactgagtgaaagtgacatcctggccacctcacgcatttgatcacagactgtagagttttgaaaagtcacttttatttttaattattttacatatgcaacatgaagaaatcgtgtaggtgggnnnnnnnnnnaataacaaatcactgtttaaagaaacagtggcatagactccttcacacatcactgtggcaccagcaactacttctttatattgtttcttcatatcccaaattagagtttacagggacagtcttcatttacttgtaaataaaatatgaatc

SEQ ID NO: 19637 - DNA, 817 bp, Homo Sapiens
tgccagacgctgcctgcccacttcatacagcctgcatactgtgtccatgttcagggcatccatgctgccttgattctcaatgacagcaagatagcagtctttggtgtctgtacacaggtcaaagatgttccgtttcacatcaatggttgctataggtttgtagtcagttgcattaaatgttcggaaggatgacccaaaggggcttttcatcctctcttccattaagtcatcttcatcatctgcctgcaacatagctccatacatcactgttcccgtgtgattgaacaccacgcgacactgatccagagcgggaacagtatgcaaaagatgaaaagttcgaaggtcccaaatctcagtattaatgatcacctccagtccatttggatggaaaacaccactgatgttcatattgaacttgtcaaacttgtggatggcctgtgcagagcggacatcccagaggacgccatcatttaagacaagatcatctgtaggattaaaggtggcacagttcctcttgtagttgttggcaagatctgggttaaacagagtcaacagcttgttgccagtctgaatatcataaatgtgggcaatgtctccttttgtgccgatgacccgatcctgggagtgcttactgaactcaacatagtgatcttctgtgaaggaatgcttcatatcaaatactgacttcattccccaaagtgcagacaaaggctggctcccagtagcaaatgtcagcagcaaggacccatccctggaaggtcaagatgtgtgatggctgagttgtgacagttatagctggcctcctcctgtccactaa

SEQ ID NO: 19638 - DNA, 1076 bp, Homo Sapiens
  misc_feature (708)..(722): n is a, c, g, or t
gcacgaggtattgatgtcatttgttatggtgctatttcaattaggctaggtttaggcccttgtacattttgcccataactttttacaaagtacttcttttattgcacattcagagaattttatatatatgtcttgtgtgcgtgtccttaaacttccaatcttactttgtctcttggagattgttgaacgcagcttgtctaggaaggggatgggactagattctaaaatttatttgggaccatgggaatgatagttgggaagaaaactatttgcacacgacagatttctagatactttttgctgctagttttatgtaatatttattgaacattttgacaaatatttatttttgtaagcctaaaagtgattctttgaaagtttaaagaaacttgaccaaaagacagtacaaaaacactggcacttgaatgttgaatgtcaccgtatgcgtgaaattatatatttcggggtagtgtgagcttttaatgtttaagtcatattaaactcttaagtcaaattaagcagacccggcgttggcagtgtagccataactttctgatgttagtaaaaacaaaattggcgacttgaaattaaatcatgccaaggttttgatacacttgtcttaagatattaatgaaacacttcaaaacactgatgtgaagtgtccagattctcagatgtttgttgtgtggattttgtttagttgtgtgnnnnnnnnnnnnnnncagtgaatgtctggcacattgcaatcctcaaacatgtggttatctttgttgtattggcataatcagtgacttgtacattcagcaatagcatttgagcaagttttatcaccaagcaatattttcagttaataaggtttcaaaaatcatgtaaggatttaaacttgctgaatgtaaagattgaacctcaagtcactgtagctttagtaattgcttattgtattagtttagatgctagcactgcatgtgctgtgcatattctgattttattaaaataaaaagttgaactgcacagtctcctttgttgttgtcaattgtggtttattttcagaggtgtaaataaagtgctcttgcctg

SEQ ID NO: 19639 - DNA, 1288 bp, Homo Sapiens
  misc_feature (1173)..(1195): n is a, c, g, or t
gcacgagggtgcacagttcgggccgtggctctaaccgtggttccagacacagctctgcaccccccaagaaaaagaggaagtaacttctgaactttggccctgagctccattcttcctccagccaacccctgaaaattttacatgacatagaaactgtatttttcctttcgttttcatttgaagttttgccatttgtgtttatgggtttagggggccatttgtgtggaccaatctactcggggaattccaggcccaccaggacacgtgccaatggccccattcagatggcaagggaggaggtgttcttgaagacaggaggaggctcccgctgttaataaatattgtttcattcttctctcttcctgtcaccttctgccaagacattgatggcttctgacatcttatttggtgtctcaaagctgtatttccaagacagtggtacaaggtgacccttaattacccgtatcatggttcttgaccagcacattcaatcctccaacctaccctactgccatgaccttccgcacatctctaagttttatctttgcaatactcaaggttctcggaaatttgctaatggttgtgataaaccatacagcttgagccagtgaggcagattgggctggtgccttcgtctgagttttcctgctttcctgcctcgtgcagattctgaggtatatctgctgccttggaagacataagaagcagtgatactccctggctcggttattttctccatacaatgcacacatggtacaatgatagaaggcaaaattgccactgtcttcttttttttctcatatatctaaggaagatatatcaggttgtgcctcatgtaccgcttctagtgaaatgtagaggaaggctcaaaggagtcaacatttagatctggaagggacaagtcatgccttgggcctagaataccctgatgagaaaagagaagaggaagggaggccatatctacaacacagcctctcggcactgctgctccttattttaactttgtcttgcattgtcctgtatttatcacagtttctgttgaacagcttttcaagtatttggggagtttatcttgccatcctccccttctggttctctgcacccacctgtcccactgcagttccttccgtgctctgtgactttaagagaagaaggggggaggggtccccggannnnnnnnnnnnnnnnnnnnnnnctccttagcagtaggactttgatattttcaattttggaagaactaaaagatgaataaaactggggttttttttgttgtttgaaagggggggcc

SEQ ID NO: 19640 - DNA, 969 bp, Homo Sapiens
cctcacgagtcccaggtccagctttattacctaatacaagtccaacctctggaacatccaaattcgctgttccaaagtttaattaaaaacacaatttacaaatatttaatatcttctgaaaagcatttctaagttaagaatgaaaaagtatgtacataatatataatcaaataccaggcagcctcaacttccaccaggtccacactcagcaacatccgtctttttaggttcttcagtgtcttctgtcaaatccacaaagttgttttccatgacgggggaaggaatggaaatccccattgcttttcgaactccatacgtgcttacgatatcacctggagttacttgctgtgcaagttctttaagattattggtcacttgttcagcaagatgcatttctctgtatgagggacccaagagacagatcatgttcggagggggtctggtgctcaaacgttcattctgggcttcctggagttccctgagcaatctggtggtctcatcaagtttcttctggaatatttcagcttcttcagagtcaaaaacttcaactggaacgccaaaatttgttactgctttcagcgctatgagcctgtcttgagtactggagtccaaacgccctggtggctctacttctgtaatctgctccatttcttttgctgtgtcaagtgtcctagtatggccttcatcttcaggcaatgacatctccatctcttgtagggtcctggaatgccctccttttgttaaaacatccagtaaactatctgccatgacatacggataatcttggcacgtggccaaaaactcatggatgctgaaatcacttggaagatcagagtcttccccataggttgaatagattaaatcagaatcatccttgctgatatttgcaaatgtggagtcataatgcggtgcataagaactgtagggcccataattcaaatataacactggagtgactttgtttctttt

SEQ ID NO: 19641 - DNA, 1458 bp, Homo Sapiens
aattttacaagtttattatagctcatacctgggaccgattaaggtgtcaacattttaaaattactcaagatattaaccagaaaagatgattatggcctttaaaactattggacaaactgatgctatttaacattgttcacagccatttaatttgaataacaaattttagattctaagtaggccataacttctttgcaaaacaattgatttataaaggtacagtttcagaaggtaacagcatgagactagtcttcctataggcacattttagtagactgctcttctcatccctggtcaaggagcttctctaactgatggttgatatttcgcaaatggctttcggctcccagaagtgttcttgctttaaataacagagctggaaggctggatgaatcatacgtttcctttacgtttggttcttgagcttgaacatctgaataatcttgataaagctgttttaaattagataagaaatatgctgcattcctaagggaagactttctctctttaagttcatcatattttgtttgtagttgtttcagctgtggctctaaccgaagcagttcatcctggacttcaatcatacgctgccttttcttttcgatatctgaaatcatcttagcattcttcctttcagatttgtcaacatctggctttctttaagcattttgatgaattgttctttaacattaacataaaatgtggcgatggctgccttacaaactttagattctattctttgttgatgctctaggtgggtttctcaaattcaggcaaaacaatattcaactccttgatgtcactggttttcattccttctggacaccaaatgtgcacaatgtcagaagtatctgagcctatggctttacttcttgatctcttcctttcgtcatgagatatcttcccttttttctgagttttcgattgactttctattgccaagttctctttttcaacagagggctgggcactaaggggtcctgtctttttagaagtgacagactcagctggtttctctgaaagttctgaagacgctgtggttcgaataacctcatgacgttgtgtacttattttctctgctgatttaacttttctccttgtatcactttcttcaatgctttcagagtcatcactaatgggcctgagctttcttcctggcttttttgcactaatttttacagattcgatttcacttgcttcatttccagaagtgtctgaacttctttttgcttcttttcctggaggagttgaagagagagacagtccacaatgtttggagaattcttcttcatcagcatatatagctgtgctatgtaaaggaggatcaaaggtctcataagtttcttcatctttctcattttcacccagcctgccaatgcttgagacatcagaattatcaggaaagtcgaacacgtcaataggcttgcacttttgaccagctttatctttccctcgtgc

SEQ ID NO: 19642 - DNA, 1112 bp, Homo Sapiens
gcacgagggtcccgtcaagcagcctggctcatggctgtgtgcggcctggggagccgtcttggcctggggagccgtcttggcctgcaagggtgcttcggcgccgccaggctcctgtatccccgtttccagagccgcggccctcagggcgtggaagacggggacaggccacagccttcctcgaagacacccaggatccccaagatttacaccaaaacgggagacaaagggttttctagtaccttcacaggagaaaggagacccaaagatgaccaagtgtttgaagccgtgggaactacagatgaattaagttcagctattgggtttgctctggaattagtcacagaaaagggccatacatttgccgaagagcttcagaaaatccagtgcacattgcaggacgtcggctcggccctggcgacaccatgctcctcggcccgggaggctcacttaaagtataccacgttcaaggcggggcccatcctggagctggagcagtggatcgacaagtacaccagccagctcccaccactcacggccttcatcctgccttcgggaggcaagatcagctcggcgctgcatttctgccgggccgtgtgccgccgggccgagagacgtgtggtgcctcttgtccagatgggagagaccgatgcgaacgtggccaagttcttaaacagactcagtgactatctcttcacgctagccagatatgcagccatgaaggaggggaatcaagagaaaatatacaagaaaaatgacccatcggccgagtctgagggactctgaaatcacagaaagtgggagcttggaggatccctccatggcgatggccgtggagagaggagcttgcccttctggggtcctggttcctgaagagctcacccagagaggctcaaagcagccttttgtcccagctcagctttgatctacacctcttgccaccttcctcaagggactgtgaccctttggggattctgtccctgaccctgcttccccaagctctcctgggtcttggagggatgtgggaatgaattggcattgcaggaaagacaggtaaagtgattgctgcaatgagaaggagctgtgcggaaaaggaataaaagttggaaaggctg

SEQ ID NO: 19643 - DNA, 1057 bp, Homo Sapiens
  misc_feature (796)..(796): n is a, c, g, or t
gcacgagggcctggtgctgctggtggtgctgctgctgcttctgaggcactggggctggggcctgtgccttatcggctggaacgagttcatcctgcagcccatccacaacctgctcatgggtgacaccaaggagcagcgcatcctgaaccatgtgctgcagcatgcggagcccgggaacgcacagagcgtgctggaggccattgacacctactgcgagcagaaggagtgggccatgaacgtgggcgacaagaaaggcaagatcgtggacgccgtgattcaggagcaccagccctccgtgctgctggagctgggggcctactgtggctactcagctgtgcgcatggcccgcctgctgtcaccaggggcgaggctcatcaccatcgagatcaaccccgactgtgccgccatcacccagcggatggtggatttcgctggcatgaaggacaaggtcacccttgtggttggagcgtcccaggacatcatcccccagctgaagaagaagtatgatgtggacacactggacatggtcttcctcgaccactggaaggaccggtacctgccggacacgcttctcttggaggaatgtggcctgctgcggaaggggacagtgctactggctgacaacgtgatctgcccaggtgcgccagacttcctagcacacgtgcgcgggagcagctgctttgagtgcacacactaccaatcgttcctggaatacagggaggtggtggacggccctggagaaggccatctacaagggcccaggcagcgaagcagggccctgactgctctccccgcnccctctctcgggctctctcacccagcctggtactgaaggtgccagacgtgctcctgctgaccttctgcggctccgggctgtgtcctaaatgcaaagcacacctcggccgaggcctgcgcctgacatgcaacctctctgaactgcaacactgggattgttcttttttaagaatcatcatgacttctttactaacactggctagctatattatcttataacctaatatcatgttttaaaaatataaaatagaaataagaatct

SEQ ID NO: 19644 - DNA, 943 bp, Homo Sapiens
aaactctgtgcagtttattctcattacagtgttcaaccagtttgacatataaagataacacactttaacagtaaatgttgggaggcacacatatattcccattctgaaagaagacatgttatatatacggaaaaaaatgcagcaaatattaaggtattcaaagtaatttttttgaactcagatgtgacatatttacaagaaaagtgtgtacgttttaaaataattaaataatttccatagacttataaaagaattgagataaatattaggagaccctgacaatcaccagaacattttcctatgctatcgaacaaggatagttctattttaaaatgtcccaaaacagagctaatattttgccaccatgaaatatatcaaattgcaaatactaaagtgaacatgcaatgtggaagctgtaccaaaattaaacagcattaggttcttaaatattgcaaagtgtctatttaagatttctcgggtgtgttcatgaaaaaggaactttcaaaaaagccattaaaatgaatatatcagctgaaaaagtgataactcattaaaatctctttattctatcactttcaaatgtagctgcaaaagagaaaaaatcttaatgtaactttaaaaaaatattagcttatgaataaaaaagttgagtggtgcattctttatgcatacagatttttaaactgatattgtataattctaatacatcttaacctctggactgcactgctgtagtaggaaatttttctgtctcagacaagaagtcatctagaaaatgaaaacgagaaattttcaatgatatgcatgaattcaaaacaaaacagtactgtaaaatggcaaaatataaaaatagcagcatgtgaaattcaagactgttttcttaaagcaaatgtttaagactgaacctcaaaaacggtacttatgggccgggcatggtggctca

SEQ ID NO: 19645 - DNA, 1352 bp, Homo Sapiens
ctcttccaattctttgtatgctaaagctgtcaaaaaccacagctcagggactgtgagtgccacttctcctaataagtgcaaaagaccaatgaatgccttcatgctttttgccaaaaaatacagagttgaatatactcagatgtatccagggaaagataacagagccataagtgtgatccttggtgacaggtggaagaaaatgaagaatgaagagagaagaatgtacacattagaagcaaaggctttggctgaagaacagaaacgtttaaatcctgactgttggaagaggaaaagaaccaattcaggctcacaacaacattaaaccaggatgcttatgttcttaagtctatatttgcatatacattgactcttgatggaaagacttaagaagatcaaggtctcaccatttgtcctcaattcgtgtgaccataagatactgatagcattgagtcttgaaatgatttaataatatgagtgaggatttgctttctccattagagcattaagctaaaactatcaacattttaaaccaaattgccttatttttcttccaaacttcatatatgtctatcaggtaataataggcttgaaaattgatatcctgtggtgctaaagtacagtagaaagagaggagaagtgtatacatgttttattttaaattgtacgaaaggggaatttaaaaaatatgtaactgctgtttatacattggctccttactgcttattaatctgtattgtacacatgatgaaatgaagcagaagctgggagtcggcctttcctctagtaaccaccacatggctcagcatctgtgccaaacataggcgctcctagtctggtcagtgccaagaggctaccagaacatggggcaggtggctggtgttggtgtcccagcctaagagccacctgctgcagttaccatggcatgctgagttgatgcaccaggtggcagcagccatccgttattatttccaatggagacctagcccaggccaaggtaaagttagttaatagcattgggatatagtcactgtaatggtgctattaacaaacagtcaacaccattgtattttttaacttcgtgttctgtatctcctcagccatgtatcttaaatatattttgtcatcataatctttatggtgggggcagactttgcacttactgcagtgcaacacttgcactttaattttcctccaactgtctaaaattagagcaaatacattggcaatacagctgcttttgctctgagctacaatcatggcttttcatgttacttaccaagtggtgtttctggttaggaatcacagctgtaaaattgatttcagttcatcacacttcttcatgatcctcgtgc

SEQ ID NO: 19646 - DNA, 1928 bp, Homo Sapiens
gcacgaggcttcagtccgctggtcccgagcacgagctgtgaggggattcacttgtgtgcggaactcctcggaaccatggcgtccctttcccttgcacctgttaacatctttaaggcaggagctgatgaagagagagcagagacagctcgtctgacttcttttattggtgccatcgccattggagacttggtaaagagcaccttgggacccaaaggcatggacaaaattcttctaagcagtggacgagatgcctctcttatggtaaccaatgatggtgccactattctaaaaaacattggtgttgacaatccagcagctaaagttttagttgatatgtcaagggttcaagatgatgaagttggtgatggcactacctctgttaccgttttagcagcagaattattaagggaagcagaatctttaattgcaaaaaagattcatccacagaccatcatagcgggttggagagaagccacgaaggctgcaagagaggcgctgttgagttctgcagttgatcatggttccgatgaagttaaattccgtcaagatttaatgaatattgcgggcacaacattatcctcaaaacttcttactcatcacaaagaccactttacaaagttagctgtagaagcagttctcagactgaaaggctctggcaacctggaggcaattcatattatcaagaagctaggaggaagtttggcagattcctatttagatgaaggcttcctgttggataaaaaaattggagtaaatcaaccaaaacgaattgaaaatgctaaaattcttattgcaaatactggtatggatacagacaaaataaagatatttggttcccgggtaagagttgactctacagcaaaggttgcagaaatagaacatgcggaaaaggaaaaaatgaaggagaaagttgaacgtattcttaagcatggaataaattgctttattaacaggcaattaatttataattatcctgaacagctctttggtgctgctggtgtcatggctattgagcatgcagattttgcaggtgtggaacgcctagctcttgtcacaggtggtgaaattgcctctacctttgatcacccagaactggtgaagcttggaagttgcaaacttatcgaggaagtcatgattggagaagacaaactcattcacttttctggggttgcccttggtgaggcttgtaccattgttttgcgtggtgccactcaacaaattttagatgaagcagaaagatcattgcatgatgctctttgtgttcttgcgcaaactgtaaaggactctagaacagtttatggaggaggctgttctgagatgttgatggctcatgctgtgacacagcttgccaatagaacaccaggcaaagaagctgttgcaatggagtcttatgctaaagcactgagaatgttgccaaccatcatagctgacaatgcaggctatgacagtgcagacctggtggcacagctcagggctgctcacagtgaaggcaataccactgctggattggatatgagggaaggcaccattggagatatggctatcctgggtataacagaaagttttcaagtgaagcgacaggttcttctgagtgcagctgaagcagcagaggtgattctgcgtgtggacaacatcatcaaagcggcacccaggaaacgtgtccctgatcaccacccctgttaagcattcccacgtgctgtcgatctttggaccagtttctagcaaagttgtgtttgaaagatactctattaaagaagactgtggaatctgtttatcggtgcccattatatccttaagtttggatatttagctgaccttcgctttaacataggtctaatttatttgccgtgtcattttccatacaaatcagttgatttaaaaaagttcatttctcatactgtgcattaaaataaaaatttgaacaatta

SEQ ID NO: 19647 - DNA, 1526 bp, Homo Sapiens
gcacgagggctgtatgcctacatcttcctccatcacgctggggtcctgccgtggcacgacgggaagcaggtgcacctggtcagtcctctgaccacctacatggtccccaagccagaagaaatcaacctgctcaccggggagtctgatacacagcagatcgaggcggagaagaagccgacgagtgccctggatgagccagtgtcccactggcgaccgcggctggcgctgaacgtgatggcggacaactttgtctttgacgggtcctccctgcctgccgatgtgcatcggtacatgaagatgatccagctggggaaaaccgtgcattacctgcccatcctgttcatcgaccagctcagcaaccgcgtgaaggacctgatggtcataaaccgctccaccaccgagctgcccctcaccgtgtcctacgacaaggtctcactggggcggctgcgcttctggatccacatgcaggacgccgtgtactccctgcagcagttcgggttttcagagaaagatgctgatgaggtgaaaggaatttttgtagataccaacttatacttcctggcgctgaccttctttgtcgcagcgttccatcttctctttgatttcctggcctttaaaaatgacatcagtttctggaagaagaagaagagcatgatcggcatgtccactaaggcagtgctctggcgctgcttcagcaccgtggtcatctttctgttcctgctggacgagcagacgagcctgctggtgctggtctcggcggtgttggagccgccattgagctgtggaaagtgaagaaggcattgaagatgactattttttggagaggcctgatgcccgaatttcagtttggcacttacagcgaatctgagaggaaaaccgaggagtacgatactcaggccatgaagtacttgtcatacctgctgtaccctctctgtgtcgggggtgctgtctattcactcctgaatatcaaatataagagctggtactcctggttaatcaacagcttcgtcaacggggtctatgcctttggtttcctcttcatgctgccccagctctttgtgaactacaagttgaagtcagtggcacatctgccctggaaggccttcacctacaaggctttcaacaccttcattgatgacgtctttgccttcatcatcaccatgcccacgtctcaccggctggcctgcttccgggacgacgtggtgtttctggtctacctgtaccagcggtggctttatcctgtggataaacgcagagtgaacgagtttggggagtcctacgaggagaaggccacgcgggcgccccacacggactgaaggccgcccgggctgccgccagccaagtgcaacttgaattgtcatgagtatttttggaagcatttggaggaattcctagacattgcgttttctgtgttgccaaaatcccttccgacatttctcagacatctcccaagttcccatcacgtcagatttgggagctggtagcgcttacgatgtccccacgtgtgaacatctgtcttgggtcac

SEQ ID NO: 19648 - DNA, 1277 bp, Homo Sapiens
  misc_feature (1171)..(1194): n is a, c, g, or t
gcacgaggccaaggtgcagaagctgctgcaggacttcttcaacgggcgcgacctgaacaagagcatcaaccccgacgaggctgtggcctacggggcggcggtgcaggcggccatcctgatgggggacaagtccgagaacgtgcaggacctgctgctgctggacgtggctcccctgtcgctggggctggagacggccggaggcgtgatgactgccctgatcaagcgcaactccaccatccccaccaagcagacgcagatcttcaccacctactccgacaaccaacccggggtgctgatccaggtgtacgagggcgagagggccatgacgaaagacaacaatctgttggggcgcttcgagctgagcggcatccctccggcccccaggggcgtgccccagatcgaggtgaccttcgacatcgatgccaacggcatcctgaacgtcacggccacggacaagagcaccggcaaggccaacaagatcaccatcaccaacgacaagggccgcctgagcaaggaggagatcgagcgcatggtgcaggaggcggagaagtacaaagcggaggacgaggtgcagcgcgagagggtgtcagccaagaacgccctggagtcctacgccttcaacatgaagagcgccgtggaggatgaggggctcaagggcaagatcagcgaggcggacaagaagaaggttctggacaagtgtcaagaggtcatctcgtggctggacgccaacaccttggccgagaaggacgagtttgagcacaagaggaaggagctggagcaggtgtgtaaccccatcatcagcggactgtaccagggtgccggtggtcccgggcctggcggcttcggggctcagggtcccaagggagggtctgggtcaggccctaccattgaggaggtggattaggggcctttgttctttagtatgtttgtctttgaggtggactgttgggactcaaggactttgctgctgttttcctatgtcatttctgcttcagctctttgctgcttcacttctttgtaaagttgtaacctgatggtaattagctggcttcattatttttgtagtacaaccgatatgttcattagaattctttgcatttaatgttgatactgtaagggtgtttcgttccctttaaatgaatcaacactgccaccttctgtacgagtttgnnnnnnnnnnnnnnnnnnnnnnnngcttggcgaaaacactacaaaggctgggaatgtatgtttttataatttgtttatttaaatatgttaaaaagaaatcctcgtgc

SEQ ID NO: 19649 - DNA, 798 bp, Homo Sapiens
gcacgaggcccacgggcagtgctgtgacctctgtggagccgttgtgttgctgacccacggccccgcatttgacctggagcggtaccgggcgcggatactggacaccttcctgggtctgcctcagtaccacgggctgcaggtggccgtgtccaaggtgccacgctcgtcccggctccgtgaggccgatacggagatccaggtggtgctggtggagaatgggcccaagacaggcggagcggggcggctggcccgggccctcctggcggacgtcgccgagaacggcgaggccctcggcgtcctggaggcgaccatgcgggagtcgggcgcacacgtctggggcagctccgcggctgggctggcgggcggcgtggcggctgccgtgctgctggcgctgctggtcctgctggtggcgccgccgctgctgcgccgcgcggggaggctcaggtggaggaggcacgaggcggcggccccggctggagcgcccctcggcttccgcaacccggtgttcgacgtgacggcctccgaggagctgcccctgccgcggcggctcagcctggttccgaaggcggccgcagacagcaccagccacagttacttcgtcaaccctctgttcgccggggccgaggccgaggcctgagcggccgcctgaccgtcgaccttggggctctccaccccctctggccccagtcgaactgggggctagccacctcctcgtccagcccccaaacctccccttcctttccccctcctccgggggccaaggacagggtggccttactcagtaaaggtgtttcctgc

SEQ ID NO: 19650 - DNA, 633 bp, Homo Sapiens
  misc_feature (226)..(313): n is a, c, g, or t
gcaccagggtcgaaccaaacccattccaaagaaaggtactgtggagggctttgagcccgcagacaacaagtgtctgttaagagctaccgatgggaagaagaagatcagcactgtggtgagctccaaggaagtgaataagtttcagatggcttattcaaacctccttagagctaacatggatgggttgaagaagagagacaaaaagaacaaaactaagaagaccaannnnnnnnnnnnnnnnnnnnnnnnnnnnnnnnnnnnnnnnnnnnnnnnnnnnnnnnnnnnnnnnnnnnnnnnnnnnnnnnnnnnnnnntaaagggcatacatttcctgctttcaccaattaaccactgaattgctattttttccttttggccagatagctaggtttctggttcccccacagtaggtgttttcacataagattagggtccttttggaaagaatagttgcagtgtttataggatagttgtggtaagaatctagtttattttgcatttggctaattggtctgtgctgcatggttatatactcctggattatagattaaaagtctctgtagacatctctgtgaagagcaagctatcattaaacatgtctgcctcgtgccgaattcctgcagcccggggcccc

SEQ ID NO: 19651 - DNA, 2096 bp, Homo Sapiens
ccccgggctgcaggaattcggcacgaggggaacacccagttcaagtatgggaaccagttggttcggctggctcatcgggaacaggtggctctgtatgtggacctggacgacgtagccgaggatgaccccgagttggtggactcaatttgtgagaatgccaggcgctacgcgaagctctttgctgatgccgtacaagagctgctgcctcagtacaaggagagggaagtgcgggctgactctgtggggaagttggtaactgtgcgtggaatcgtcactcgtgtctctgaagtcaaacccaagatggtggtggccacttacacttgtgaccagtgtggggcagagacctaccagccgatccagtctcccactttcatgcctctgatcatgtgcccaagccaggagtgccaaaccaaccgctcaggagggcggctgtatctgcagacacggggctccagattcatcaaattccaggagatgaagatgcaagaacatagtgatcaggtgcctgtgggaaatatccctcgtagtatcacggtgctggtagaaggagagaacacaaggattgcccagcctggagaccacgtcagcgtcactggtattttcttgccaatcctgcgcactgggttccgacaggtggtacagggtttactctcagaaacctacctggaagcccatcggattgtgaagatgaacagagtgaggatgatgagtctgggggctggagagctcaccagggaggagctgaggcaattgcagaggaggatttctacgaaaagctggcagcttcaatcgccccaaaaatatacgggcatgaagatgtgaagaaggcactgctgctcctgctagtcgggggtgtggaccagtctcctcgaggcatgaaaatccggggcaacatcaacatctgtctgatgggggatcctggtgtggccaagtctcagctcctgtcatacattgatcgactggcgcctcgcagccagtacacaacaggccggggctcctcaggagtggggcttacggcagctgtgctgagagactccgtgagtggagaactgaccttagagggtggggccctggtgctggctgaccagggtgtgtgctgcattgatgagttcgacaagatggctgaggccgaccgcacagccatccacgaggtcatggagcagcagaccatctccattgccaaggccggcattctcaccacactcaatgcccgctgctccatcctggctgccgccaaccctgcctacgggcgctacaaccctcgccgcagcctggagcagaacatacagctacctgctgcactgctctcccggtttgacctcctctggctgattcaggaccggcccgaccgagacaatgacctacggttggcccagcacatcacctatgtgcaccagcacagccggcagcccccctcccagtttgaacctctggacatgaagctcatgaggcgttacatagccatgtgccgcgagaagcagcccatggtgccagagtctctggctgactacatcacagcagcatacgtggagatgaggcgagaggcttgggctagtaaggatgccacctatacttctgcccggaccctgctggctatcctgcgcctttccactgctctggcacgtctgagaatggtggatgtggtggagaaagaagatgtgaatgaagccatcaggctaatggagatgtcaaaggactctcttctaggagacaaggggcagacagctaggactcagagaccagcagatgtgatatttgccaccgtccgtgaactggtctcagggggccgaagtgtccggttctctgaggcagagcagcgctgtgtatctcgtggcttcacacccgcccagttccaggcggctctggatgaatatgaggagctcaatgtctggcaggtcaatgcttcccggacacggatcacttttgtctgattccagcctgcttgcaaccctggggtcctcttgttccctgctggcctgccccttgggaaggggcagtgatgcctttgaggggaaggaggagcccctctttctcccatgctgcacttactccttttgctaataaaagtgtttgtagattgtcaaaaaacctcgtgc

SEQ ID NO: 19652 - DNA, 1191 bp, Homo Sapiens
gcacgaggagagatcatcattagctgtgaagatttgagttgtatatacctgcactgatattcttatcaaaaatttctacattagctttaagtgttcagattaacacttttgaaatttttgtagcttttagctgattaattagaaaaatttaatatttcagtgaaagttttaaattatcatttatttatttttttaaatgagaggggaaagctgaaattccgtgttaagacacaaggaaaaagaatggccctactattatcatgcaaaaatgctttgttggcacctcagattaatcatataatagctatagtctcttcagcatttgtttaaattttagaaaacctgtataaattactggtgcataacttaaagattattctgcctttggctaattgagtaattcccctccagcactagagaccgctcagtgctcttactagatgaactcagtaacgccttgagctgggttgattgaggatgtgtgaaaagctcacagagcccgatgcctgctgctatttcacggcaatgagcctttttctttctacactgaagattttcttcttatttaatgtggtttattttgggctcagaaataattgctctgttgaaaataatcctttgtcagaaaagaaggtagctaccacatcattttgaaaggaccatgagcaactataagcaaagccataagaagtggtttgatcgatatattaggggtagctcttgattttgttaacattaagataaggtgactttttccccctgcttttaggattaaaatcaaagatacttctatatttttatcactatagatcatagttattatacaatgtagtgagtcctgcatgggtactcgatgtgtaatgaaacctgaaataataagataataagaaaagcataattttttaaagctgtgctgtcggtgaatacagagatgatactcaaattataataaaactcttcattttgtgaattatagaagctactttttataaagccatattttttttgggaaactaaggagggacctagaactgatgaatgggtaaaagtaagttttgcgggatttttgtagaactctgggcgttggggattccttatgcggggggtaactttaaatatttttgaattccaaatttttgaattaatgacccttgtttttccaaatatgggcccttgtgcccccccgggggg

SEQ ID NO: 19653 - DNA, 1155 bp, Homo Sapiens
aatattcatgtatttattctcagaacatacaaacttatcttctcagagaatagaaaacagagatttcactcagtgacaaagatggacacagccagttcaccgtgtccccccatctacttagaaaatcccctgggggaggggatgcctagagcatacagcaccccttggtgcggggctgtgcacaggtctaaagactctcaacttcctttaccatccaaacaggaaaacagctgtccagatgacagtaagattccactggctgtaatcctcatggggccaggtctcctggggcatctagggcaatgatgctactgcagtttatgcagttacacagtcaagtctgtgccaaaggaggtcccatccggcggccaggtttctgttcagtctggggagcaatgccaactggctgcccccatagcctggcatgagctgatggcccagtgcaatcccaaagcaaagaagggcagaactgggccaagaagctgtggtaatttgctctccctgcctccgacagcgtcgtcctctccttttgcagccccacacgcaggcctcctgacctgagggtctgggctagggagttggattgttttcctaagcccccatatcccaagagtgaggacctggaaagagggatgtgagggttctgaaaaacaggcatcaggcagctttggagatgccctcagcccacaggaagagtgctgtgtcaggcaaagatggtctcttcccggcgcttcttggtgaggatggtgcctggcttatgctgggcatctgggtggttggctagttcggggggacaggaagacactgggctttccaggatagcttgcttcagctcgtagaacacagcagagtcctcttttgtgaggaaggtgatggccaccccactcttgcctgctcgtcccgtgcggccaatgcggtggatgtaatcttcaatatttttggccatatcatagttgacaaccatagacacatcttggatgtcaataccacgaccagccacatctgtagccaccaaaatatccttggccccagccttgaggttggacaacgcaaactctcgctgctcctggccttttccaccgtgcagtgtgcaagcattgtaccccatcttctccagggatttggccaacacgtcgcagcccttcttctcggacg

SEQ ID NO: 19654 - DNA, 1949 bp, Homo Sapiens
  misc_feature (1510)..(1532): n is a, c, g, or t
gcacgaggagtaaccttttttgaacctggctctggggatgaaaatgggactagtaataaagaggatgagttcaggatgccttatctaagtcatcagcagctgcctgctggaattcttcccatggtgcccgaggtcgcccaggctgtaggagttagtcaaggacatcacaccaaagattttaccagggcagctccgaatcctgccaaggccacggtaactgccatgatagcccgagagttgttgtatgggggcacctcgcccacagccgagaccattttaaagaataacatctcttcaggccacgtaccccatggacctctcacgagaccctctgagcaactggactatctttccagagtccagggattccaggttgaatacaaagacttccccaaaaacaacaagaacgaatttgtatctcttatcaattgctcctctcagccacctctgatcagccatggtatcggcaaggatgtggagtcctgccatgatatggctgcgctgaacatcttaaagttgctgtctgagttggaccaacaaagtacagagatgccaagaacaggaaacggaccaatgtctgtgtgtgggaggtgctgaaccttttctggccatgaaccattataaaatcccaacatatatactgaaaatactgaaactgctttgaaaatttggaatttctgatacctccagtgggccgagagacacggtgggtaaaggatgtgggcagcagcagggaagacaacagaaacacaaggaggcggctgtggccgggctggactgtgcgggggtttgttgtgatggccactcggtgacctggcggtccctacgcaatagcagctgcctgtggggaagaggggctgcccagccagctggttctcccgggacaccagcagatccacaccctgggcacctccgtgtttggtcttttttttcccctgtgtgaaagaagaaacggcacgaccccttctcaagctggctcactcagacacattgggacaaaccctggacagccatgccagagagaggcctttgaccggccccagagctaaaagcaccagagaaaatcaaatgcttcctactcagcgtgacccaacttttctagtgtgccacggccccaccacctcctgcagtacccacaccatcaccactgctttctcttccaacagtgatctgtattcttagtttcattattttcttttgattgatatgacactatataaaattttcatttgagaatttctcaattgtatctagttaaatagcacagtttggaaacttgtctgagactgactttatcaataatctaaccgacaaagatcatatccatgtgtatgtggttagacatttttatttcattgactaacccaggacagtttcagtgatgcaaattgtgtgccctctggttcagctgaaacagtcctggactttcaaaaaccttgaataagtctcccacagttgtataaattggacaatttaggaattttaaactttagatgatcatttggttccnnnnnnnnnnnnnnnnnnnnnnngttaatgcaaacaggacttaaatgaactttgatttctgttttaaagattattaaaaaacattgtgtatctatacatatggctcttgaggacttagctttcactacactacaggatatgatctccatgtagtccatataaacctgcagagtgattttccagagtgctcgatactgttaattacatctccattagggctgaaaagaatgacctacgtttctgtatacagctgtgttgcttttgatgttgtgttactgtacacagaagtgtgtgcactgaggctttgcgtgtggtccgtatggaaagcctggtagccctgcgagttaagtactgcttccattcattgtttacgctggaatttttctccccatggaatgtaagtaaaacttaagtgtttgtcatcaataaatggtaatact

SEQ ID NO: 19655 - DNA, 1792 bp, Homo Sapiens
ccacgcgtccgcaagatggcgacggcgaccatagctctccaggtcaatggccagcaaggaggggggtccgagccggcggcggcggcggcagtggtggcagcgggagacaaatggaaacctccacagggcacagactccatcaagatggagaacgggcagagcacagccgccaagctggggctgcctcccctgacgcccgagcagcaggaggcccttcagaaggccaagaagtacgccatggagcagagcatcaagagtgtgctggtgaagcagaccatcgcgcaccagcagcagcagctcaccaacctgcagatggcggctcagcggcagcgggcgctggccatcatgtgccgcgtctacgtgggctctatctactatgagctgggggaggacaccatccgccaggcctttgccccctttggccccatcaagagcatcgacatgtcctgggactccgtcaccatgaagcacaagggctttgccttcgtggagtatgaggtccccgaagctgcacagctggccttggagcagatgaactcggtgatgctggggggcaggaacatcaaggtgggcagacccagcaacatagggcaggcccagcccatcatagaccagttggctgaggaggcacgggccttcaaccgcatctacgtggcctctgtgcaccaggacctctcagacgatgacatcaagagcgtgtttgaggcctttggcaagatcaagtcctgcacactggcccgggaccccacaactggcaagcacaagggctacggcttcattgagtacgagaaggcccagtcgtcccaagatgctgtgtcttccatgaacctctttgacctgggtggccagtacttgcgggtgggcaaggctgtcacaccgcccatgcccctactcacaccagccacgcctggaggcctcccacctgccgctgctgtggcagctgctgcagccactgccaagatcacagctcaggaagcagtggccggagcagcggtgctgggtaccctgggcacacctggactggtgtccccagcactgaccctggcccagcccctgggcactttgccccaggctgtcatggctgcccaggcacctggagtcatcacaggtgtgaccccagcccgtcctcctatcccggtcaccatcccctcggtgggagtggtgaaccccatcctggccagccctccaacgctgggtctcctggagcccaagaaggagaaggaagaagaggagctgtttcccgagtcagagcggccagagatgctgagcgagcaggagcacatgagcatctcgggcagtagcgcccgacacatggtgatgcagaagctgctccgcaagcaggagtctacagtgatggttctgcgcaacatggtggaccccaaggacatcgatgatgacctggaaggggaggtgacagaggagtgtggcaagttcggggccgtgaaccgcgtcatcatctaccaagagaaacaaggcgaggaggaggatgcagaaatcattgtcaagatctttgtggagttttccatagcctctgagactcataaggccatccaggccctcaatggccgctggtttgctggccgcaaggtggtggctgaagtgtacgaccaggagcgttttgataacagtgacctctctgcgtgacagtggtccctctccccggacttgcacttgttccttgtttcctctgggttttatagtgatacagtggtgtccccggggccaggcgcgctctgcccagcccagcctacagtgcggataaaggtgcggatgctgctggccctgaaaaaaa

SEQ ID NO: 19656 - DNA, 1523 bp, Homo Sapiens
  misc_feature (1066)..(1074): n is a, c, g, or t
gcacgaggattcagcagctacaaaaacagctaaaggaagcagaacaaatactggcaacagctgtttaccaagcgaaggagaaactcaagtcaatagaaaaagcaagaaaaggtgctatctcctctgaagaaataattaagtatgcacataggatcagtgcaagtaatgctgtatgtgctccactgacctgggttccaggggacccccggagaccctacccaactgatttagagatgagaagtgggttactgggtcagatgaacaatccttccactaatggcgtgaatggccatttaccaggagatgcacttgcagcaggaagattgccagatgtccttgctccacagtatccatggcagtcaaatgacatgtcgatgaatatgttaccaccaaatcatagtagtgactttttgttggaacctcctgggcataataaagaaaatgaagatgatgtagagattatgtcaacggactcctcaagcagtagtagtgagtctgattgaaaaaccttaaaagacaatatacagaattgaatactgtagaattctgtttctttaacagtagcagggaaatgtaaactacaggtgacaaaaaatacccaggtaaacactggctttggtagaattgtgcagtcattaaaagtcaaaattttttgactttctttttaaagccaaagaccatagttttagttttaagccactaggtagatatttaggggaatagtcaaaatttactgttgaaaaagcagttgctatgtgctttcttaccctgttctgttccagttttgctggatttgtacatagccattctagaatagagttgagggaaattatccatatacatatcactaataggcttcttggaattatttagaaaagcatttttaaactggcagtggatgactgaataggcatcatatttctttttgtgtgtcatttaaaagtaacaaaaactgccatttgacagtaaaggctcttggcttctgttggaggcatgggaaattgtctcatttgtacagtttgtaattgtaatttttgtaaataaatttgtttgtacattgtatgcnnnnnnnnnagtttaaatatactgtcagtgtaggtaggaaattatttctgtaaatccagttgcattttataatacttgagtgactaactgaattgaaacctattacaattaatagggttctcaaaggcctattcctattagaagaaataattttttttaataattgaaaaaatttaccacagccttgtctgattttaagaatagattgtgtgaagatttagaatggaaagcaaccatttcttcccttcaccttcctcttcttacagttccccaggagtcatttttaaccacttttaatttctgttggtaacctctgtgtttaggtaatatgcttatacaactatttcttgatgtatcagttttagacaatgtatcttctgatttcaaaggtaatacaacatttaatgtgaaacatttagtgaatacagtaaaggagaaaataaaattgttagcattct

SEQ ID NO: 19657 - DNA, 1254 bp, Homo Sapiens
  misc_feature (973)..(981): n is a, c, g, or t
  misc_feature (1035)..(1052): n is a, c, g, or t
gcacgaggagagaacgagatccgcggtctgtgcctgaaatcccgggagatttttctgagccagcccattcttctggagctggaggcacccctcaagatctgcggtgacatacacggccagtactacgaccttctgcgactatttgagtatggcggtttccctcccgagagcaactacctctttctgggggactatgtggacaggggcaagcagtccttggagaccatctgcctgctgctggcctataagatcaagtaccccgagaacttcttcctgctccgtgggaaccacgagtgtgccagcatcaaccgcatctatggtttctacgatgagtgcaagagacgctacaacatcaaactgtggaaaaccttcactgactgcttcaactgcctgcccatcgcggccatagtggacgaaaagatcttctgctgccacggaggcctgtccccggacctgcagtctatggagcagattcggcggatcatgcggcccacagatgtgcctgaccagggcctgctgtgtgacctgctgtggtctgaccctgacaaggacgtgcagggctggggcgagaacgaccgtggcgtctcttttacctttggagccgaggtggtggccaagttcctccacaagcacgacttggacctcatctgccgagcacaccaggtggtagaagacggctatgagttctttgccaagcggcagctggtgacacttttctcagctcccaactactgtggcgagtttgacaatgctggcgccatgatgagtgtggacgagaccctcatgtgctctttccagatcctcaagcccgccgacaagaacaaggggaagtacgggcagttcagtggcctgaaccctggaggccgacccatcaccccaccccgcaattccgccaaagccaagaaatagcccccgcacaccaccctgtgcccagatgatggattgattgtacagaaatcatgctgccatgctnnnnnnnnntcaccccgacccctcaggcccacctgtcacggggaacatggagccttggtgtannnnnnnnnnnnnnnnnnaatgaatcaatagcagcgtccagtcccccagggctgcttcctgcctgcacctgcggtgactgtgagcaggatcctggggccgaggctgcagctcagggcaacggcaggccaggtcgtgggtctccagccgtgcttggcctcaaggctggcagccggatcctggggcaacccatctggtctcttgaataaaggtcaaagctgg

SEQ ID NO: 19658 - DNA, 1281 bp, Homo Sapiens
gcacgagggcagatggggctctctccttgtcagtcggcgccgcgtgcgggctggtggctctgtggcagcggcggcggcaggactccggcactatgagcggcttcagcaccgaggagcgcgccgcgcccttctccctggagtaccgagtcttcctcaaaaatgagaaaggacaatatatatctccatttcatgatattccaatttatgcagataaggatgtgtttcacatggtagttgaagtaccacgctggtctaatgcaaaaatggagattgctacaaaggaccctttaaaccctattaaacaagatgtgaaaaaaggaaaacttcgctatgttgcgaatttgttcccgtataaaggatatatctggaactatggtgccatccctcagacttgggaagacccagggcacaatgataaacatactggctgttgtggtgacaatgacccaattgatgtgtgtgaaattggaagcaaggtatgtgcaagaggtgaaataattggcgtgaaagttctaggcatattggctatgattgacgaaggggaaaccgactggaaagtcattgccattaatgtggatgatcctgatgcagccaattataatgatatcaatgatgtcaaacggctgaaacctggctacttagaagctactgtggactggtttagaaggtataaggttcctgatggaaaaccagaaaatgagtttgcgtttaatgcagaatttaaagataaggactttgccattgatattattaaaagcactcatgaccattggaaagcattagtgactaagaaaacgaatggaaaaggaatcagttgcatgaatacaactttgtctgagagccccttcaagtgtgatcctgatgctgccagagccattgtggatgctttaccaccaccctgtgaatctgcctgcacagtaccaacagacgtggataagtggttccatcaccagaaaaactaatgagatttctctggaatacaagctgatattgctacatcgtgttcatctggatgtattagaagtaaaagtagtagcttttcaaagctttaaatttgtagaactcatctaactaaagtaaattctgctgtgactaatccaatatactcagaatgttatccatctaaagcatttttcatatctcaactaagataacttttagcacatgcttaaatatcaaagcagttgtcatttggaagtcacttgtgaatagatgtgcaaggggagcacatattggatgtatatgttaccatatgttaggaaattaaatttatttttgctg

SEQ ID NO: 19659 - DNA, 1025 bp, Homo Sapiens
gcacgaggcttgccagcgtgttggagagaccgctaccggtgaaccagcgcgggtttttcggacttgggggttgtgcagatctgctggatctaggtccagggagtctcagtgatggtctgagcctggccgcgccaggctggggtgtcccagaagagccaggaatcgaaatgcttcatggaacaaccaccctggccttcaagttccgccatggagtcatagttgcagctgactccagggctacagcgggtgcttacattgcctcccagacggtgaagaaggtgatagagatcaacccatacctgctaggcaccatggctgggggcgcagcggattgcagcttctgggaacggctgttggctcggcaatgtcgaatctatgagcttcgaaataaggaacgcatctctgtagcagctgcctccaaactgcttgccaacatggtgtatcagtacaaaggcatggggctgtccatgggcaccatgatctgtggctgggataagagaggccctggcctctactacgtggacagtgaagggaaccggatttcaggggccaccttctctgtaggttctggctctgtgtatgcatatggggtcatggatcggggctattcctatgacctggaagtggagcaggcctatgatctggcccgtcgagccatctaccaagccacctacagagatgcctactcaggaggtgcagtcaacctctaccacgtgcgggaggatggctggatccgagtctccagtgacaatgtggctgatctacatgagaagtatagtggctctaccccctgaaagagggtggatgcagctgcttgtgtttcttggggtgactgtcattggtaatacggacacagtgacccatcctccatcctatttatagtggaagggccttcaattgtatcagtacttttttttaagctctggcacattgacctctatgtgttaccagtcattaatgagctgctgcagaggtgactatttgttttactttcttggatgttaacattacactactcactactc

SEQ ID NO: 19660 - DNA, 1179 bp, Homo Sapiens
ccagagtcagctacagttatatttgcaggagatacaaatctaagggatcgagaggttaccagatgtggtggtttacccaacaacattgtggatgtctgggagtttttgggcaaacctaaacattgccagtatacatgggatacacaaatgaactctaatcttggaataactgctgcttgtaaacttcgttttgatcgaatatttttcagagcagcagcagaagagggacacattattccccgaagtttggaccttcttggattagaaaaactggactgtggtagatttcctagtgatcactggggtcttctgtgcaacttagatataatattgtaaaatgcttttcaagtgtgggttttgccctgattgttgcaaatacaatttccaccttctggaaaggtaggtttgctgtggaggaaataatgtactagatcattgtcacagaaaaaccaactatgatttatggttgtgttttcagaattcaacattaaagattaatgtttatttaaacgaacacattcctgcattcaggatgtgaggccatttaataaaaagggcacaaagcctgtcagagttttcaacggtgcttatagctgccagctggattccaaacaggtaccccattgtctctgagctaatgtttatatttttccattcaggcaccgaaatagttaatatttaaaataagtcttcaaaagaaaacataagagattattgagttcttgggactggatcctttatttcataagttcagatcatcttaaatgaaaatgccatgattatctgcagttaagtagatgacagctattctacatcagacttgatttttgtcagctaattacataattggtaagctataattgaaaccttatggcttaaaattccttaactcctttttgattcatgtttgtagtcatgttgtcaacagaggcaaagttaagcttgatgatggttaaaatcggtttgatagcaccatgggacatttttctaacaaaaataaatgcatgaagagacatagccttttagttttgctaattgtgaaatggaaatgctttacaggaagtaaatgcaaattacttttaagtgtgctttaaagaaaaatattttccccacaagagaaatttaaataaagaattttatttgttaaaaaacctcgtgccgaattcctgcagcccgggg

SEQ ID NO: 19661 - DNA, 784 bp, Homo Sapiens
gcacgagggatcaaatgagatctgtttttaatataaagatgttttcttaaaatctctgtatgaaattatctccggagagatagattcaccatgtttgccctgagatttagaggcctctgcctgccactccacaccctgtttgtgaaggcccaagtcactcactatgcaaagaagtcattccctctagttagtgttaaaaccagttatgggtcttcctggcatggtggataatccacacgtggataatcaagagttgactatatgggttcctccctcccctccccttccaccagggatccctgacagaggccacagcgagactcttcagcggatgtagatcatgtcggagatggctccaggcaagtgggtcatgatctgcattcgcagccaccagtagtagtccatggggtggtagcgggtgtagggggtggtggcggtcagggcgtgtgtgacagcatcgatgacaggggacgtgtctgtggagccactgctgcagtaggtctccatcttggcgatcttttcatcaaagtacttcttgccgtagtccttgcgcacgacctcaggcagctcctcccacatcttcttggcgatggcctgaatgctctcagggctgtaaaggctggtggcagcgatgaagttgccgggctccaccacgctgaccttcacgcccagggggtacatctcatagcgcaggcagtccgagaaagcctctaccccgaacttggtgatgcagtacggggagcgggccgggttggccatgcggcccagcatgctgccctcgtgc

SEQ ID NO: 19662 - DNA, 1295 bp, Homo Sapiens
gcacgagggatcttcggaatgatgagcacacaaggcgggagctagccaagatgaagcaggagccggtgaaacctgaagaaggcagagatatggcaaacaggattggcgcttttgggtacatggagtgttcagcaaagaccaaagatggagtgagagaggtttttgaaatggctacgagagctgctctgcaagctagacgtgggaagaaaaaatctgggtgccttgtcttgtgaaaccttgctgcaagcacagcccttatgcggttaattttgaagtgctgtttattaatcttagtgtatgattactggcctttttcatttatctataatttacctaagattacaaatcagaagtcatcttgctaccagtatttagaagccaactatgattattaacgatgtccaacccgtctggcccaccagggtccttttgacactgctctaacagccctcctctgcactcccacctgacacaccaggcgctaattcaaggaatttcttaacttcttgcttctttctagaaagagaaacagttggtaacttttgtgaattaggctgtaactactttataactaacatgtcctgcctattatctgtcagctgcaaggtactctggtgagtcaccacttcagggctttactccgtaacagattttgttggcatagctctggggtgggcagttttttgaaaatgggctcaaccagaaaagcccaagttcatgcagctgtggcagagttacagttctgtggtttcatgttagttaccttatagttactgtgtaattagtgccacttaatgtatgttaccaaaaataaatatatctaccccagactagatgtagtattttttgtataattggatttcctaatactgtcatcctcaaagaaagtgtattggttttttaaaaaagaaagtgtatttggaaataaagtcagatggaaaattcattttttaaattcccgttttgtcactttttctgataaaagatggccatattaccccttttcggccccatgtatctcagtaccccatggagctgggctaagtaaataggaattggtttcacgcctgaggcaattagacactttggaagatggcataacctgtctcacctggacttaagcgtctggctctaattcacagtgctcttttctcctcactgtatccaggttccctcccagaggagccaccagttctcatgggtggcactcagtctctcttctctccagctgactaaactttttttctgtaccagttaatttttccaactactaatagaataaaggcagttttcta

SEQ ID NO: 19663 - DNA, 1565 bp, Homo Sapiens
cagcaccgcggcccgggcttgggccctcttttggttgctgctgcccttgcttggcgcggtttgcgccagcggaccccgcaccttagtgctgctggacaacctcaacgtgcgggagactcattcgcttttcttccggagcctgaaggaccggggctttgagctcacattcaagaccgctgatgaccccagcctgtctctcataaagtatggggaattcctctatgacaatctcatcattttctccccttcggtagaagattttggaggcaacatcaacgtggagaccatcagtgcctttattgacggtggaggcagtgtgctggtagctgccagctccgacattggtgaccctcttcgagagctgggcagtgagtgcgggattgagtttgacgaggagaaaacggctgtcattgaccatcacaactatgacatctcagaccttggccagcatacgctcatcgtggctgacactgagaacctgctgaaggccccaaccatcgttgggaaatcatctctaaatcccatcctctttcgaggtgttgggatggtggccgatcctgataaccctttggtgctggacatcctgacgggctcttccacctcttactccttcttcccggacaagcctatcacccagtatccacatgcggtggggaagaacaccctcctcattgctgggctccaggccaggaacaatgcccgcgtcatcttcagcggctccctcgacttcttcagcgactccttcttcaactcagcagtgcagaaggcggcgcccggctcccagaggtattcccagacaggcaactatgaactagctgtggccctctcccgctgggtgttcaaggaggagggtgtcctccgtgtggggcctgtgtcccatcatcgggtgggcgagacagccccacccaatgcctacactgtcactgacctagtggagtatagcatcgtgatccagcagctctcaaatggcaaatgggtcccctttgatggcgatgacattcagctggagtttgtccgcattgatccttttgtgaggaccttcctgaagaagaaaggtggcaaatacagtgttcagttcaagttgcccgacgtgtatggtgtattccagtttaaagtggattacaaccggctaggctacacacacctgtactcttccactcaggtatccgtgcggccactccagcacacgcagtatgagcgcttcatcccctcggcctacccctactacgccagcgccttctccatgatgctggggctcttcatcttcagcatcgtcttcttgcacatgaaggagaaggagaagtccgactgaggggctagagccctctccgcacagcgtggagacggggcagggaggggggttattaggattggtggttttgttttgctttgtttaaagccgtgggaaaatggcacaactttacctctgtgggagatgcaacactgagagccaaggggtgggagttgggataatttttatataaaagaagtttttccactttgaattgctaaaagtggcatttttcctatgtgcagtcactcctctcatttctaaaatagggacg

SEQ ID NO: 19664 - DNA, 913 bp, Homo Sapiens
gcacgaggttaaaagttttactttaatcacaaattcacaactagagatatcatttgcatatcttagaacgctaaagacctgttaaaattttttaaccaatcagcaaaaatatgtgccccacagatttctaatgttcataatttagaatttatcacatataatatttattaatagtttatttgcaaaattattattcttaaaacacttctttccaacacatttacaatgttcatgtgttttaaagaaaaaaaccaccctcatttaaaaatgtactactgactttaatgtgtggttataccagtgccaccaaattagaaaagaaaaagaaacatacagctgtattggatatgtagttactactacaaataatgacaacacacgtcctatacaaagatcatattcacgcttttctaccacttctcagtcattgtcagaaccatttggaggtaagaaaaccaatgcatcattgaaaatatgcccaaatgccctaaggcggtataccccatacatcatcacatgcatctgatttggagtcagtccattaaaagtaacagccatatctgaacaacagccttctactacctggttggggtgataagtcattgcctctttaatagaaagcccaacagatttggtattaaatacatcttttccatcagcatcttctgcattttctgcaaatactccagcatatttcaggcaaactgctagctgtttatcttcagatatcttccaaatcatccctccctgttcaggacacttttctgggatattgagaaggctgttaagtcttttcattgattctacacttaagacaattcctccttccatacccacatattcaggtctccagattttatagtgtggcctagatagaaaggctgtgatggatcctttttaacaaaaatacttt

SEQ ID NO: 19665 - DNA, 959 bp, Homo Sapiens
  misc_feature (910)..(927): n is a, c, g, or t
cccgggctgcaggaattcggcacgaggtcagagttactggctgtcatttttcatggtgatgattttatttgtagctttcataacctgttgggaagaagttactactttggtacaggctatcaggataacttcctatatgaatgaaactatcttatattttcctttttcatcccactccagttatactgtgagatctaaaaaaatattcttatccaagctcattgtctgttttctcagtacctggttaccatttgtactacttcaggtaatcattgttttacttaaagttcagattccagcatatattgagatgaatattccctggttatactttgtcaatagttttctcattgctacagtgtattggtttaattgtcacaagcttaatttaaaagacattggattacctttggatccatttgtcaactggaagtgctgcttcattccacttacaattcctaatcttgagcaaattgaaaagcctatatcaataatgatttgttaatattattaattaaaagttacagctgtcataagatcataattttatgaacagaaagaactcaggacatattaaaaaataaactgaactaaaacaacttttgccccctgactgatagcatttcagaatgtgtcttttgaagggctatgataccagttattaaatagtgttttattttaaaaacaaaataattccaagaagtttttatagttattcagggacactatattacaaatattactttgttattaacacaaaaagtgataagagttaacatttggctatactgatgtttgtgttactcaaaaaaactactggatgcaaactgttatgtaaatctgagatttcactgacaactttaagatatcaacctaaacatttttattaaatgttcaaatgaaagcaagnnnnnnnnnnnnnnnnnnggccctcgtgccgaattcctgcagcccggggg

SEQ ID NO: 19666 - DNA, 943 bp, Homo Sapiens
gcacgaggctgacctcatacatcaagccaataccgtgtggcccaagacccccaccataaatcacatcattagcatgaaccacccagagtggcccaagactcccagatcagctaccaggcaggatattccaagggcttagagatgaatgcccaggagctgaggataaagggcccgatctttctttgggcaaggttaagcctttactgcatagcagaccacacagaagggtgtgggccaccagagaattttggtaaaaatttggcctctggccttgagcttctaaatctctgtatccgtcagatctctgtggttacaagaaacagccactgaccctggtcaccagaggctgcaattcaggccgcaagcagctgcctggggggtgtccaaggagcagagaaaactactagatgtgaacttgaagaaggttgtcagctgcagccactttctgccagcatctgcagccactttctgccagcatctgcagccagcaagctgggactggcaggaaataacccacaaaagaagcaaatgcaatttccaacacaagggggaagggatgcagggggaggcagcgctgcagttgctcaggacacgctcctataggaccaagatggatgcgacccaagacccaggaggcccagctgctcagtgcaactgacaagttaaaaaggtctatgatcttgagggcagacagcagaattcctcttataaagaaaactgtttgggaaaatacgttgagggagagaagaccttgggccaagatgctaaatgggaatgcaaagcttgagctgctctgcaagaaaaaataagcaggacagaggatttgctctggacagagatggaaaagccgggaacagagaagtgtggggaaaaataggaaccagcaggatggcaggggcaagggctcaagggtgaagaggccgtggggacccacagagttggg

SEQ ID NO: 19667 - DNA, 896 bp, Homo Sapiens
gcacgaggcacacaatgcaaagtgagcgcagcatagctgttaacaaacatacaacttttttctagggctttaagggtggtcatttttttcgagttctctcaagtgtcccaaatcagggtagcaatcttgttgccacatgtgcagcaaacaaagtggaagtatagatcttcttctcccttagggaggctcttgaaggagcaggaggtacagtactgggtagcagtctggccctcctgtcgtctggttggtgttggggcctccagccagggccctctaggggaaccaagcctctgctctcacctgtgggttcttgcccatcagggtaattgtattgagaactcaaatatacgtgcacttacatgtgtggttcgtactcaagtgatctattatctagctgcaaagcctggctttgatttgaaattttgtaaaaatttcatggcacccaaggtttctgattctgacccagcagtggtcctgaagagagctgatggcaagtcttgtagtcattttgattttaattgaagggtgagcacaaccttgtgaaccagcactagcttgttccaagctggaatttatctaatctatttttgtgtttaaaaaagctgtacctaccaaataaataaatagtttataaaatgtattacttaaggtattagctgagtttagagtactttctgcttaattaatttttatacttaactcttcagtagaggtttacaaagagtacaaaggttaaattacaaattcattcccagcctaggcttctgggcacatttcctgttcttgaattctgctcctgaagagggtgaacaaatggggcattcagttgtgagctcagaatttactttaaaaggaggtacagccagccattacacctaaatttatttattttatta

SEQ ID NO: 19668 - DNA, 1608 bp, Homo Sapiens
gcacgaggcgctcgggctcctggtcccggctccccggttaccggggcgcgagtatgaccacaatggcggccgccaccctgctgcgcgcgacgccccacttcagcggtctcgccgccggccggaccttcctgctgcagggtctgttgcggctgctgaaagccccggcattgcctctcttgtgccgcggcctggccgtggaggccaagaagacttacgtgcgcgacaagccacatgtgaatgtgggtaccatcggccatgtggaccacgggaagaccacgctgactgcagccatcacgaagattctagctgagggaggtggggctaagttcaagaagtacgaggagattgacaatgccccggaggagcgagctcggggtatcaccatcaatgcggctcatgtggagtatagcactgccgcccgccactacgcccacacagactgcccgggtcatgcagattatgttaagaatatgatcacaggcactgcacccctcgacggctgcatcctggtggtagcagccaatgacggccccatgccccagacccgagagcacttattactggccagacagattggggtggagcatgtggtggtgtatgtgaacaaggctgacgctgtccaggactctgagatggtggaactggtggaactggagatccgggagctgctcaccgagtttggctataaaggggaggagaccccagtcatcgtaggctctgctctctgtgcccttgagggtcgggaccctgagttaggcctgaagtctgtgcagaagctactggatgctgtggacacttacatcccagtgcccgcccgggacctggagaagcctttcctgctgcctgtggaggcggtgtactccgtccctggccgtggcaccgtggtgacaggtacactagagcgtggcattttaaagaagggagacgagtgtgagctcctaggacatagcaagaacatccgcactgtggtgacaggcattgagatgttccacaagagcctggagagggccgaggccggagataacctcggggccctggtccgaggcttgaagcgggaggacttgcggcggggcctggtcatggtcaagccaggttccatcaagccccaccagaaggtggaggcccaggtttacatcctcagcaaggaggaaggtggccgccacaagccctttgtgtcccacttcatgcctgtcatgttctccctgacttgggacatggcctgtcggattatcctgcccccagagaaggagcttgccatgcccggggaggacctgaagttcaacctaatcttgcggcagccaatgatcttagagaaaggccagcgtttcaccctgcgagatggcaaccggactattggcaccggtctagtcaccaacacgctggccatgactgaggaggagaagaatatcaaatggggttgagtgtgcagatctctgctcagcttcccttgcgtttaaggcctgccctagccagggctccctcctgcttccagtaccctctcatggcataggctgcaacccagcagagggcagctagatggacatttcccctgctcggaagggttggcctgcctggctggggaggtcagtaaactttgaatagtaagcc

SEQ ID NO: 19669 - DNA, 1589 bp, Homo Sapiens
  misc_feature (1154)..(1175): n is a, c, g, or t
gcacgaggcttgctggaggactctcctaaacgtcccaaggaggcagaaaaccctgaaggagaggagaaggaggcagccaccttggaggttgagaggccccttcctatggaggtggaaaagaatagcaccccctctgagcccggctctggccgggggcctccccaagaggaagaagaagaggaggatgaagaggaagaggctaccaaggaagatgctgaggccccaggcatcagagatcatgagagcctgtagccaccaatgtttcaagaggagcccccaccctgttcctgctgctgtctgggtgctactggggaaactggccatggcctgcaaactgggaacccctttcccaccccaacctgctctcctcttctactcacttttcccactccaagcccagcccatggagattgacctggatggggcaggccacctggctctcacctctaggtccccatactcctatgatctgagtcagagccatgtcttctccctggaatgagttgaggccactgtgttccttccgcttggagctattttccaggcttctgctggggcctgggacaactgctcccacctcctgacacccttctcccactctcctaggcattctggacctctgggttgggatcaggggtaggaatggaaaggatggagcatcaacagcagggtgggcttgtggggcctgggaggggcaatcctcaaatgcggggtgggggcagcacaggagggcggcctccttctgagctcctgtcccctgctacacctattatcccagctgcctagattcagggaaagtgggacagcttgtaggggaggggctcctttccataaatccttgatgattgacaacacccatttttccttttgccgaccccaagagttttgggagttgtagttaatcatcaagagaatttggggcttccaagttgttcgggccaaggacctgagacctgaagggttgactttacccatttgggtgggagtgttgagcatctgtccccctttagatctctgaagccacaaataggatgcttgggaagactcctagctgtcctttttcctctccacacagtgctcaaggccagcttatagtcatatatatcacccagacataaaggaaaagacacattttttaggaaatgtttttaatnnnnnnnnnnnnnnnnnnnnnnttttaaagacccctaaccctttgtgtgctctccattctgctccttccccatcgttgcccccatttctgaggtgcactgggaggctccccttctatttggggcttgatgactttctttttgtagctggggctttgatgttccttccagtgtcatttctcatccacataccctgacctggccccctcagtgttgtcaccagatctgatttgtaacctactgagaggacagagagaaataagtgccctctcccaccctcttcctactggtctctctatgcctctctacagtctcgtctcttttaccctggcccctctcccttggggctctgatgaaaaattgctgactgtagctttggaaatttagctctgagaaccgtatatgattcagttctaggaaaataaaaccccgttgatt

SEQ ID NO: 19670 - DNA, 763 bp, Homo Sapiens
gcacgaggcaaccatctctgggctcagcacctgaggcgggtttcctgggtcccctctccagcaagcctccaccagcaagctcggcccagagcttcccttccggctggctctgaaccgtgcgtggtgcctacagcctgcagtctggagacaagctcttccggagtgctctgggagccaggccagggtgtgagggaggtgcagaggcatccggggcgggagcaagccccaggttgtgacaggtgcaggtagacaacgcccataaacagagatggtcctgaactctggagagatccttccctgatcctttcggacgactacttggagccataagtaacctcagcaaaaacgaggcctctgcaagccacttttccatgccaagcatccacccggcccacaggcatgtttctgccgccactccgcaagatggacagggagccagcaggcaggcgggaagggccaagtacaggcaatcaccccccatcttcttggtttgaagctttatccatgtatcatgttccgtgtagccattttattttttaagaaactgctaatactttctccctaatggaagccctgatcccccagagagctacaggtctgctcctgacgggcctcgggcctgacccgtccacacagggccgtgtcaacagcagcgactcatgggacgtgtgtacatatgtaaatgagaaatagagacgtgtcaacagatgcattcatttctcttggaatgtgtattgtttttaatttgcgaaacaaaccaaac

SEQ ID NO: 19671 - DNA, 1554 bp, Homo Sapiens
  misc_feature (878)..(891): n is a, c, g, or t
ccccacgcgtccgtgttaccggaacggcggcgacaagggtgttcccgaactagagtggatagaaaatcaagtatattttaaaagaagggatgtgggatcaaggaggacagccttggcagcagtggcccttgaaccagcaacaatggatgcagtcattccagcaccaacaggatccaagccagattgattgggctgcattggcccaagcttggattgcccaaagagaagcttcaggacagcaaagcatggtagaacaaccaccaggaatgatgccaaatggacaagatatgtctacaatggaatctggtccaaacaatcatgggaatttccaaggggattcaaacttcaacagaatgtggcaaccagaatggggaatgcatcagcaacccccacacccccctccagatcagccatggatgccaccaacaccaggcccaatggacattgttcctccttctgaagacagcaacagtcaggacagtggggaatttgcccctgacaacaggcatatatttaaccagaacaatcacaactttggtggaccacccgataattttgcagtggggccagtgaaccagtttgactatcagcatggggctgcttttggtccaccgcaaggtggatttcatcctccttattggcaaccaggacctccaggacctccagcacctccccagaatcgaagagaaaggccatcatcattcagggatcgtcagcgttcacctattgcacttcctgtgaagcaggagcctccacaaattgacgcagtaaaacgcaggactcttcccgcttggattcgcgaagtcttgaaaaaatggaacgtgaaaagcagaagaaattggagaaagaaagatggaacaacacgttcacattgtccnnnnnnnnnnnnnnggccacagaagatgctgaaggaggggatggccctcgtttacctcagagaagtaaatttgatagtgatgaggaagaagaagacactgaaaatgttgaggctgcaagtagtgggaaagtcaccagaagtccatccccagttcctcaagaagagcacagtgaccctgagatgactgaagaggagaaagagtatcaaatgatgttgctgacaaaaatgcttctaacagaaattctgctggatgtcacagatgaagaaatttattacgtagccaaagatgcacaccgcaaagcaacgaaagctcctgcaaaacagctggcacagtccagtgcactggcttccctcactggactcggtggactgggtggttatggatcaggagacagtgaagatgagaggagtgacagaggatctgagtcatctgacactgatgatgaagaattacggcatcgaatccggcaaaaacaggaagctttttggagaaaagaaaaagaacagcagctattacatgataaacagatggaagaagaaaagcagcaaacagaaagggttacaaaagagatgaatgaatttatccataaagagcaaaatagtttatcactactagaagcaagagaagcagacggtgatgtggttaatgaaaagaagagaactccaaatcctcgtgc

SEQ ID NO: 19672 - DNA, 1614 bp, Homo Sapiens
  misc_feature (1450)..(1459): n is a, c, g, or t
cccccgggctgcaggaattcggcacgaggccttagccaccggaacaaagaaccgccggcgccggcccagcagctgcagccgcagcctgtggctgtgcagggccccgagccggcccgggtcgagaaaatatttacaccagcagctccagttcataccaataaagaagatcctgctacccaaactaatttgggatttatccatgcatttgtcgctgccatatcagttattattgtatctgaattgggtgataagacattttttatagcagccatcatggcaatgcgctataaccgcctgaccgtgctggctggtgcaatgcttgccttgggactaatgacatgcttgtcagttttgtttggctatgccaccacagtcatccccagggtctatacatactatgtttcaactgtattatttgccatttttggcattagaatgcttcgggaaggcttaaagatgagccctgatgagggtcaagaggaactggaagaagttcaagctgaattaaagaagaaagatgaagaatttcaacgaaccaaacttttaaatggaccgggagatgttgaaacgggtacaagcataacagtacctcagaaaaagtggttgcattttatttcacccatttttgttcaagctcttacattaacattcttagcagaatggggtgatcgctctcaactaactacaattgtattggcagctagagaggacccctatggtgtagccgtgggtggaactgtggggcactgcctgtgcacgggattggcagtaattggaggaagaatgatagcacagaaaatctctgtcagaactgtgacaatcataggaggcatcgtttttttggcgtttgcattttctgcactatttataagccctgattctggtttttaacaagctgtttgttcatctatatttagtttaaaataggtagtattatctttctgtacatagtgtacattacaactaaaagtgatggaaaaatactgtattttgtagcactgattttgtgagtttgacccattattatgtctgagatataatcattgattctatttgtaacaaggagttttaaaagaaacctgacttctaagtgtgggtttttcttctctccaacataattatgttaatatggtcctcatttttcttttggtgcagaaccgttgtgcagtggggtctaccatgcaattttctttcagcactgacccctttttaaggaatacaaattttctccttcatcacttaggtgttttaagatgtttaccttaaagtttttcttggggaaagaatgaattaatttctatttcttaaaacatttccctgagccagtaaacagtagtttaatcattggtcttttcaaaactaggtgtttaaataaagagacatatatgatattgctgttatatcaataacatggcacaacaagaactgtctgccaggtcattcttcctcnnnnnnnnnnaattgggtaggacacccaatataaaaacagtcaatatttgacaatgtggaattaccaaattaaaagagaatactatgaatgtattcatattttttctatattgaataaacaatgtaacatagataacaatataaataaaagtggtatgaccagtg

SEQ ID NO: 19673 - DNA, 994 bp, Homo Sapiens
  misc_feature (256)..(311): n is a, c, g, or t
aaagaaggcatctgcatttttaatcgagtattactattagcccttgggtaagtatatttgtggtaaagttttaatttggaaaacaaaagtgcccataaaaaagtcaagaatttcaaatgcaacttttaatactacatatttcaagagctcccatgttcagtattcctggaaaaggaaagctctttttgtttctaagtatgaaaaattgttagcgttccttcctttggtcttcccacacccctcaccacaagaggcnnnnnnnnnnnnnnnnnnnnnnnnnnnnnnnnnnnnnnnnnnnnnnnnnnnnnnnntagtatgaaattagtttttatttttaactaaaataaatgcttaacatctttccaaaatcaaaactaaagacgaacacttagaaaaaagggtggaagtgtatttttccttccctggggaaaccagtaaggcagacattctaacgaagcttggttttttccataggactagtctatgcaacagaatctctctccagccttttctctatgtcagttttatctacctggcaagaaaaaacaaaaacaaccccaaaacaacccctccccacagacacaacacaaaacaagggacttgagaagttagagaaaacctttaacacgtttctgtaaaatcctttctgaggtggtttagtacaggtactacccatcagcaacttagcggccaggtgagttggtgcagaagcgcttcgggtgaattcataccagagccaccgggtgtgactcggctacctctcccaattaccacagggaggtcttaaaattgaatttcagtttcagcagatacttcagatttacctgagcaatatcatagacaatgtactcgttatatagtagagaggtgtcattcacaccagatgaaatcccggtcccaagaggaacgtctacaccatccagactaatgttagctgaaggatcaggggtagttttgcccaaacctttgacttttaaagcggtacccctcgtgc

SEQ ID NO: 19674 - DNA, 1356 bp, Homo Sapiens
ccccgggctgcaggaattcggcacgaggtgagacccctgcctctccccaaacattaatcaccaaagtattaatgtacagagtggcccctcacctgggcctttcctgtgccaacctgatgccccttccccaagaaggtgagtgcttgtcatggaaaatgtcctgtggtgacaggcccagtggaacagtcacccttctgggcaagggggaacaaatcacacctctgggcttcagggtatcccagacccctctcaacacccgccccccccatgtttaaactttgtgcctttgaccatctcttaggtctaatgatattttatgcaaacagttcttggacccctgaattcaatgacagggatgccaacaccttcttggcttctgggacctgtgttcttgctgagcaccctctccggtttgggttgggataacagaggcaggagtggcagctgtcccctctccctggggatatgcaacccttagagattgccccagagccccactcccggccaggcgggagatggacccctcccttgctcagtgcctcctggccggggcccctcaccccaaggggtctgtatatacatttcataaggcctgccctcccatgttgcatgcctatgtactctacgccaaagtgcagcccttcctcctgaagcctctgccctgcctccctttctgggagggcggggtgggggtgactgaatttgggcctcttgtacagttaactctcccaggtggattttgtggaggtgagaaaaggggcattgagactataaagcagtagacaatccccacataccatctgtagagttggaactgcattcttttaaagttttatatgcatatattttagggctgtagacttactttcctattttcttttccattgcttattcttgagcacaaaatgataatcaattattacatttatacttcacctttttgacttttccaagcccttttacagctcttggcattttcctcgcctaggcctgtgaggtaactgggatcgcaccttttataccagagacctgaggcagatgaaatttatttccatctaggactagaaaaacttgggtctcttaccgcgagactgagaggcagaagtcagcccgaatgcctgtcagtttcatggaggggaaacgcaaaacctgcagttcctgagtaccttctacaggcccggcccagcctaggcccggggtggccacaccacagcaagccggccccccctcttttggccttgtggataagggagagttgaccgttttcatcctggcctccttttgctgtttggatgtttccacgggtctcacttataccaaagggaaaactcttcattaaagtccgtatttcttcta

SEQ ID NO: 19675 - DNA, 1075 bp, Homo Sapiens
gcacgaggccaaaactcacagagaactgttgctgaagtccaagagaccttggcagaaatgatccgacaacaccaaaagagtcaactctgtaaatccacagcaaatggtcctgataagaatgaaccggaagtagaagcagagcagcccctctgcagttctcagagccagtgtaaagaagaaaaaaatgagccactttctctgcctgagttaaccaaaaggcttaccgaggcaaatcacgagaatggcaaaatttcctgagagcattaaggcctggcccttcccagatgtgctggagtgctgcctcgtcctgcttctcatcaggtcccactttcctggctgtctggcccaggaaatgcagcagcaggcccaagagctccttcagaaatacggcaacacgaaaacttacagaagacactgccagaccttctgtatgtgaattttcacacaccttgaagaaactgccaaattgaaaatgtttgacatctttcacctctgcagttatgcctcaccagacattcactctggtccctagatgtttttgcagtaatccaaaagaatacaaacaaggattaagtttgaatcaaccctgcctacccatagacaacggtggatctgactttagactcaattgtggtctcctactggagggaagatcatgaaaagcccacagtagttattcagaactaacacctgcagagtgttggtcatctctacagccttaggcaggtttcacccaaagaggagaaacttctgtcgtcacccaaagtgttacatgcttaaaacacaagctacctttgtaaatacttcatctgatcagaagtgtgtcatgcttgtttgagatggagttgctgcattttaggactattgatacctttttttaattgtttttataatatttaatttgaaagaggagacccctctctctctactctttcatagactgaagtttgaatatgaaataggccttaaccatcatgttgactctcctgtcaaaattttaggttggaaattggttttattctttcatgtaattgcttatttgaacagatcacttactaaagctttagaagaagtg

SEQ ID NO: 19676 - DNA, 1428 bp, Homo Sapiens
gcacgaggtatcataaagacaacaaattcaaaatccccaaagcatatatacgtttccatctaatttcaccgttgatacagaaatctgcagcaaatgtggtcctctttgatatctttgtcaatatccttacgcataaccttgcggaaccagcttatgaagcagatgtggcacagctggagtataaactggtagctggagaacatggtttaattattcgagtgaaaggatttaaccacaaactacctctactgtttcagctcattattgactacttagctgagttcaattccacaccagctgtctttacaatgataactgagcagttgaagaagacctactttaacatcctcatcaagcctgagactttggccaaagatgtacggcttttaatcttggaatatgcccgttggtctatgattgacaagtaccaggctttgatggacggcctttcccttgagtctctgctgagcttcgtcaaagaattcaaatcccagctctttgtggagggcctggtacaagggaatgtcacaagcacagaatctatggatttcctgaaatatgttgttgacaaactaaacttcaagcctctggagcaggagatgcctgtgcagttccaggtggtagagctgcccagtggccaccatctatgcaaagtgaaagctctgaacaagggtgatgccaactctgaagtcactgtgtactaccagtcaggtaccaggagtctaagagaatatacgcttatggagctgcttgtgatgcacatggaagaaccttgttttgacttccttcgaaccaagcagacccttgggtaccatgtctaccctacctgtaggaacacatccgggattctaggattttctgtcactgtggggactcaggcaaccaaatacaattctgaagttgttgataagaagatagaagagtttctttctagctttgaggagaagattgagaacctcactgaagaggcattcaacacccaggtcacagctctcatcaagctgaaggagtgtgaggatacccaccttggggaggaggtggataggaactggaatgaagtggttacacagcagtacctctttgaccgccttgcccacgagattgaagcactgaagtcattctcaaaatcagacctggtcaactggttcaaggcccatagagggccaggaagtaaaatgctcagcgttcatgttgttggatatgggaagtatgaactggaagaggatggtaccccttctagtgaggattcaaattcttcttgtgaagtgatgcagctgacctacctgccaacctctcctctgctggcagattgtatcatccccattactgatatcagggctttcacaacaacactcaaccttctcccctaccataaaatagtcaaataaataaactgcagtcacgttggcctgaagcaatgtgtatttt

SEQ ID NO: 19677 - DNA, 876 bp, Homo Sapiens
gcacgaggaggaatcaaaaacttttattcagaataagcgttagcaaaatgaaggtaggtgcctcataaatgcagggccccagagtactcagaaagggattagaaaataattacaaaaatattttgccacatattaacatgaaactacaatcactggctgtaaaatatagtcaaatgcaatcaagctgaaaagaaaaggtggaaatctccaggttatctgcccaggtggcaggaaatcgacagccccgagaacgcaagtgctgctgtgccgccaggcccagggctatgatccaaagtgacgggcagactaccggcctgcaccaccccactcaggctgcacacaagacagccagcttaggatctccgtgggctgctacctatgtcacagagggctgattaagggcttgcagtgttcccaaatagggcctccaatgagaggagtggaagctgcattacaagaaattcactggggctgcacttgactcttcaacttggcgagtctcatgaggcactcgtccctccactgcctcctggcagctaagtgctccgggtcatcagggaccttcatgcacatgtcctggttaaccttctcagcagtggccctggaaaactctggaatgggtccaaaagtctgtaggacatgttttatgccttcgctgtatctgtcgcagtagcttaacataccttctgcattgagatgcatggtttccaggggtccaatgaatgcataccgcatgcccaacccttctgacatgacaaggtccaggtcactaggagacacgattccttcctccactagcccgccaggcctcgctgatgattgcatattgcagcggttcagaacgaagccggccacctccttctggactcgcatggg

SEQ ID NO: 19678 - DNA, 1753 bp, Homo Sapiens
  misc_feature (1696)..(1704): n is a, c, g, or t
gcacgaggcgatatgtggatcaaggtgggaacaagcgtcctggggcatttgctatttacctggagccttggcatttagacatctttgaattccttgatttaaagaagaacacaggaaaggaagagcagcgtgccagagatcttttctttgctctttggattccggatctcttcatgaaacgagtggagactaatcaggactggtctttgatgtgtccaaatgagtgtcctggtctggatgaggtttggggagaggaatttgagaaactatatgcaagttatgagaaacaaggtcgtgtccgcaaagttgtaaaagctcagcagctttggtatgccatcattgagtctcagacggaaacaggcaccccgtatatgctctacaaagattcctgtaatcgaaagagcaaccagcagaacctgggaaccatcaaatgcagcaacctgtgcacagaaatagtggagtacaccagcaaagatgaggttgctgtttgtaatttggcttccctggccctgaatatgtatgtcacatcagaacacacatacgactttaagaagttggctgaagtcactaaagtcgttgtccgaaacttgaataaaattattgatataaactactatcctgtaccagaggcatgcctatcaaataaacgccatcgccccattggaattggggtacaaggtctggcagatgcttttatcctgatgagatacccttttgagagtgcagaagcccagttactgaataagcagatctttgaaactatttattatggtgctctggaagccagctgtgaccttgccaaggagcagggcccatacgaaacctatgagggctctccagttagcaaaggaattcttcagtatgatatgtggaatgttactcctacagacctatgggactggaaggttctcaaggagaagattgcaaagtatggtataagaaacagtttacttattgccccgatgcctacagcttccactgctcagatcctggggaataatgagtccattgaaccttacaccagcaacatctatactcgcagagtcttgtcaggagaatttcagattgtaaatcctcacttattgaaagatcttaccgagcggggcctatggcatgaagagatgaaaaaccagattattgcatgcaatggctctattcagagcataccagaaattcctgatgacctgaagcaactttataaaactgtgtgggaaatctctcagaaaactgttctcaagatggcagctgagagaggtgctttcattgatcaaagccaatctttgaacatccacattgctgagcctaactatggcaaactcactagtatgcacttctacggctggaagcagggtttgaagactgggatgtattatttaaggacaagaccagcagctaatccaatccagttcactctaaataaggagaagctaaaagataaagaaaaggtatcaaaagaggaagaagagaaggagaggaacacagcagccatggtgtgctctttggagaatagagatgaatgtctgatgtgtggatcctgaggaaagacttggaagagaccagcatgtcttcagtagccaaactacttcttgagcatagataggtatagtgggtttgcttgaggtggtaaggctttgctggaccctgttgcaggcaaaaggagtaattgatttaaagtactgttaatgatgttaatgannnnnnnnnaaactcatatattgggattttcaccaaaataatgctggttgcctcgtgc

SEQ ID NO: 19679 - DNA, 1102 bp, Homo Sapiens
  misc_feature (454)..(464): n is a, c, g, or t
gcacgacggatgccggaagccggactctgggcgtcatgtactacaagtttagtggcttcacgccgaagttggcgggaacatgggcttctgaggcctataacccgcctggattaaagcctgtggtttccccacaggcaccacctatcatttttgccacaccaactaaactgacctccgattccacagtgtatgattatgctgggaaaaacaaagttccagagctacaaaagtttttccagaaagctgatggtgtgcccgtctacctgaaactaggcctgcctgaccaaatgctttaccggaccaccatggcgctgactgtgggagggaccatctactgcctgatcgccctctacatggcttcgcagcccaaaaacaaatgagttaggctgcagaggactggtttgttttttggcataaaccctttgaagttcctttttcattgttaaattaaaannnnnnnnnnnacttggatggcttaacatttttgcaagaaaaataggaagatatgaagatgatgttttggtttgtttatgaaatgcatatggcttgtcagagctcattcgacagttaaagccattgtttaaagaaacggtgctttgctctgtgtttgtgctcctgatttccctggaggttctggatgaaggctgaacacaggcttgttaatgtcagtctgtgctgaggacctcagggacttgaggttgcatttttgagcatggggtgcaggagcctttctggatttggatgtggctatggaaagaacacagaagccaaggtcatgtgcatgaaatgaggagtttgagttagtcacctcggggattttttccattttgcagtaaaatgttaaattaatgtagcctgcctctatttgttgggcaggtaatttcaaagggttatttgcctcatctcctatctttagtgaaatcttatgtgtaattgtgtgtatttattccaccgtgggaacagagaatacctgtttagtgttgcactttagactggtgtctgttttgttaatgcagctgtgccacaaattctcctttatcttttaaaaatgttatagctttaaattttgatttattttgactgtggaataaatacatgaatg

SEQ ID NO: 19680 - DNA, 1145 bp, Homo Sapiens
  misc_feature (235)..(243): n is a, c, g, or t
gcacgaggctttcacaatcaattgggattggaccggaataagttaataaatttggcttatttgcttggaagtgattataccgaaggaataccaactgtgggttgtgtaaccgccatggaaattctcaatgaattccctgggcatggcctggaacctctcctaaaattctcagaatggtggcatgaagctcaaaaaaatccaaagataagacctaatcctcatgacaccaaagtgnnnnnnnnnttacggacattgcaactcacccctggctttcctaacccagctgttgccgaggcctacctcaaacccgtggtggatgactcgaagggatcctttctgtgggggaaacctgatctcgacaaaattagagaattttgtcagcggtatttcggctggaacagaacgaagacagatgaatctctgtttcctgtattaaagcaactcgatgcccagcagacacagctccgaattgattccttctttagattagcacaacaggagaaagaagatgctaaacgtattaagagccagagactaaacagagctgtgacatgtatgctaaggaaagagaaagaagcagcagccagcgaaatagaagcagtttctgttgccatggagaaagaatttgagctacttgataaggcaaaacgaaaaacccagaagagaggcataacaaataccttagaagagtcatcaagcctgaaaagaaagaggctttcagattctaaacgaaagaatacatgcggtggatttttgggggagacctgcctctcagaatcatctgatggatcttcaagtgaagatgctgaaagttcatctttaatgaatgtacaaaggagaacagctgcgaaagagccaaaaaccagtgcttcagattcgcagaactcagtgaaggaagctcccgtgaagaatggaggtgcgaccaccagcagctctagtgatagtgatgacgatggagggaaagagaagatggtcctcgtgactgccagatctgtgtttgggaagaaaagaaggaaactaagacgtgcgaggggaagaaaaaggaaaacctaattaaaaaatatgtatcctctataattagttatgacagccatttgtaatgaatttgtcgcaaagacgtaataaaattaactggtagcacggtc

SEQ ID NO: 19681 - DNA, 827 bp, Homo Sapiens
gcacgaggggacagcccgcgcccctagaacgctttgcgtcccgacgcccgcaggtcctcgcggtgcgcaccgtttgcgacttggtacttggaaaaatggacaaggattgtgaaatgaaacgcaccacactggacagccctttggggaagctggagctgtctggttgtgagcagggtctgcacgaaataaagctcctgggcaaggggacgtctgcagctgatgccgtggaggtcccagcccccgctgcggttctcggaggtccggagcccctgatgcagtgcacagcctggctgaatgcctatttccaccagcccgaggctatcgaagagttccccgtgccggctcttcaccatcccgttttccagcaagagtcgttcaccagacaggtgttatggaagctgctgaaggttgtgaaattcggagaagtgatttcttaccagcaattagcagccctggcaggcaaccccaaagccgcgcgagcagtgggaggagcaatgagaggcaatcctgtccccatcctcatcccgtgccacagagtggtctgcagcagcggagccgtgggcaactactccggaggactggccgtgaaggaatggcttctggcccatgaaggccaccggttggggaagccaggcttgggagggagctcaggtctggcaggggcctggctcaagggagcgggagctacctcgggctccccgcctgctggccgaaactgagtatgtgcagtaggatggatgtttgagcgacacacacgtgtaacactgcatcggatgcggggcgtggaggcaccgctgtattaaaggaagtggcagtgtcctgggaaa

SEQ ID NO: 19682 - DNA, 1630 bp, Homo Sapiens
gcacgaggcgggcgggtacggctatgggcgaggcggaggcgccttctttcgaaatgacctggagcagcacgacgagcagtggctactgcagccaagaggactcggactcggagctcgagcagtacttcaccgcgcgaacctcgctagctcgcaggccgcgccgggaccaggacgagcctgtggagtgggagacacctgacctttctcaagctgagattgagcagaagatcaaggagtacaatgcccagatcaacagcaacctcttcatgagcttgaacaaggacggttcttacacaggcttcatcaaggttcagctgaagctggtgcgccctgtctctgtgccctccagcaagaagccaccctccttgcaggatgcccggcggggcccaggacggggcacaagtgtcaggcgccgcacttccttttacctgcccaaggatgctgtcaagcacctgcatgtgctgtcacgcacaagggcacgtgaagtcattgaggccctgctgcgaaagttcttggtggtggatgacccccgcaagtttgcactctttgagcgcgctgagcgtcacggccaagtgtacttgcggaagctgttggatgatgagcagcccctgcggctgcggctcctggcagggcccagtgacaaggccctgagctttgtcctgaaggaaaatgactctggggaggtgaactgggacgccttcagcatgcctgaactacataacttcctacgtatcctgcagcgggaggaggaggagcacctccgccagatcctgcagaagtactcctattgccgccagaagatccaagaggccctgcacgcctgcccccttgggtgacctcttgtacccccaggtggaaggcagacagcaggcagcgccaagtgcgtgccgtgtgagtgtgacagggccagtggggcctgtggaatgagtgtgcatggaggccctcctgtgctgggggaatgagcccagagaacagcgaagtagcttgctccctgtgtccacctgtgggtgtagccaggtatggctctgcacccctctgccctcattactgggccttagtgggccagggctgccctgagaagctgctccaggcctgcagcaggagtggtgcagacagaagtctcctcaatttttgtctcagaagtgaaaatcttggagaccctgcaaacagaacagggtcatgtttgcaggggtgacggccctcatctatgaggaaaggttttggatcttgaatgtggtctcaggatatccttatcagagctaagggtgggtgctcagaataaggcaggcattgaggaagagtcttggtttctctctacagtgccaactcctcacacaccctgaggtcagggagtgctggctcacagtacagcatgtgccttaatgcttcatatgaggaggatgtccctgggccagggtctgtgtgaatgtgggcactggcccaaggttcataccttatttgctaatcaaagccagggtctctccctcaggtgttttttatgaagtgcgtgaatgtatgtaatgtgtggtggcctcagctgaatgcctcctgtggggaaaggggttggggtgacagtcatcatcaggccctggggcctgagagaattggctcaataaagatttcagatcct

SEQ ID NO: 19683 - DNA, 1014 bp, Homo Sapiens
ccacgcgtccgactttatataaagtgtggttctctatttagcaatataaaatatagaaccacactttatataaagtagtttttgcatttgtttattgaatgatgcatcttcttcggtgaaatatttatatgcataaatggcaaaggaaagaaataatatatatttttatgtcattgagcaatattttttaatgtgtacctgtcttatggaagaaatatgcaggtatataagaccacgattttctaaagtgcatattagaatttttgtttttgtaaatggttaaatacatttcctgggtaacttaggaaattaagtttttcataaggcaacagatggttaaactgattgtcatgaatacccaaagatcatgtatataatcgaagtgtattagtaccatcccaaggtttttttctcatttaacacatttgtttcataattcagcaagtacagatgcaagcgcattgcacactttttcctttctaaacttaaagacaagtcaaaaagccattcttagaactagaggatttaagagggtaggaattagggtttgtatatatgtatatatgggacattttatcttctggcccaaagtcagaactttataaaaatcttgagtttgttcactaatgtgaaataagctatgtgtccagggtattgctcccctgagtgtatatgagtgctgagtagtattgcagagaatgtgatgagttattcactgtcacaactttttctatagaaaacaggggctgctttttaaactctcactatgggcactttaccaaaatacttccatatcaattatttgaactcggtagttgtttgacctagttagatgtggtgtttattcaagtttgtatgaaatcatgtttgacaatactgtaaattaggttaattttgtaagtcttagcatcatcatattgtgctgttttggataacacgtttgttacaagcatttaaactgtttcatttggtagtacctttacattgaaataaattgtgtttgtgcctccaaac

SEQ ID NO: 19684 - DNA, 442 bp, Homo Sapiens
ttttaatttaatccttctgtagaaacaggcattcagaaccattccattgatcttaataaagctgctctttactgtttctagtcaaaaatgagacttcgatcaaaccataagattttatactgcagatagtcagcttcaccaaagccgcagaggaaacatgtcgagatcaggcttcctgcttgatagtctcttgactaccattaaaacgaatattgggaggtcatgaaagtcattggtaggccattagcattgatatctttaaaacatctaccctaaaccatctgctatggacccataataagaggccctgttgtatatgaaattgtctagaattcaggtgcaggtctttgccgggttaattaaggggagcaacacgtaaaatgggagaggagtggggtgtactcacttgcctcctctttttgtcctgatttaaccagcattt

SEQ ID NO: 19685 - DNA, 863 bp, Homo Sapiens
  misc_feature (724)..(734): n is a, c, g, or t
gcacgaggttggagttggaaggaaagaaatggagagtggagtaccaagaggacaggaatgaccttgtgatttcagagactgagctgaaacaagtggcttacattttcaaatgcgaaaaatcaactattcagataaaagggaaagtaaactccattataattgacaactgtaaaaaactcggcctggtgtttgacaatgtggtgggcattgtggaagtgatcaactcccaggacattcaaatccaggtaatggggagagtgccaacaatttccattaataagacagaaggttgccacatatacctcagtgaagatgcattagactgtgagatcgtgagcgccaagtcatctgaaatgaacatacttatccctcaggatggtgattatagagaatttcccattcctgaacagttcaagacagcatgggatggatccaagttaatcactgaacctgcagaaattatggcctaacttcctgagagaccgaaccccctcacctgaatccccctctatcaaacaaacaaaaaagcagcagtaaagagctagaagttgcagtagcccctactgctttagctttggcctccaacgattctgtgctatagatacagcactgtttctggcacgcctcgtgggcattttgaaatatttaacgtttcctcatgatttgcctttgtgtgtgattttagttccacatgatgacttgtgaacattagggatttaaaggnnnnnnnnnnngaattctgttcccctcatatcatgaacacagtaactgataggtaaaaagactgcatgattcacttttacacttatatttcattgctagttaaaaaataaaacctttgagaatctaagatgtacattttt

SEQ ID NO: 19686 - DNA, 757 bp, Homo Sapiens
cgcacgaggcgggggcgtcgctgcgcggctggccggtgaggccgcggcatggggcgagtgcagctcttcgagatcagcctgagccacggccgcgtcgtctacagccccggggagccgttggctgggaccgtgcgcgtgcgcctgggggcaccgctgccgttccgagccatccgggtgacctgcataggttcctgcggggtctccaacaagtgcagcctcgtgttctatatcttgagccccttgaacctgaacagcatcccagacattgagcaacccaacgtggcctctgccaccaagaagttctcctacaagctggtgaagacgggcagcgtggtcctcacagccagcactgatctccgcggctatgtggtggggcaggcactgcagctgcatgccgacgttgagaaccagtcaggcaaggacaccagccctgtggtggccagtctgctgcagaaagtgtcctataaggccaagcgctggatccacgacgtacggaccattgcggaggtggagggtgcgggcgtcaaggcctggcggcgggcgcagtggcacgagcagatcctggtgcctgccttgccccagtcggccctgccgggctgcagcctcatccacatcgactactacttacaggtctctctgaaggcgccggaagctactgtgaccctcccggtcttcattggcaatattgctgtgaaccatgccccagtgagcctccggccaggcctggggctgcctcctggggcccaacccctggtgg

SEQ ID NO: 19687 - DNA, 1245 bp, Homo Sapiens
  misc_feature (879)..(893): n is a, c, g, or t
gcacgaggcaccagtgccggggtctggtctcaggacaagtggaaggggaagtttgatgtccagtggatctttgttaaggatgtacccaataaccagctccggcacatcaggctggagaataacgacaacaaaccggtcacaaactcccgggacacccaggaggtgcccttagaaaaagccaagcaagtgctgaaaattatcagttcctacaagcacacaacctccatcttcgacgactttgctcactacgagaagcgccaggaggaggaggaggtggtgcgcaaggaacggcagagtcgaaacaaacaatgagggcgaaccagtttcttacatgttctaacgtttgactttgaaaacagtttaaaacacgtgtgcttggtcagctccagtgtgtcgtcccgtgcgggggttgagtgttgcatctttgcctttcttgtcgttgatttttgcccagatggatctgcatttatttgtactttttctatgtattataatcctgtagaagtcactaataaaggagtattttttttgtcagcttatcaatcagactgatctaatgtgaaatgtaagtatccttaaaaacaaagcatctattttggcagaaattgtgttcttaaattcagtcatttgatattctgtgagacttcatatttctcatccctttattgctttttagcaaacataagaaaccatgagtcattttgtcatttagagtattctgataaaatctcttgaaaatactgaaatcaaaaggttaatgattttttgttcattctgatttgtcattttattatctgttatcggtctaaagtgctaatttacccatttgatttttctgctagacagataacttttaatttttcaaatttggcagacacnnnnnnnnnnnnnnngaaaatctttccttccagatctgttgcccactgaacagccacccgtccctcactgtcctggtgtccgattgggctggatggtgttggggcatgatgtgtggaggaactggaaggtgctttaggtctggttcagggtcgggcattctttgtttgtttgcacatctttttaaattttacaccttttcttaagaattctaatgccgtcttaagtttttataccaatatgctgagctttaagtgtagggatctggtagtacagacagtgtgatgggatgatgctgctggttgtaatttcatcgtgtgtgtctaatttttttcctgttgaatgggtaaaaacaaaacaacctttttt

SEQ ID NO: 19688 - DNA, 896 bp, Homo Sapiens
gcacgaggattgtaaattacatattaaatattttatctgcttttacaagcgcaaggtgcaaaaatatatacaatagtctcattgatgactgtaaagtgaattaacatttggtgattatgcctagcttttttgactaatataaagatcatagctccccttcacttctgtcttaacttgaacatggcgtgtttaaattttcatacatactttacttgaattattgctgttgtcacatatttttgcctctgtgagttcatctgatgattgagcagtagcatttgccttttgggttttttgtttgttattatagaagagatgacttctgctgattttgctttagaatggttaccttagaagaatttgggtggctcatgttgaatttcacttctgcaatagctttcattttctcataggctttataagagatgggttcagtggtatgagcagaggaagagatcccagatagtagccagttaaccaagactcattcatatagcacgtagtttatgttcctgaggcagcacttttagatcctttgtgagcaagttctatttgttcattgcttgccagagatgaacacagaatgttctgtttcattttacaagaactatcctgagtttctgtggatggaaacattacatgtaatgcagatatagtgaacactggaaagatttattaaagaattatatttgtgtatactttataaattagtccctcattagattttttttcttaagcataagactgaacttaaatgtgttaattttagtagaatcaggcactgctcgcagaaggaacacagattgtagagattaacataaattgttcttgttctaatatatatattttttcatttctgtcgtgcttggaaaactagtaaatattatgtctaagat

SEQ ID NO: 19689 - DNA, 328 bp, Homo Sapiens
ccctataaaagatcccccgggctgcaggaattcggcacgagggagaattccagccctgtgggaactggtgtcttataaccaagttggatacctgtgtatagcttcccaccttccatgagtgcagcacacaggtagtgctggaaaaacgcatcagtttctgattcttggccatatcctaacatgcaagggccaagcaaaggcttcaaggctctgagccccagggcagaggggaatggcaaaatgtaggtcctcgcaggagctcttcttcccactctgggggtttctatcactgtgacaacactaagataataaaccaaaacactacctg

SEQ ID NO: 19690 - DNA, 1411 bp, Homo Sapiens
gcacgaggcgcaaagcctgagtcctgtcctttctctctccccggacagcatgagcttcaccactcgctccaccttctccaccaactaccggtccctgggctctgtccaggcgcccagctacggcgcccggccggtcagcagcgcggccagcgtctatgcaggcgctgggggctctggttcccggatctccgtgtcccgctccaccagcttcaggggcggcatggggtccgggggcctggccaccgggatagccgggggtctggcaggaatgggaggcatccagaacgagaaggagaccatgcaaagcctgaacgaccgcctggcctcttacctggacagagtgaggagcctggagaccgagaaccggaggctggagagcaaaatccgggagcacttggagaagaagggaccccaggtcagagactggagccattacttcaagatcatcgaggacctgagggctcagatcttcgcaaatactgtggacaatgcccgcatcgttctgcagattgacaatgcccgtcttgctgctgatgactttagagtcaagtatgagacagagctggccatgcgccagtctgtggagaacgacatccatgggctccgcaaggtcattgatgacaccaatatcacacgactgcagctggagacagagatcgaggctctcaaggaggagctgctcttcatgaagaagaaccacgaagaggaagtaaaaggcctacaagcccagattgccagctctgggttgaccgtggaggtagatgcccccaaatctcaggacctcgccaagatcatggcagacatccgggcccaatatgacgagctggctcggaagaaccgagaggagctagacaagtactggtctcagcagattgaggagagcaccacagtggtcaccacacagtctgctgaggttggagctgctgagacgacgctcacagagctgagacgtacagtccagtccttggagatcgacctggactccatgagaaatctgaaggccagcttggagaacagcctgagggaggtggaggcccgctacgccctacagatggagcagctcaacgggatcctgctgcaccttgagtcagagctggcacagacccgggcagagggacagcgccaggcccaggagtatgaggccctgctgaacatcaaggtcaagctggaggctgagatcgccacctaccgccgcctgctggaagatggcgaggactttaatcttggtgatgccttggacagcagcaactccatgcaaaccatccaaaagaccaccacccgccggatagtggatggcaaagtggtgtctgagaccaatgacaccaaagttctgaggcattaagccagcagaagcagggtaccctttggggagcaggaggccaataaaaagttcagagttcaaacctcgtgc

SEQ ID NO: 19691 - DNA, 1110 bp, Homo Sapiens
gcacgaggatcacaaggagagggttccgggctgagtactactccagtccctccaatgacagcaccaacctgctctgtctgccaaatcacatgcaagccagtgtgagcaggagctatctccaatccttgggcttttctgccagtgaccttgtcatttccacctggaatggatactacgagtgtcggccccagataacgccgaacctggtgatattcacaattccctactcaggctgcggcaccttcaagcaggcagacaatgacaccatcgactattccaacttcctcacagcagctgtctcaggtggcatcatcaagaggaggacagacctccgtattcacgtcagctgcagaatgcttcagaacacctgggtcgacaccatgtacattgctaatgacaccatccacgttgctaataacaccatccaggtcgaggaagtccagtatggcaattttgacgtgaacatttccttttatacttcctcatctttcttgtatcctgtgaccagccgcccttactacgtggacctgaaccaggacttgtacgttcaggctgaaatcctccattctgatgctgtactgaccttgtttgtggacacctgcgtggcatcaccatactccaatgacttcacgtctttgacttatgatctaatccggagtggatgcgtgagggatgacacctacggaccctactcctcgccatctcttcgcattgcccgcttccggttcagggccttccacttcctgaaccgcttcccctccgtgtacctgcgttgtaaaatggtggtgtgcagagcgtatgacccctcttcccgctgctaccgaggctgtgtgttgaggtcgaagagggatgtgggctcctaccaggaaaaggtggacgtcgtcctgggtcccatccagctgcagacccccccacgccgagaagaggagcctcggtaggtggtcgctctcagaccccactgtccaccggggcgcagacccctgactcggggacttgggatgttcctcttggtgtcatattccaactcagattgagccctacattgtgctgcacctggtcatacggagttgaatcagacctggttcccgcctccccaaggctcatggtcct

SEQ ID NO: 19692 - DNA, 796 bp, Homo Sapiens
gcacgagggccagtggcatctgtgacaacttgcttacctgcgtcatgcgggcctgggaccgcagcaagcccctgctcttctgcccggccatgaacaccgccatgtgggagcacccgatcacagcgcagcaggtagaccagctcaaggcctttggctatgtcgagatcccctgtgtggccaagaagctggtgtgcggagatgaaggtctcggggccatggctgaagtggggaccatcgtggacaaagtgaaagaagtcctcttccagcacagtggcttccagcagagttgacctgggatttctgtcatgggtgtccctctgtactcagaatgggttcaggccaagtcggtgaagatggatgttggcaaaataggaggataccctcatttgctgaatgggggacctgctctgagcctgcccaggggccaggcctgctccaggttaaactggacggaaggcccaggtctcagtttctttcaaccaggagaggccgctgcctagagcccctccccaccttttcctggatgggtgaggcaagccaggagagcaagcagtgttgtcctcacgggaggaggactgagcgactgggaaaactcggctctacatctcacccagaacggcttttagaaacaccacagctggagagtcctggctgagccttgggagtttcagctctttggcggggtgcccaggtgccatgcgatcagcgaagcctgcgagttggcaggactctgaggtttcctgcagaccatgccatgagattgaaggtgcggggaaataaagaaaaatcaccatta

SEQ ID NO: 19693 - DNA, 1147 bp, Homo Sapiens
ccccgggctgcaggaattcggcacgaggacattggcaaggatcgcaaaaacccaagggaggattatctggatgtctatgtgtttggggtcgggcctttggtgaaccaagtgaacatcaatgctttggcttccaagaaagacaatgagcaacatgtgttcaaagtcaaggatatggaaaacctggaagatgttttctaccaaatgatcgatgaaagccagtctctgagtctctgtggcatggtttgggaacacaggaagggtaccgattaccacaagcaaccatggcaggccaagatctcagtcattcgcccttcaaagggacacgagagctgtatgggggctgtggtgtctgagtactttgtgctgacagcagcacattgtttcactgtggatgacaaggaacactcaatcaaggtcagcgtaggaggggagaagcgggacctggagatagaagtagtcctatttcaccccaactacaacattaatgggaaaaaagaagcaggaattcctgaattttatgactatgacgttgccctgatcaagctcaagaataagctgaaatatggccagactatcaggcccatttgtctcccctgcaccgagggaacaactcgagctttgaggcttcctccaactaccacttgccagcaacaaaaggaagagctgctccctgcacaggatatcaaagctctgtttgtgtctgaggaggagaaaaagctgactcggaaggaggtctacatcaagaatggggataagaaaggcagctgtgagagagatgctcaatatgccccaggctatgacaaagtcaaggacatctcagaggtggtcacccctcggttcctttgtactggaggagtgagtccctatgctgaccccaatacttgcagaggtgattctggcggccccttgatagttcacaagagaagtcgtttcattcaagttggtgtaatcagctggggagtagtggatgtctgcaaaaaccagaagcggcaaaagcaggtacctgctcacgcccgagactttcacatcaacctctttcaagtgctgccctggctgaggagaaactccaagatgaggatttgggttttctataaggggtttcctgctggacaggggcgtgggattgaaataaaacagctgcgacaac

SEQ ID NO: 19694 - DNA, 1751 bp, Homo Sapiens
gcacgaggctatgctatgaacactatgggatcaggctgcccaagaaggggaagcctgagccaaaccatgagtggacattattggcagcggtggtgaagatacaatctccagctgacaaggcctgcgacacccctgataagccggtgcaagtgacaaaggaagttgtgtcaatgggaacaggaacaaaatgcataggacagtccaaaatgaggaagaacggagacatcctcaatgatagccatgctgaggtcatagccagaaggagtttccaaaggtaccttctccaccaactccagttggcagccaccctgaaagaggatagcatctttgtcccaggaactcaaaaaggagtgtggaaacttagacgagacctcatttttgtgtttttctccagccatacaccctgtggggatgcctccatcattccgatgcttgagtttgaagatcagccttgctgtcctgtcttcagaaattgggcccacaactcatcagtagaagccagtagtaacctggaagctcctggaaatgaaagaaaatgtgaagaccctgacagtcctgtaaccaaaaagatgaggcttgagcctgggactgcagccagggaggtcaccaacggagcagctcaccatcagagttttggcaagcagaaaagtggcccaatctcaccaggcatccacagctgtgatctcactgtagagggactggctactgtcaccagaatagcccctggtagtgccaaagtgatagacgtttatagaactggagccaagtgtgtacctggagaagctggagactccggaaagccgggtgctgcgtttcaccaggtggggctgctccgagtgaagccaggccgtggagacagaacacgctccatgtcctgtagtgacaagatggcccgatggaacgtcctcggatgccaaggggcactgttgatgcacttgctggaagagcccatctacctgtcagctgtggtcattgggaagtgcccatacagccaggaagccatgcagagagcactgattggaaggtgtcagaatgtgtctgctttaccaaaaggcttcggagttcaagaattaaaaatactgcagtcagatttactatttgaacagagccgcagtgcggtgcaggcaaaaagggctgatagcccaggtcgacttgttccttgtggggcagccatcagctggagtgcagttcctgagcagcctttggatgttactgccaatggctttccacagggaacaacaaagaaaacaattggaagccttcaggcaagatcccaaatcagcaaagtggaactcttcagatcattccagaagctgctaagcagaattgcaagggacaagtggccacactccctcagggtgcagaagctggatacctaccaggagtacaaggaggctgcgtcctcttaccaggaagcctggagcacactccggaagcaggtgtttggatcctggatcagaaacccaccggattatcaccagttcaagtgagaaggaaatgtttgctctggtagcaggacccttcatcctgaactgccttcctccacgcaggacaagtcttagcttttttggtagttaaatcagggaacattctttctgagctttgcatctctgttgtgtaatacagatggaatctggaacttagagcaagctatacttgattgaagtagctctctgctaaaatggcatctcactaatgacctcactatctgacttccattgtgttttattgcttctctaaaatatgaaatc

SEQ ID NO: 19695 - DNA, 1483 bp, Homo Sapiens
  misc_feature (973)..(995): n is a, c, g, or t
  misc_feature (1027)..(1036): n is a, c, g, or t
  misc_feature (1080)..(1128): n is a, c, g, or t
gcacgaggcttaaacctgcttgcttcctaccacagattctttattttcccaaacactacaaaaaaacttttaaaactttgccatttcatctgtttacactctttgccactgattagcagtatttaaatcttgcaagaatattttgtgctttctttagaaacacaagagtatagatttttctcactgaaaagtgagagttacgcattgcagccatgaagggatgctaggatcaattatggcagtaccttttttcccctcctgttcttgagccagttgtctcttttgttttgggtcccacttaggattaacggatgtaaggtattttcctgtgcctttattttgtgtcattctattggaaggaggtgtaacggcagaatagcatcgtgttgggggttttccttcaaacactgcaagtgatattgccaccatgtgaacctcaaatatgcaatccagttgtgttggtttctcggtgacttggagtgttcatctcttcatgaattgtgagcactgaccatgttcttcagttcttaattatggtgagttgacaaataccaactactgcttttctttaggtggctataaatttcttactgtcaggaggaaatgacattatattctgttccactgaacgtcagagatcagcaggcactgtactgggtagagaagtgcctatacttctctacctaagagggcaggagggaaaccctacagctccttgtgagcctatatattagtatatcggcctggagaggacaagggaataagaccactcatagtgaggctggccaagctgcactggtcggaccaggcagtggctgacctaaggaagacaacttgctttgcttaaaagtagattttttaagcaatgcttaacacaggcagcattcacctttgttcaggccatcgacatgtattgttaaaattactgcatatccccctcagatatcaagtatacactgttcatgttggggtnnnnnnnnnnnnnnnnnnnnnnnacgcacgcatgtgtcccaaatcttgttttaannnnnnnnnnctgaatgtgatcatgttttggatgatacctgagcagggttgccnnnnnnnnnnnnnnnnnnnnnnnnnnnnnnnnnnnnnnnnnnnnnnnnngctttcttataactttggaggaaagtcaaatcttggtattattaaaattgttttaaaaaggagtaaattttccagttgataaatgaaaatcactggcctatgtttaataagtttttctttaattactgtggaataacgtgccagctatcatcaacacaatgattttgtacatagggtagggaagcagtgatgctctcaatgggagatgtgcaacacaaattaagggggaactccatgtattttacctacttcagcaatggaactgcaaacttgggggctttgtgaataaaatttaactgccttgtatagtcgtttgaaagaatatgtgatctgtgagaaaattatagtttttttt

SEQ ID NO: 19696 - DNA, 1046 bp, Homo Sapiens
  misc_feature (327)..(337): n is a, c, g, or t
gcacgaggcagaatcagaaaggctggaaggtgggcttcacactcaggattgtgctttgagaaccagctaatagaccagccgagggaaggttgaattggctgtctttacttttcccgataagccctacttaaatgcagcctgtaattgtataaaggagatgagaaacatcaagagaaatgacatacatgtagctctggggtagcaagaactagacttcctcaatttggattccatttccttctgccatttgcttttaggcaattgagtgtgggtagtgatgagatatcaaatcccttagtgtttccattttgggaaatgaggcactannnnnnnnnnnaaaagacaacttacccacctgagtcctgaaacagtttgtctctccagttttctggcctatactctagttagctctgatccaagtttacaggacaacagccttgctttaagccatgtcctgttgtgggcacgataatagcaactgagctgtcacagcctaccagcaggctggtaacacctccagggtctcttggctagagcagatttcttagcagctgactaggacttcagtcattgggaagcctatgaggcctttacatttttggtgtgagatggggaagaaacataaaatgccactttacaacttcaataatagcctgtaatttatatttactgtgtgaatttttagtcctatattttaataatttgtaaattgatctcttattccaagaatcctttgaacttgtagaacatctgggagtccacttccctgtcctcttcctgatccctgctttctggactgtttaaatcctctttgggatggatcagagagtctagagaggccactcataggtccagctgctggcctcctgactctccaaagccttcactggaattgggacatttgctccagccctagctgtgaacatgaccagagacattatttataattcagccatttaagatatacctgtactcaaaaagtcctgtatatttttaaaaagttttatttttcaggtgaacaaaaatacatcctaagaactctgcct

SEQ ID NO: 19697 - DNA, 1127 bp, Homo Sapiens
gcacgaggcattgttatattacaaacagacttgcatgattaaccagttgttacacttactttttcaagttggagtatatatgactcagtgcagactggtctctcttatgtgaatgcacacatgcagaaatgcagagtcaattttacatgcccataaagacatttgtaaagaattcagctcttatggtctgttgtataaatgtgtatctaggcactttattataactggaatttgacctcacagatgttacaacttgatcagtcgtttgacctaatttgtggtagctatctgtatgttttgcaatcttaatacagacatgctttccaaaaagattaatacagaaccatcctgccgttttggataagtctatccagctgtggaaagggcaacctgtggtttctctgtactggtgtttaatgggggaagaatatgaacagctttaaagagctgtgtattgtggttactactattaaaaaataagatctgcacgagtctgactggcctttgggtggcctttgtggacggctcgtagctggaaagtgttgatctgggttttctggcattcttttaagttaaaaagttaacatcgggacatgggtttgatcttttgttgtacctgatgacagtgcagagattctccacagctggataaaaatgtcacaaagctacttactgtacatgggcagtatcagatttcaaatcctaatatttcagctgtgcttttaatactcaaaatattaggggatggggtgttgaagctttcccttttttgcttttaacaatttatagaatttaacagatgtactgtctttcatgtggcctcacatttaaagttatgagaacatacacatggtttacaacttttactatatacctttccttggccaccaagtattttaaaagtgtgccaccttttaacctttactttttttaagttgaaggtgatactttttctatatatgatgaaactcatgtcaactgaagtgagtgtaatctcagatatcaacattattatattttaaaatcacgctatggaaatatcacctgaattctgtcatttgtcagatttacagtacctttttttctttaacttttagcattaaataaaaataaaattgggagcactg

SEQ ID NO: 19698 - DNA, 2053 bp, Homo Sapiens
  misc_feature (1403)..(1461): n is a, c, g, or t
  misc_feature (1689)..(1698): n is a, c, g, or t
gcacgaggagcgcttccatcctaaagccataatgaaaatatcttcctctcttccccattctatacaaaatactaagtggttttcttgctcccactccctaccccttagttaaatagggtttattttccactcatgcccttatgcctttttttcttatagttttttaacttattgactgtgcatgacccagtggtttgaattgtttttagttcaagtcattggtaaaaactaggtttaaggagatgagctactgtttaaagtgagctggcctgcctaattaattccttgtgaaaactaaatgattttttcagtttggggatcattctcacaacataactatgcatgtagaggacaagatttattttcttttctccctttgcccagtagccacatctggtttactcaggcagcatctactaagaaattcagcacctgcatatctctgtgacatggtcacttagagcttatcttccctatgaatctccagatctgtgagtcgagcagatttcatgttgcagattcacctttaatgcaaagactgtattatcctcacatgactttttttcttgtcttactgtaccttaaaaggtgatagagtaattctgtattttctaacgggaagattcaaaggagctgaatgtgttatgcttccaaacaactgaatgtaaaacactcctagccagttgttgcattccctatatttatttacttccaatattttactgtaaaagtagggagaaatattatgttgatagttgtttcatattctctcaggaactttaatgttcccgactcgggtgattccagctgtgttgctggcagtgttgtctcaaccctctccctaaaatgactgagccctgggttcatctaatgtggttttccttaggaagagatagaaggcacagaagatcacagctagagaattgagaattaactatactactagccattttagggcaccaaaacttgggattaaacacttcctacttcccactcccaactcctgaaatgaagtcttgctatctgtgactagttttatttttgtgcttttaatagtccgagcagtcttaccttgtttacacatgtattgacaccatttgcttcaggccatggagcactgtttctccctttttactatttataggattccgttttttcacaagacttttaataaaaagaaattgtagaaataaacacattaaaatttgcccagctgtcgtctaagccctcttgattgacttgcccaagtggcaatagagttctaatatctataataaagggagatttgctattattagtggaatgttgaccccgtatgtagagaaacagtacgtgcctttgcctctttatgcacacagagacccagggtgagggagtatttgttcccagtttttaagatagtnnnnnnnnnnnnnnnnnnnnnnnnnnnnnnnnnnnnnnnnnnnnnnnnnnnnnnnnnnngatattccacaggacatgccactttattataaaacctgacacaggcatagtaccaagtatttcctgcattgttgctaaaattgttttattgtagctccacattctggtgtagtttaaaatgcctttgggggcagtttgaagcagttcttcatgccacttagtttgaaaataaaattctagatatgcaaatgattttcttagaaaacttcacaaaataaaagatcttgnnnnnnnnnnccatagcacagtaatgaatgtggttatcaatcacatacttttttggattatattgtagcaaaaagttgattagcttaccaagattattaatagcaatgtatgtgttataatacaacttagtacattaaagctacgaaaactcatccctggctgtaggatagtaataaaggaagaattatgacttcattatgaacaaagaagttttaaagttttcaattaccgagcaatttggaagaaaaaccctaaggtgcttttcaaagagtaactgaaattgttgcaggccaaacagccatatgatatctcaaatttagttcataagacagtgaacttttggttcactattaattctgagtaa

SEQ ID NO: 19699 - DNA, 643 bp, Homo Sapiens
taaaggaaattggctttgactatgaaaaacagccattttcaacctttttataaaacctcttcagggaatattggaatattatttttgtcaggcaaaaataatccagggcttgagcattgctgtagaatatgttatctgttcaaaacttagcagagcacgcatgcatcacatgcattgtcatcagtatttgagagctgaaccaatggtttttgatggttgccgtaacagaagatctgtgaagaggatggtggtttgcacctgttcctgaagtcaaactggaaaaggttgcaggtatttcaattttctcaatcattttgcataaatgtattaatattttgagtagtaatagttctaaacctgcaggaaggcatcattgtatactgtggtatgtagagaatactacttttacactgctctttatcttaaaatgttttggtatactgtgaatattttcctctaagtatttggtgtattttgacagttattaaaggagaatataaaattaaagattctggtctaaactaagaataatggaaagttgcttcgtcctgccttagaggagttttcagttcatcctcttcttgagaaactatgtgttgctgttactaaataaacatttactcaataaacgttttatttcctc

SEQ ID NO: 19700 - DNA, 900 bp, Homo Sapiens
gcacgagggaactttaaaaaagcaaatttcatgcactgattaaaataggattattttaaatacaaaaggcattttatatgaattataaactgaagagcttaaagatagttacaaaatacaaaagttcaacctcttacaataagctaaacgcaatgtcatttttaaaaagaaggacttagggtgtcgttttcacatatgacaatgttgcatttatgatgcagtttcaagtaccaaaacgttgaattgatgatgcagttttcatatatcgagatgttcgctcgtgcagtactgttggttaaatgacaatttatgtggattttgcatgtaatacacagtgagacacagtaattttatctaaattacagtgcagtttagttaatctattaatactgactcagtgtctgcctttaaatataaatgatatgttgaaaacttaaggaagcaaatgctacatatatgcaatataaaatagtaatgtgatgctgatgctgttaaccaaagggcagaataaataagcaaaatgccaaaaggggtcttaattgaaatgaaaatttaattttgtttttaaaatattgtttatctttatttattttgtggtaatatagtaagtttttttagaagacaattttcataacttgataaattatagttttgtttgttagaaaagttgctcttaaaagatgtaaatagatgacaaacgatgtaaataattttgtaagaggcttcaaaatgtttatacgtggaaacacacctacatgaaaagcagaaatcggttgctgttttgcttctttttccctcttatttttgtattgtggtcatttcctatgcaaataatggagcaaacagctgtatagttgtagaattttttgagagaatgagatgtttatatattaacgacaa

SEQ ID NO: 19701 - DNA, 921 bp, Homo Sapiens
gcacgaggcctcctccctccccaagatggcgtccttgctgcagtcggaccgggttctctatctagtccagggagaaaagaaggttcgggccccgctctcgcaactctacttctgccgctattgtagcgaactgcggtcgctggaatgtgtgtctcacgaggtggactcccattattgtcccagttgtttagaaaatatgccatcggctgaagccaaactaaaaaagaatagatgtgccaattgttttgactgtcctggctgcatgcacaccctctctactcgggccacgagcatctccacacagcttccagatgacccagccaagaccaccatgaagaaagcctattacctggcatgtggattttgtcgctggacgtctagagatgtgggcatggcagacaaatctgtagctagtggcggttggcaggaacctgaaaatcctcacacacaacggatgaacaaattgattgaatattaccagcagcttgctcagaaagagaaggttgagcgagatcgcaagaaactggcacgacgtagaaactatatgcctctggctttttcggacaaatatggtcttggaaccaggcttcagcgaccacgagctggtgcatccatcagtacccttgccggactttcccttaaagaaggagaggatcagaaagagataaagattgagccagctcaggctgtggatgaagtggaacctctacctgaagactattatacaagaccagtaaatttaacagaggtaacaacccttcagcagcgtctgttacagcctgacttccagccagtctgtgcttcacagctctatcctcgccacaaacatcttctgatcaaacggtccctgcgctgccgtaaatgtgaacataatttgagcaagccagaatttaacccaacgtcaatcaaattcaaaatcca

SEQ ID NO: 19702 - DNA, 907 bp, Homo Sapiens
  misc_feature (129)..(160): n is a, c, g, or t
cacaaaaagcatgaacttgtattatcctatataatagattgatcatgcaccatatcacaggaggttgaaaacccatgccattttctgaatttaagggtgttgcattatttcatcaatcatttgttgacnnnnnnnnnnnnnnnnnnnnnnnnnnnnnnnngtgaaccttcaggtattgagtaacacctttatcttggtatagaactgatacttttttttgattttgaaatatctgataataatttggaatgaagtaaggttctgttaaaatatatttgaagaccctttaaagcagtgaatctgaaacaattttcacacccttaagtggttgatacgtacctattttaggtattttgaggtatttaccataaactaaatttagaaattttttagattcacttgaagtaaacattacaaacattggatacggtggggttttctttagattttacttgagagaaggtgagtacaaagcaatttgcagttgttgtaatgacaagattactgcgcaagtgtgaatccaaacagtatagcttttaaattttaaagcatttggtaaattatcgctgagtttttttctgttgccaatagcaaactgcttttccattaatggagaattcatgcctttcaagcattttaaatatgacaatatttataaatgtatggtttggaggaatcgtttaaattctctttcctaattttctttcttttgaagatagattctttcaacaagtaatttgtagtaatgactgtgttgacttcaattttggagcgcagtagctatgttaaagatgaactatttggtctcattgaagccaacacagaacttgctgctgtgttttttcttcagtgataaataaaatacttacagaatttgttttaaaaaaatataaaggaaacctcgtgc

SEQ ID NO: 19703 - DNA, 653 bp, Homo Sapiens
acaagcctaaaacaaaaaggcacttaacagcttcttcacaatcaccatgtctggacccaggaaagtttgaaatgttatcatatcagacacacacatggcaattttttcctccaccgaaatccacacatcccataccaatacaacgcaagtaatagaatcagtatcacgcaaaaaccaacagctgtaacctaccgcattaaaaccacaaaactgtctccctgtagagcgaggctccctcctgcgggagtggcgagatacttgggcattctcgggcaggcttcctggtgaggggggagtctccctcatttttggtgtttccacccacagccctttaatttcaaaaatgtctccgaagggagatagtaaacatttctctgtaaattgtcttttctgtgtttctctagccgtttcctctccctcgccggcctcggcggagattccaggccctttgcaaaccttgggattttttccccctccggatttaaaggaatgggtggggaggaaggaaggagtattcagtttcttcttcagcttccagataatattgtcccaacgtgagagccgttgcttccccttctctgacttgggagagagggtgtttcattttttctgacattttgcataaaaatggagtaagttctggctttgaaaaa

SEQ ID NO: 19704 - DNA, 1307 bp, Homo Sapiens
gcacgaggttttgaatagcctactcccaagtaagagcaaatctgtatgataacattttttcctctggacataagacataacagtaacacgatgtacatttacaagcggccttatgtacatttcccaacaatctttttaaggcaaaattgtgaccatatgtgtataattaaaatcgtttttaatcctttgcctatgaaaatattttggaaaaaaacttgctgtgtatattcagtttctgaaagataaagaaagtgctttgtattttgttgaagtcagtattttgtataaacatttatgttgacccacttatgttcagtgctgaaaactaaaatgaacatgctattctgtcagctgaatatggaagagatctttttttactagagatctgcagaagaaacgcaatcttctgagcacaatatggaatctaaaggttttatcacttagttgttcatattatgaacctaaaaataatggcataaagtttggggatgccaggcatactttttcatgtttggtgttgagttattttacttttctaacccaacattccttggtgagaccattaaatccaaacacttgtcaccgttccttctcatagtcactctgggtcatcagcatgtcccagtcactgcagcaacgccttgtgtttgtttcatttttttaaaacccacacaaagccgctgtctcactttttcctactttaccaacctcagagtatttcggcccgtatcgaacttttgttctcagtatcagcccatggtttcaggatcaaagctgtcatgttggagattggtaatggctttcctgtctttgtacagttgaattcctagtcttccttcatccttgccctctgttggcacaggcattatctctgcaattttagaaaatgacaagtagagaatactacattgagaaactaaaccctcttcttggggtcctgatactcattcccatttgtcccagtgctgacaacccaatcttcccaatactttcaggcctgctctacaaaagtacctgttcttgtagaaattttacagtctgccattttgggtgcccaccccaatttttaccttttagtaagttggcatgaaattttggtaaaatctgaaaatcacatttcagaataaaacaattgggcaaaactacctaggcttttactcttgagtgtctccttttgatagggattgtttctggaccagtttgtctaagtcctggctcttattggttcatatgaaataatgttaacttcacctctttgtatattatgtataaattagaaaatgaaaaatgtgtgataacattgtatg

SEQ ID NO: 19705 - DNA, 839 bp, Homo Sapiens
cagtaagcatttgtttttaatcttaggaaccagagtaaactttaataatagttcacatattaaaagaataaacctatgaagaatacattctttgtgtaccaaatgaaaaaatatacaatgcagtgaaactcacatatacaaagtgattttttgtgcattttttatcaagaggtttatattctattaaaccatgtaaaagcaatatctggtttttgataaagcaactaaggaactctaaaatgtgcttaaaaataagattgtgatatatataaaatgatacagattaaatccagcctgctgagttatgatgctgtgttttaacaaatggctaatgtgaaataatttaaaattttttctgtagaaattaaatgagcatatccaaacgtggaatatcacatgatttaattataacccagtagtagaatttagtaaattcaagcaaaacacgtgtactgttatcataaatagacaaatactttataacagcatttttgaagaaaaatcaggaaattgtacatgttaacaaaatagtataaccatgcatacatacatctgcttattaaacactgaagtaaaagaactaatccagtttgcagtcttcagaggtgtttagtattttactccgttctgatggaagcactttgaatgtttgcatggagacataaaactgaatatttaattgacaattggtcatgcacctgtatttcttaaaatttgcattacatttttttcttttctgattgttcagtagattccgactttggtgtagggaaagcttgatgatacagatgtctgtgggtttgctgctgcactgtaaagcttgtacaaagcctgttccc

SEQ ID NO: 19706 - DNA, 863 bp, Homo Sapiens
gcacgaggaggaagtgcgtgagtgtgtgccccttgggctactttggggacacagcagcaagacgctgtcgccggtgccacaaggggtgtgagacctgctccagcagagctgcgacgcagtgcctgtcttgccgccgcgggttctatcaccaccaggagatgaacacctgtgtgaccctctgtcctgcaggattttatgctgatgaaagtcagaaaaattgccttaaatgccacccaagctgtaaaaagtgcgtggatgaacctgagaaatgtactgtctgtaaagaaggattcagccttgcacggggcagctgcattcctgactgtgagccaggcacctactttgactcagagctgatcagatgtggggaatgccatcacacctgcggaacctgcgtggggccaggcagagaagagtgcattcactgtgcgaaaaacttccacttccacgactggaagtgtgtgccagcctgtggtgagggcttctacccagaagagatgccgggcttgccccacaaagtgtgtcgaaggtgtgacgagaactgcttgagctgtgcaggctccagcaggaactgtagcaggtgtaagacgggcttcacacagctggggacctcctgcatcaccaaccacacgtgcagcaacgctgacgagacattctgcgagatggtgaagtccaaccggctgtgcgaacggaagctcttcattcagttctgctgccgcacgtgcctcctggccgggtaagggtgcctagctgccacagagggcaggcactcccatccatctatccgtccaccttcctccagactgtcggtcagagtctgtttcaggagcggcgccctgcacctgacagctttatctccccag

SEQ ID NO: 19707 - DNA, 1465 bp, Homo Sapiens
gcacgaggtatacaggaagatgttggatccagggttgatgacgtgttccaagcaagctatgtttcttaaccttgtctacaaatctctgaaagctgacattgtgttgcgccgggtgaaggcttttgtgaagaggttacttcaagttacttgtcaacagatgccaccatttatatgtggagctttatatcttgtgtctgagatccttaaagcaaaaccaggtttaagaagccaactagatgatcatccggagtctgatgatgaagaaaattttattgatgcaaatgatgatgaagacatggaaaaattcactgatgcagacaaagaaacagagatagtgaaaaaacttgagacagaggaaacagttcctgaaactgatgtagaaaccaaaaaaccagaggttgcttcctgggtgcactttgataatttgaaaggtgggaaacagttaaataaatacgatccattcagtagaaaccctctgttctgtggagctgaaaatacaagtctttgggaactcaaaaagttatctgtgcattttcatccctccgtggccctttttgcaaagaccatccttcagggaaactatattcagtattcaggggacccactgcaggatttcactctaatgagatttttggatcgatttgtataccgaaaatcccaaagccccataaaggcaaagaaaacacagatagtgttgtgatgcagccgaaaagaaaacattttattaaggatattcgtcatcttcctgtgaacagtaaggagttccttgcaaaagaagaaagccaaataccagtggatgaagtgtttttccacaggtattataaaaaagttgctgttaaagagaaacaaaaacgggatgcagatgaagaaagtatagaagacgtggatgatgaagaatttgaagagctgattgacacatttgaagatgataactgtttcagctctggaaaggatgatatggattttgctggaaacgtgaaaaagagaacaaaaggagctaaggataacacattagatgaagattcagaaggtagtgatgatgaacttggtaacctggatgacgatgaagtttctttaggaagtatggatgatgaagaatttgctgaagttgatgaagatggaggaacattcatggatgtgttagatgatgaaagtgagagtgttccagaacttgaagtccactccaaagtcagtactaagaaaagcaagagaaaaggtacagatgattttgactttgctggctcatttcaagggccaagaaaaaagaaaagaaacttaaatgattccagcctatttgtatctgctgaagagtttggccatctattggatgaaaatatgggatccaagtttgataacattggcatgaatgccatggctaacaaagataatgcaagtctcaaacagcttagatgggaggctgaacgtgatgactgggctacacaacagagatgcaaaaagtatcatc

SEQ ID NO: 19708 - DNA, 1341 bp, Homo Sapiens
  misc_feature (1162)..(1195): n is a, c, g, or t
gcacgaggggaaagcccccgctcctcagaggacaaaggctgggtccaagagtgcctccaggacccatcgtgggagccatcgtaaggacccaagcttgccagtggcatcctcaagctcttcaagcagtaaaagaggcaagaaaatgtgcagcgatggtgagaaggcagaaaaaagaagcatagctggtatagaccagtggctagaggtgttctgtgagcaggaggaaaagtgggtatgtgtagactgtgtccaggccatcactggctttgatttccatggcggctactcccatcccgtgactgatggatacatcgtctgcgaggaattcaaagacgtgctcctgactgcctgggaaaatgagcaggcagtcattgaaaggaaggagaaggagaaaaaggagaagcgggctctagggaactggaagttgctggccaaaggtctgctcatcagggagaggctgaagcgtcgctacgggcccaagagtgaggcagcagctccccacacagatgcaggaggtggactctcttctgatgaagaggaggggaccagctctcaagcagaagcggccaggatactggctgcctcctggcctcaaaactgagaagatgaagaaaagcagaagctgaagggtgggtctaagaagactaaaagggaaaagaaagcagcagcttcccacctgttctcatttgagaagctgtgagctgagcgctcactagaggggcactcaccagttgctgctgctctactacaggcctcacacctgctctgggcatgctcagctcctggtggtggggggttctctgctgagaaggcaaactgaggcagcatgcacggaggcggggtcaggggagacgaggccaagctgaggaggtgctgcaggtcccgtctggctccagcccttgtcagattcacccagggtgaagccttcaaagctttttgctaccaaagcccactcaccctttgagctacagaacactttgctaggagatactcttctgcctcctagacctgttctttctctgcaggccacttaccttcccctgagtcaggcttactaatgctgccctcactgcctctttgcagtaggggagagagcagagaagtacaggtcatctgctgggatctagttttccaagtaacattttgtggtgacagaagcctnnnnnnnnnnnnnnnnnnnnnnnnnnnnnnnnnntacgaattgaaaattaaggaaatgttagtaaaatagatcagtgttaaactagattgtattcattactagataaaatgtataaagctctctgtactaaggagaaatgacttttataacattttgagaaaataataaagcatttatct

SEQ ID NO: 19709 - DNA, 1114 bp, Homo Sapiens
gcacgaggatagaggagagaaggaaacctgaggagtagtgttcctcctgaatgaaggttcaggtcaccagccttctgtacactgcctttggttttagcagttctttgaaaagcaaacactttcatgtcctgtctattcattcagctggctgtgctgtgctgtggaccagctgtgtggatctctagcccagctacagcagaatacattttaccagcaaacctaaggatgacaaacactatccacatctgaaaactaccacaccatatcagggatcataaattatgcatatctatgaattttccaacaaattcctacttcctgattggattggttttgccgctgatgttaaggcagccagcttcttagttcaaaaagaattctgagtttttcaaacactagtctagaggtggacattgtcaggggttctggaatgggaccaggggaccttttggtgcagtgggtgcctgtaactcattagacgtactgaggcagcacttctgcagggtgcataccctgattgttgtcatttgtaacaggtcacttccttttcactcagtttaaattggtgatggacgttgcttgattgagcttattactctctattttgagaaggtagaaggtaagagggcccatattcattctttgccatgaaatgaatgaattaggaagattgtatttacttaactgttttttaaatacatgtttaatgaaataaactgtaaaatatccagttttgtgtattatatgtacatttgatttttaatagcctttccaaagaaatgagggcatgattattgtacagtaagtacgtgactgatttaatttgatttacagagcggagtgtgttcttataaaaatatttaatgacattggttcttgtcttttgatcttttatttctgaaacactcaaacaccttacaaagtgctgagtaggtaatagtgacccaacttgtttgctaaatgattatttgtttaaatctgtacagttttaagtgttcacttatacaaagagtgtatatactttcaaataatttaaaatgctttatattatttggctagaaattgctgtttttaataaatgtgaattttttaaaaataaagatttttgcttcct

SEQ ID NO: 19710 - DNA, 1123 bp, Homo Sapiens
gcacgaggtgaaaacactgttcttggcagtgcaggttcaaaatgaagaaggcaagtgtgaggtgacggaagtgagtaagcttgatggagaggcatccattaacaatcgcaaagggaaacttatcttcttttatgaatggagcgtcaaactaaactggacaggtacttctaagtcaggagtacagtacaaaggacatgtggagatccccaatttgtctgatgaaaacagcgtggatgaagtggagattagtgtgagccttgccaaagatgagcctgacacaaatctcgtggccttaatgaaggaagaaggggtgaaacttctaagagaagcaatgggaatttacatcagcaccctcaaaacagagttcacccagggcatgatcttacctacaatgaatggagagtcagtagacccagtggggcagccagcactgaaaactgaggagcgcaaggctaagcctgctccttcaaaaacccaggccagacctgttggagtcaaaatccccacttgtaagatcactcttaaggaaaccttcctgacgtcaccagaggagctctatagagtgtttaccacccaagagctggtgcaggcctttacccatgctcctgcaacattagaagcagacagaggtggaaagttccacatggtagatggcaacgtctctggggaatttactgatctggtccctgagaaacatattgtgatgaagtggaggtttaaatcttggccagagggacactttgccaccatcaccttgaccttcatcgacaagaacggagagactgagctgtgcatggaaggtcgaggcatccctgctcctgaggaagagcggacacgacagggctggcagcggtactactttgagggcattaaacagacctttggctatggcgcacgcttattttagggccagcggcaggggactccagcctgctggacacttcagtccagctctctcctgactggggcttgcgactcacaggattgcatcgtcccagctgctaacttggggccggggcccctcccttccacatataccttgggtttgtgcatgttttctgctgggtgggttcagagggcaatttctcttttatgtgtacatatgctaaataaaccctcgtgc

SEQ ID NO: 19711 - DNA, 834 bp, Homo Sapiens
gcacgagggttggagtcagtgctgcgccatgttggactcaatgaagtgcacaaggctgtggggctcctgctggaaactctagggcccccacccactggcctgcacctgcagaggggaatctaccgtgagatattattcctgacaatggctgctctgggcaaggaccacgtggacatagtggccttcgataagaagtacaagtctgcctttaacaagctggccagcagcatgggcaaggaggagctgaggcaccggcgggcgcagatgcccactcccaaggccattgactgccgaaaatgttttggagcacctccagaatgctagagaccttaagcttccctctccagcctagggtggggaagtgaggaagaagggattctagagttaaactgcttccctgttgccttcatggagttgggaacaggctgggaaggatgcccagtcaaaggctccaagcgaggacaacaggaagagggatccactgttaccaaaagtcctgattcccccatcaccaacctacccagtttgttcgtgctgatgttgggggagatctggggggagttggtacagctctgttcttcccttgtcctataccgggaactcccctccagggtacccacagatctgcattgccctggtcattttagaagtttttgttttaaaaaacaactggaaagatgcagagctactgagcctttgccctgaatgggaggtagggatgtcattctccaccaataatggtccctcttccctgacgttgctgaaggagcccaaggctctccatgccctttctacctaagtgtttgtattttattttaatttatttattctgga

SEQ ID NO: 19712 - DNA, 1108 bp, Homo Sapiens
gcacgagggcctgaccgaccttcagcagggctgtggctaccatgttctctcgcgcgggtgtcgctgggctgtcggcctggaccttgcagccgcaatggattcaagttcgaaatatggcaactttgaaagatatcaccaggagactaaagtccatcaaaaacatccagaaaattaccaagtctatgaaaatggtagcggcagcaaaatatgcccgagctgagagagagctgaaaccagctcgaatatatggattgggatctttagctctgtatgaaaaagctgatatcaaggggcctgaagacaagaagaaacacctccttattggtgtgtcctcagatcgaggactgtgtggtgctattcattcctccattgctaaacagatgaaaagcgaggttgctacactaacagcagctgggaaagaagttatgcttgttggaattggtgacaaaatcagaggcatactttataggactcattctgaccagtttctggtggcattcaaagaagtgggaagaaagccccccacttttggagatgcgtcagtcattgcccttgaattactaaattctggatatgaatttgatgaaggctccatcatctttaataaattcaggtctgtcatctcctataagacagaagaaaagcccatcttttcccttaataccgttgcaagtgctgacagcatgagtatctatgacgatattgatgctgacgtgctgcaaaattaccaagaatacaatctggccaacatcatctactactctctgaaggagtccaccactagtgagcagagtgccaggatgacagccatggacaatgccagcaagaatgcttctgagatgattgacaaattgacattgacattcaaccgtacccgccaagctgtcatcacaaaagagttgattgaaattatctctggtgctgcagctctggattaatgaaaatcaagttccatcctcagacaagaggtaaagaaggaaaattcagccagttgattttgtttttagcttactgctgcctttgtccgaagaaaccgttcctcccttatttgaattactgaagacagcaagatatttgtaaattatcttaaaataaaacaacttaaatt

SEQ ID NO: 19713 - DNA, 838 bp, Homo Sapiens
gcacgagggttgcctccatatctaatcttttgtatcaagagattcactaagaacaacttctttgttgagaagaatccaactattgtcaatttccctattacaaatgtggatctgagagaatacttgtctgaagaagtacaagcagtacacaagaataccacctatgacctcattgccaacatcgtgcatgacggcaagccctccgagggctcctaccggatccacgtgcttcatcatgggacaggcaaatggtatgaattacaagacctccaggtgactgacatccttccccagatgatcacactgtcagaggcttacattcagatttggaagaggcgagataatgatgaaaccaaccagcagggggcttgaaggaggcgtctagggctttgctcccaagggctgtggctgatgatggtaaataacacagaagctgtagctgaacacaggctggctggtgggcttcctaggccagcccagcttgtatgggttctggctacaccagagcaccaagagcccacttgcctgggatggccccacactgtcactcagctgttctttgatcatttttttctagattgatgctcctttctcccatgcattgagctcccatctagcttcagcagggcagaacccttctccagatgtgtgtaacttatgtcttgagtatctgggagtagttgaagaacagataattccttccaaacatcaagccttgggattcttggagcaagcagaaagccagtaacttcgctctgttagaggtggaggattttcctatggttctccccatttcctgatttgtatttttagatggattaaatagtctcctgttttt

SEQ ID NO: 19714 - DNA, 1315 bp, Homo Sapiens
gcacgaggatcatccacttcttctcggagaatgaggatttccgctgcattgctggcatgtgtgtggatgctcgtggtgatctcatcgtggctgacagtagtcgcaaggaaattctccattttcctaagggtgggggctatagtgtccttattcgagagggacttacctgtccggtgggcatagccctaactcctaaggggcagctgctggtcttggactgttgggatcattgcatcaagatctacagctaccatctgagaagatattccaccccataggggatgagaaattatcagtttcttctgctccccagccaacttcccttcccttacttcttggttgttagtggcacatgcaaaatagactcagcctatgtcctgattccagctgggtagttctagaactttagaagctccatcttttaatgtttttatttgttatgtccccctccccgcttcccacctaaatttagagctttaaaagatgcactgcccaaataggacacacgatggtgttagctgaagtttgattagcaattaggcacttccaaggctttagtagagagagccactttagccctttgtgccatgtttgaaatttgcccttgtattaaatccttgattttttcccatttggctttgatgcccttgatccattgtttccttcctactataatgtgcttcatctgtgacactttctcttgaactctgattggattcactgtgcatgcttcagtgggatctgctccacctttcagtgacatttaagacatcatattcccgtaacattatgtctcagtctgatcgtctttaccagtatgaaagtcattcatttagtgctaccaaaggggatacacaagccctttaggaagcagtacctctcgcctggaggatctgtgccatcttggattgagaattgcagatgtgacagaatggattgaccctagttggttggtattgatgacttcagcctggaaattgcttgccttttaaagaagcatatatgggttggaattatgccaaagcataggaagctgggaataagcaaacaaatgctgatatagtcagcaaatttggatagtctctagggctcatcatttttcatactacctctctcttctggcctgtgtctaaggaattgtacaacataggccagggccaacaaagtggagaggtggacacattttcatgttcattactaaaacaaacagcaaaactattggtttgttattctgtgtttcctcaagtcagtacatactatttggtttcaggatttctttccatttctctatcagcattaaatattgagaactgtt

SEQ ID NO: 19715 - DNA, 1158 bp, Homo Sapiens
gcacgagggtagtggcggaagaggttcggcggctgatggcggatcaggatcggaagcctgcgtaactttctcccttgatccgggagtctttccactggattcacaatgacatcctttcaagaagtcccattgcagacttccaactttgcccatgtcatctttcaaaatgtggccaagagttaccttcctaatgcacacctggaatgtcattacaccttaactccatatattcatccacatccaaaagattgggttggtatattcaaggttggatggagtactgctcgtgattattacacgtttttatggtcccctatgcctgaacattatgtggaaggatcaacagtcaattgtgtactagcattccaaggatattaccttccaaatgatgatggagaattttatcagttctgttacgttacccataagggtgaaattcgtggagcaagtacacctttccagtttcgagcttcttctccagttgaagagctgcttactatggaagatgaaggaaattctgacatgttagtggtgaccacaaaagcaggccttcttgagttgaaaattgagaaaaccatgaaagaaaaagaagaactgttaaagttaattgccgttctggaaaaagaaacagcacaacttcgagaacaagttgggagaatggaaagagaacttaaccatgagaaagaaagatgtgaccaactgcaagcagaacaaaagggtcttactgaagtaacacaaagcttaaaaatggaaaatgaagagtttaagaagaggttcagtgatgctacatccaaagcccatcagcttgaggaagatattgtgtcagtaacacataaagcaattgaaaaagaaaccgaattagacagtttaaaggacaaactcaagaaggcacaacatgaaagagaacaacttgaatgtcagttgaagacagagaaggatgaaaaggaactttataagggtacatttgaagaatacagaaatagaaaataccaagcttatgtcagaggtccagactttaaaaaatttagatgggaacaaagaaagcgtgattactcatttcaaaaagagattggcaggctgcagttatgtttggctgaaaggaaatctgcaagactttcctgcttacaacctcaagtaaagaagatacttgtttttaaa

SEQ ID NO: 19716 - DNA, 744 bp, Homo Sapiens
  misc_feature (136)..(146): n is a, c, g, or t
  misc_feature (472)..(496): n is a, c, g, or t
gcacgaggtttttttactcttatgttatgaatatttattttttctccttaaaaatgtacaaaaaataaaataactgtatttatagtttatagattccccctctcccatttacaaaactattaagttacatttaccnnnnnnnnnnnaaaacatgagagcaaattgtacatatatcaatctcccttgcttgtctttaagaaagggccgttcatagcatttggcacaaaccctctatttctgttgcatttgcatgattttaaataagaaggaaaataaacatttgatttatttcatgcttcctaagtttctgggcagggacatgccttactcttttagaaaccaattccaagatgacatctgactgcatttttctgttggtccgaacttctaaacaaacactcataaagtaagtttaaacaatttggagatgtatgaggaaaaagtcttgttctgttcagttcagactttgttnnnnnnnnnnnnnnnnnnnnnnnnntgctcatttcacatgtccatgatcttccatggattttttttaagcttatttgagtttgattaagggacaaaaaagaagaggcggcaagttttcctatctctttggagtgtttcgctcaggaaattttgctcatcaaagttcagctaacatacacagcggacacatcaaaggcaaactggggtgctccgaggatgcagaggggaatggatcggaagggatgtggcacttggcaccaccctctggtggca

SEQ ID NO: 19717 - DNA, 981 bp, Homo Sapiens
ctgaagcccatgtggatgctcattactacgagcagaatgagcagccaacaggaacttgtgctgcatgcatcactggtgacaacaggtccctcatagctaatcttgctgctgccaattgttataaaaaggaaaaacatcttgatctggagaaaaactggatgttggtagaaaaagcaagagtttgttatatagcaggcttttttcttacagtttccccagagtcagtattaaaggtggctcaccatgcttctgaaaacaacaggattttcactttgaatctatctgcaccgtttattagccagttctacaaggaatcattgatgaaagttatgccttatgttgatatactttttggaaatgagacagaagctgccacttttgctagagagcaaggctttgagactaaagacattaaagagatagccaaaaagacacaagccctgccaaagatgaactcaaagaggcagcgaatcgtgatcttcacccaagggagagatgacactataatggctacagaaagtgaagtcactgcttttgctgtcttggatcaagaccagaaagaaattattgataccaatggagctggagatgcatttgttggaggttttctgtctcaactggtctctgacaagcctctgactgaatgtatccgtgctggccactatgcagcaagcatcataattagacggactggctgcacctttcctgagaagccagacttccactgatggaagagctgaaaacacaagcccaggagtgcagacactgccctaattgcttcctgagaattcccatattaataaagaagaaaattatctgccattttttcctactataataatgctgaatcttaatttagagggtacaagggtatggtaatgcttgtagaatctttattatctcaacaatctaaaaaatgatgtttatttccatagtttgatagtgccacttaaatgccaattaaacaagaatataacattt

SEQ ID NO: 19718 - DNA, 541 bp, Homo Sapiens
cccccgggctgcaggaattcggcacgaggcagaagacccagaaactcttatcgtggcactgttgcagcttcctctgccctggctggaaagactccagaatccagtgtggtgctgtggaaggagcactggactaaaggcttcagtggctgcgtgtcccaggacaggtcatggcccctctctgggcccagcccatttatctataccatgaggtaactgaagtaaggagagcagtgaatgtcaaactgtgtttcttagagccataagccccacatattatccctgaacaagggcagctcctgctttatatatttgatacgtaggggttccatgagagattttgggttttaaaggaatggttttactgcattaaagaaaaaaaatgctttggaaaccagaggcctgggtgatgttaaagtctatcctgtcccacttcctacattctgggactaccgtgaagcctggagtagggagagcgagtttgggagctgggactcggggagtcaaaaatagatgagtaattgtcaataaacctgggaaccaa

SEQ ID NO: 19719 - DNA, 2614 bp, Homo Sapiens
  misc_feature (897)..(934): n is a, c, g, or t
  misc_feature (952)..(1063): n is a, c, g, or t
  misc_feature (1074)..(1082): n is a, c, g, or t
gcacgaggctctcaaggaaagtagtcgcggaatctcagttagcggtggagaggcagtatgtccggttcaatggcgactgcggaagctagcggcagcgatgggaaagggcaggaagtcgagacctcagtcacctattaccggttggaggaggtggcaaagcgcaactccttgaaggaactgtggcttgtgatccatgggcgagtctacgatgtcacccgcttcctcaacgagcaccctggaggagaagaggttctgctggaacaagctggtgtagatgcaagtgaaagctttgaagatgtaggacactcttctgatgccagagaaatgctaaagcagtactacattggtgatatccatccgagtgaccttaaacctgaaagtggtagcaaggacccttcaaaaaatgatacatgcaaaagttgctgggcatattggattttacccatcataggcgctgttctcttaggtttcctgtaccgctactacacatcggaaagcaaatcctcctgaggaggccttgctgaagttagaaagtgcatccactttggggcgaaaactagagacttgcttgggggctgcagaagtgccctctcctcgaatcctgccagttgcattcttcccccttggagccaagacgattggccagacatcacctcagatctgagaccagcgtcttccatctctcagagccttactcccaaagtacctgctcactgttccgtgttgaacaattgccggtgtttcctctcttcactggtttccatgagtacccttatatttcacaactttctgttcataagttatagtgacattgctctttggtaaaaatgcctgctttccaatactttgattgcatattagacattcttaacagggcggcagtctagtgttgaaagnnnnnnnnnnnnnnnnnnnnnnnnnnnnnnnnnnnnnnaaaaaattctgatttagnnnnnnnnnnnnnnnnnnnnnnnnnnnnnnnnnnnnnnnnnnnnnnnnnnnnnnnnnnnnnnnnnnnnnnnnnnnnnnnnnnnnnnnnnnnnnnnnnnnnnnnnnnnnnnnntatctgtattnnnnnnnnntctgatttaattcttttatttatcataaggggtttaattcctgaagtaaaggtttgcacctattaaacttaaaactgccaaatgatttttgttcttttatgtgcgtgataaaaatacaaagaatggtgtggccacctcctccctttcaagctagggcagcaggtagctcttcccagcccctgagcccagccccttcccaagtggtgccggacaaaaaactacatggccctttcgtgtcttgggggtggaaaggtagggatgaattggggtgatagaaccctggtgaattcagagtaatctttctttagaaaactggtgttttctaaagaaacaggataggagtttagagaaggcaccaaagctttcactttggtttggcaccagtttctaaccatctgttttttctaccctagctatcttttattggtaaaatataaatgtataattatgtttgtagagctttaccaaggagtttccctccttttttgtttgttgattagcaaatttttgattctccattttccaaaagtaagagactccagcatggccttctgtttgccccgcagtaaagtaacttccatataaaatggtatttgaaagtgagagttcatgacaacagaccgttttccatttcatctgtattttatctccgtgactccaacttgtgggtttgttctgtttttccatgagaataaaatactggcggtttttttctcagatgtgtgttcattgagaagtaggttactagaattatgttactgtgtcttattggttcaatgatgatttctctggcatattagacttttattttttcccccatggaagcacttgaggaaataaatagtacactggctgttttctgccagcaactgtggtgatttttctccctgtcctttgagaattgctagtctgcttctgagccattgtcatatccagcagggagcagcttggttcaagaaggaccatagaggctgctcagcatctcctccctccctcccagcttgccagggatttgatgagacaggaaactgcccagcaaaccagggactgcccatgtaaactatttaagaaaaagttcaacccaggtcttgtatcctgtgatttagcagttgaatgaatacagaattcatcaaaataatattaaccttgtacttgcacacttggatatatttgggagtaattttaggagatttctggctgacttttattatcagggatatgggtttagtaaagcttttatctttagaaaaatgtttgtatgcattataagatgctacttttaagacaatattgaaaaaaactttggttattatttaacaaaagtggtatgacttgatgcttctctatttaaaggcaaggaaggattggtatatgattgcctgtaataaataaattgcgtgattattggagtacattggggtaaaagtaaagaacagaggagtattgaaggagcttgaaagggaacattcaaactaaagccaagcctgaagataacttgaatcagttgtaaaagtgtgttggcatgtccgaaa

SEQ ID NO: 19720 - DNA, 1194 bp, Homo Sapiens
  misc_feature (246)..(335): n is a, c, g, or t
  misc_feature (1066)..(1080): n is a, c, g, or t
gcacgaggctaacgtgtctcaagcactgtttgcaaaggttgcagcaaccaaaagccagggatggttgtgcgagctgttacgctggaaagaagatccttctccagaaaacagaaccctgtgggagaacctctccatgatccgaaggttcctcagtcttcctcagccagaacgtgatgccatttatgaacaggagagcaacgcggtgcatcaccatggcgacaggccgccccacattatccatgttcnnnnnnnnnnnnnnnnnnnnnnnnnnnnnnnnnnnnnnnnnnnnnnnnnnnnnnnnnnnnnnnnnnnnnnnnnnnnnnnnnnnnnnnnnncacagacaggccctcggctccccccacggcaacccacgggggcctctccagcagagtcagatgaggaaaaccgacagaagacccggccacgaacaaaaatttcagtggaagccttgggaatcctccagagtttcatacaagacgtgggcctgtaccctgacgaagaggccatccagactctgtctgcccagctcgaccttcccaagtacaccatcatcaagttctttcagaaccagcggtactatctcaagcaccacggcaaactgaaggacaattccggtttagaggtcgatgtggcagaatataaagaagaggagctgctgaaggatttggaagagagtgtccaagataaaaatactaacacccttttttcagtgaaactagaagaagagctgtcagtggaaggaaacacagacattaatactgatttgaaagactgagataaaagtatttgtttcgttcaacagtgccactggtatttactaacaaaatgaaaagtccaccttgtcttctctcagaaaacctttgttgttcattgtttggccaatgaatcttcaaaaacttgcacaaacagaaaagttggaaaaggataatacagactgcactaaatgttttcctctgttttacaaactgcttggcagccccaggtgaagcatcaaggattgtttggtattaaaatttgtgttcacgggatgcacaaagtgtgtaccccgtaagcatgaaaccagtgnnnnnnnnnnnnnnnagttcttattccggagcctcaaacaagcattataccttctgtgattatgatttcctctcctataattatttctgtagcactccacactgatctttggaaacttgccccttattt

SEQ ID NO: 19721 - DNA, 437 bp, Homo Sapiens
taccctttagcctggggcgcctgggggccgccaagggcgcgctgcaccccggctgcttcccgcccctgcacccaccgcccccgccgccgccgcgagcgcaacaacatcgccgtgcgcaagagccgcgacaaggccaagatgcgcaacctggagacgcagcacaaggtcctggagctcacggccgagaacgagcggctgcagaagaaggtggagcagctgtcgcgcgagctcagcaccctgcggaacttgttcaagcagctgcccgagcccctgctcgcctcctccggccactgctagcgcggcccccgcgcgtgtccccctgccggccggggctgaaactccggggagcgcccgcgtccgtgccctcgcctttgccctcggcggcgccggcaaaactttggtattggtgtacttggcatcgcggggagcccgttggt

SEQ ID NO: 19722 - DNA, 1214 bp, Homo Sapiens
ggcggccgctctagacctaaaaaagaatcccccgggctgcaggaattcggcacgagggttacaggcatatactagtgtctcaaaggcttcacttggccttgcagatcacagagaacttggaaagatgatgaatacaataatttttcatacaaaaatggtagattccttggtggaaatgttggtggaaacatcagatctctccatattttgtttttatagtcgtgcttttgagaagatgtttcaacagtgtttggagttaccctctcaatcaagatactcaattgcatttccactactttgcactcattttatgagttgcacgcatgaactatgtccagaagagcgacatcatattggagatcgcagtctttccttatgtaatatgttcctagatgaaatggccaaacaagctcgaaatctcatcactgatatttgcacagaacagtgtacccttagtgaccagttgctacccaagcattgtgccaaaactatcagtcaagcagtgaataagaaatcaaaaaagcagactggtaagaaaggggaacctgaaagggagaaaccaggtgttgagagcatgaggaaaaacaggctggttgtgaccaaccttgataaattgcacactgcactttctgagttatgcttctctataaattatgtaccaaacatggtggtatgggaacatacctttaccccacgagaatatttgacttctcatctggaaatacgctttaccaagtcaattgttgggatgactatgtataatcaagccacacaggaaattgcaaaaccttcagaacttctaacaagtgtaagagcatacatgaccgtactccagtcatagaaaactatgtgcagattgatattacaagagtatttaataatgtgcttcttcaacaaacacaacatttagacagtcatggagagccaaccattacaagtctatacacaaattggtatttggaaactttgttacgacaagtcagcaatggccatatagcatattttcctgcaatgaaagcgtttgtgaacttacctacagaaaatgaattaacattcaatgcagaggaatattctgacatatcagaaatgaggtcattatcagaactactaggcccatatggtatgaagtttctaagtgaaagccttatgtggcatatttcatcacaagttgctgaacctaagaaacttgtggtggagaatgttgatgtgttaac

SEQ ID NO: 19723 - DNA, 1170 bp, Homo Sapiens
gcacgaggcattggcttctaccaacctgatgagcccctcacccagttcctagaagccgcccagcaggagtttaaccttccagtcaggtacctgcaggaatttgcccccctaggcacagggggtggtctttaccattttcgagaccagatcctggctgggagccccgaggcattcttcgtgctcaatgctgatgtctgctccgacttccccttgagtgctatgttggaagcccaccgacgccagcgtcaccctttcttactccttggcactacggctaacaggacgcaatccctcaactacggctgcatcgttgagaatccacagacacacgaggtattgcactatgtggagaaacccagcacatttatcagtgacatcatcaactgcggcatctacctcttttctcctgaagccttgaagcctcttcgggatgtcttccagcgtaatcagcaggatgggcaattttcagccctctacgcctcccgcctctacctgagccgataccaggacactcacccagaacggctggccaagcacaccccagggggcccatggatccgagggaatgtgtacatccacccgaccgccaaggtggccccctcggctgtgctgggccccaacgtctccatcgggaagggggtgaccgtgggtgagggtgtgcggctccgggagagcatcgtcctccatggagccactttgcaggagcacacgtgtgttctgcatagcatcgtgggctgggggagcaccgtgggacgctgggcccgcgtggagggtacccccagtgaccctaaccccaacgatccccgagcccgcatggacagtgagagcctcttcaaggacgggaagctgctgcctgctatcaccatcctgggctgccgagtccggatccctgccgaggtgctcatcctgaactcgattgttctgccacacaaggagctgagccgaagcttcaccaaccagatcatcctctgagtagggctgccagaaggcccccagctcctacccactccccttgaggctgctgcctgcttggccagcctctgtccagaaaggaccagagaaagccaggctggatcgtcacatgccggggagcaatgtggatggcctggggactcctgggttttctccctcccgactccctaataaaccccgtgcctcgtgcccgaattc

SEQ ID NO: 19724 - DNA, 2102 bp, Homo Sapiens
gcacgaggctccttgcggcctcctcttcccttcgctccggcccggggaaactgaacttataatcgtcactggattgtaagtacccgaggcgaagagagctcgctgagccctgattttttgagtgtctttgttccgggagagtttgtgagttgaaagtatctctgctgggctttctgggccgaaaaccgttccgggggagccgccatttgctttcctgttccctagctagctagctagctctctccgcgttgtccggcagcggcacctagaggttgggacttggcattgcatctgatttaatgaacttaagtctgtgaataagcctttgtgttaacgactggtattcggtcacagcatatttagagaaaagacttggagcttaaataaaaactaaggcaaaatagacgcttagctgctgatctacagagaacttcttgtaattaaaagatttcaattcatagcaaactggtgttttaaactattgcagtagctggaactttttagtgtaaccagcatttattggagaagtgaatcacaaggaaataaagatgagtaaaagcaaagatgatgctcctcacgaactggagagccagtttatcttacgtctgcctccagaatatgcctctactgtgagaagggcagtacagtctggtcatgtcaacctcaaggacagactgacaattgagttacatcctgatgggcgtcatggaatcgtcagagtggaccgtgttccattggcctcaaaattagtagacctgccctgtgttatggaaagcttgaaaaccattgataaaaaaactttttacaagacagctgatatctgtcagatgcttgtatccacagttgatggtgatctctatcctcctgtggaggagccagttgctagcactgatcctaaagcaagcaagaaaaaggataaggacaaagagaaaaagtttatctggaaccacggaattactctgcctctaaagaatgtcaggaagagaaggttccggaagacagcaaagaagaaatatattgaatctccagatgttgaaaaagaagtgaaacgattgctgagtacagatgctgaagctgttagtactcggtgggaaataattgccgaagatgaaacaaaggaggcagaaaatcaaggcctggatatctcttctccaggaatgtctggtcacaggcagggccatgactcattagaacatgatgagcttcgggagatattcaatgacctcagcagcagcagtgaggatgaagatgagacccagcatcaagatgaagaagatataaacatcattgacacggaggaagatctggagagacagctacaggacaagctaaatgaatcagatgaacagcaccaggaaaatgaaggaaccaatcagctggttatgggaattcagaagcagattgacaacatgaaaggcaagctccaagagacccaggacagggcaaaacgacaagaggatctcatcatgaaagtggaaaatctggctctcaagaacagatttcaggctgtactggatgagctcaaacaaaaggaagaccgagaaaaggagcaactcagctctttgcaagaggagctagaatcactcctagagaagtaaaaagaactgatatttaatttcagtcttcagactggtcagcattagaaaattcttggctttattgtactgggtattaagaccttgctcttcctagtccttttaatgctgtgtgttctgttaagttctttcatttgtttgtaattttgtttttcagcaaatttatattgttttgctaggtgttcatcctataagaagcaggattgtataggcagaaaaatgattgtaggaaagttgcaggattagcggaatgtatggttcaaccttaattatagcttcattgcaggactttactgtttctccattttctagaagctgctgttgctgctttgtgatgacgtgagatcaataagaagaacctagtctagagacaatgatgctagtttgcatatgttttcctatgcaatagttgttttcccagttattcaaagcagctttctatatgtagagatgcaaattattaagttgtttccaatacaataaataaaagcatctgtttttcacttt

SEQ ID NO: 19725 - DNA, 1430 bp, Homo Sapiens
  misc_feature (874)..(909): n is a, c, g, or t
  misc_feature (986)..(994): n is a, c, g, or t
  misc_feature (1340)..(1351): n is a, c, g, or t
gcacgaggcagccgtttctcgcgctcctggaacaggccctggttgcaggcttcgctcacggcctgggttgacgcgttcggagcccacgggcgatgcctagggtggcgcgggttttgccaccaccagggtcacagagcagccaggtttcctcttactcgacccagtctttgtaaagaatgggaggcagctgtcagaagaaaaaactttaaacccaccaagtatagcagtatttgttcagagcactttactccagactgctttaagagagagtgcaacaacaagttactgaaagagaatgctgtgcccacaatatttctttgtactgagccacatgacaagaaagaagatcttctggagccacaggaacagcttcccccacctcctttaccgcctcctgtttcccaggttgatgctgctattggattactaatgccgcctcttcagacccctgttaatctctcagttttctgtgaccacaactatactgtggaggatacaatgcaccagcggaaaaggattcatcagctagaacagcaagttgaaaaactcagaaagaagctcaagaccgcacagcagcgatgcagaaggcaagaacggcagcttgaaaaattaaaggaggttgttcacttccagaaagagaaagacgacgtatcagaaagaggttatgtgattctaccaaatgactactttgaaatagttgaagtaccagcataaaaaaatgaaatgtgtattgatttctaatggggcaataccacatatcctcctctagcctgtaaaggagtttcatttaaaaaaataacatttgattacttatataaaaacagttcagaatatttttttaaaaaaaattctatatatactgtaaaattataannnnnnnnnnnnnnnnnnnnnnnnnnnnnnnnnnnnaacaaaatattttaaaagttataaactaacctcagacctctaatgtaagttggtttcaagattggggattttggggnnnnnnnnnagtatttatagaaataatgtaaaaataaaaagtaaagagaatgagaacagtgtggtaaaagggtgatttcagtttaaaacttaaaattagtactgttttattgagagaatttagttatattttaaatcagaagtatgggtcagatcatgggacataacttcttagaatatatatatacatatgtacatattctcatatgtaaagtcacaaggttcatttatctttctgaatcagttatcaaagataaattggcaagtcagtacttaagaaaaaagatttgattatcatcacagcagaaaaaagtcattgcatatctgatcaataacttcagattctaagagtggannnnnnnnnnnnacatgggctcctattttttcccctactgtcttgcattataaaattagaagtgtattttcagtggaagaaacatttttca

SEQ ID NO: 19726 - DNA, 887 bp, Homo Sapiens
gcacgaggctctgaaataagtgttgctgtgggaataattttaatgttcaaggtgatatcatgggggagttttgtcttttaaaacattagaagcattttaaatattaagaatcaaatatttatagatcaaaacttgtgttttaagtattatacgggacctgtttacttatagtaaatgtgaatgtacacatgagttgttgctgaagctgacaagcatattacatacatgcattttccctgtgccctcatagttgcagttagagttccagtacctgtaggctcacctgggaggcagattagacccaaaggtagatgtttttcccctttccatgaagcatgtcagtgggagttgcttcctttgatttccctagtactaaattttaaggcttttgtaaaaacaaaacaaaactaggagcttggaacagttaaaaatcaacactgctaccatcaattcatcaaatatttacttagagctttcatacattaagattccagtaaccaataaattagaattcatttcttctgcataaagtaaattttcatacacttgacctactaagacagcaagggtgtcctaaattgaggcatttgtataatgcctgcataactaaatggtcactaaaatgggacagcatggggcaagaccttgtagttcttcacagaatatttgtggtcagtttctccaattaatttgctgcatgagccaaataaccataattcactttttatacccactggtgccataattagagaattagagggtgtagacagaggttaatgccaatgagaaacacaggacagggttttttttattataaaggtcattagatacaaaagattgtttttcaaaaatttctaatctaacaaaggggatcaatcagaaatgaa

SEQ ID NO: 19727 - DNA, 960 bp, Homo Sapiens
  misc_feature (828)..(862): n is a, c, g, or t
gtgtgagccaccgtgaccagccaatgtgccttcttatagtgtctactcattggtctttgttctgcccagtgataacaatgggataacgcctgctacacatcttcattgtgaaacccttcccctgtgctgagattaaatgaactctaagattattaaatagtatattttccttgacagcctagcgtttgatgattttaaagccttatgtataaataaaccaaaggaagtaagcagtcatattgctaatttgctaactcctatctattgaatggtgaagttttaaaaatttccccaggtaagtttaagattcaaacaccatctattgagcacctacattgtgtgccaggtagtaaaataggtgctttcatacacattgtctcaattcctgtgaggtcagaattatctctgcatttgaaacttgaggaaacatgctcagagtgcaagaagcttccttgcctgagatcacctagaaaggaaccctcagagccggcaactgaatcttggtccctgtgatgtcaagcccattgctctcccactgcagaacatggcctctagattaatgccaccgattcaggaacacctccgacagtcttgaaatacccccatgttgccttgtttgttttttccttctggcttcttctattacagtctcttcattggaagctctgtaggccaaggccagagctgatactgacacggagccaatgcagatagcacatcagatgctaggggtcgctgggaggattaagggacttaatctgctaggaacacctgtacttgaagtggaggaggctagggggccacagttgctgcttcattaacatagannnnnnnnnnnnnnnnnnnnnnnnnnnnnnnnnnnaagtggattggcagactccttgttgcttaagagtggctttctaggcaggccactggcatctgaattcatcattgacaataaatgtaagaaattggaat

SEQ ID NO: 19728 - DNA, 1445 bp, Homo Sapiens
gcacgaggccaaccatggcggcggtgtctggcttggtgcggagaccccttcgggaggtctccgggctgctgaagaggcgctttcactggaccgcgccggctgcgctgcaggtgacagttcgtgatgctataaatcagggtatggatgaggagctggaaagagatgagaaggtatttctgcttggagaagaagttgcccagtatgatggggcatacaaggttagtcgagggctgtggaagaaatatggagacaagaggattattgacactcccatatcagagatgggctttgctggaattgctgtaggtgcagctatggctgggttgcggcccatttgtgaatttatgaccttcaatttctccatgcaagccattgaccaggttataaactcagctgccaagacctactacatgtctggtggccttcagcctgtgcctatagtcttcagggggcccaatggtgcctcagcaggtgtagctgcccagcactcacagtgctttgctgcctggtatgggcactgcccaggcttaaaggtggtcagtccctggaattcataggatgctaaaggacttattaaatcagccattcgggataacaatccagtggtggtgctagagaatgaattgatgtatggggttccttttgaatttcctccggaagctcagtcaaaagattttctgattcctattggaaaagccaaaatagaaaggcaaggaacacatataactgtggtttcccattcaagacctgtgggccactgcttagaagctgcagcagtgctatctaaagaaggagttgaatgtgaggtgataaatatgcgtaccattagaccaatggacatggaaaccatagaagccagtgtcatgaagacaaatcatcttgtaactgtggaaggaggctggccacagtttggagtaggagctgaaatctgtgccaggatcatggaaggtcctgcgttcaatttcctggatgctcctgctgttcgtgtcactggtgctgatgtccctatgccttatgcaaagattctagaggacaactctatacctcaggtcaaagacatcatatttgcaataaagaaaacattaaatatttagtttggacttgaatatcaagtcgttgaaatttatttgaaatacttgctggcactgcacctggatttgtactgcaagacctgactattcataacggaaaacgatttctaaagcaacagcaggtatttttgtacagggaagtttaaatgtgtttgtgtatggaaaactctccactctcctcccctagatgccatgcttccttttgtctgttacggttgccatgttctttgaataacaaattatataacattttatcctctctcaccacaaggacaaagtatggatgtggcagagtcctgatgaaagatgtatccaaacaagataacttatatgtattaattaaagcatatatat

SEQ ID NO: 19729 - DNA, 846 bp, Homo Sapiens
gcacgagggaatggttctgcccagaaagccagttgcaggggccctggatgtttcctttaacaagtttattcccttatcagagcctgctccagttcccccaatacccaatgaacagcagttagccagactgacggattatgtggctttccttgaaaactgatttatcactctgagttcaagattcatcttcagaatcctgtatactgacaaacgtagaaatgtaaagtttgtattttcaatttattggatggcttaagcacctcagcattccttactatgtgataaaatacatatagaatataagatatactatatacattttgtccataaacgttatgctgaatagttgttgaaacagttctcattttgtagtatttaataatctggatggagcctgtcagtattacagttagttttctagtgactcataaaataagatttcctgtttcatgtagaatagtgtttgtcaactgtcttttctctgtcccagcacatgccgtactcttatatgtaccattggttgataattataatgattcatttggacttgaagaaagattgtccccaggcacagtatctgaatcactggggattatgattcaccctctttggagaacatgctctcttttcaccccccacctcctgagagccactaatgtaagatacagaaacatagctgaggaacaaatagaccatttccatactaaccagtttgttaactttagattttttccatagtggggagtatatccattgctggcaggggagggcttggcatgaaaatgcaacttatttaagacatttatgagacatattaacttgtgctgtccccttttaaaaggagaa

SEQ ID NO: 19730 - DNA, 821 bp, Homo Sapiens
  misc_feature (570)..(629): n is a, c, g, or t
gcacgaggcaagacctaaaggattatatgcgtcaggcaggagaagtgacttatgcagatgctcacaagggacgcaaaaatgaaggggtgattgaatttgtatcttattctgatatgaaaagagctttggaaaagttggatggaactgaagtcaatgggagaaaaatcagattagttgaagacaagccaggttccagacgacgccggtcctactccagaagccggagtcattcaaggtctcgctctcgaagcagacattcccgtaagagcagaagccgaagtggcagcagcaaaagcagtcattctaagagtagatctcggtccaggtcgggctcccgctcccggagcaagagccggagccggagccagagtcggagccggagcaagaaagagaaaagcaggagccccagcaaggacaagagccgcagccgcagccatagcgctggcaagagccgcagcaagagcaaagaccaagctgaagagaagatccaaaacaatgacaatgtcgggaaacccaagagccggagtcctagcaggcataaaagtaagagcaaaagtcggagcaggagtnnnnnnnnnnnnnnnnnnnnnnnnnnnnnnnnnnnnnnnnnnnnnnnnnnnnnnnnnnnnaagagcctccgtcagagtcgggagccggagcaggagcaaagcgggcagcaggagccggagcaggagctgtatcaagagcatggacaagaggaagagcaggaagagaagcagagaggagagccgcattcgcagttcgcagccgcagcaagagtgagaggagcagaaagcgaggcagcaagcgagacagcaagg

SEQ ID NO: 19731 - DNA, 946 bp, Homo Sapiens
  misc_feature (272)..(281): n is a, c, g, or t
gcacgaggccttaagcctctcaaatattgagctttagtacaatcatggatagacattctggtgatgatttaggggctttttatacaccacatactagcttctttctctataagagtgcctctttcataaaaccaaatgcttgtctgctagcatacttttcaaagggaatccactgttttctcactttcctcccatatctccgtccttcatccaaaaccttcccagaatccatcagcaagcatgtttgaggcctgtggtgtaggggactgaannnnnnnnnnaacttctattccattttaattgtaggatatctttgtccatatacccaggtgtcctgatttgaatgtactatttgatcctcattgtgttcaggcaaaaaaataggaaatgagtaattttgagtttgaaatctctcccagaagacaaactacttcagtgagtaaaagctttgacattttatgttttattcataaagggggttaattatttgctacaaagaagcacgatctattttcatcatcgatttgaaaatatctgtaactcctatagatcctataggcagagagttttcctttctgactttttccctttgctttcgtgtgaccacatgttttctgtaccagtcactggggaaagaagtgagtttatctcgtttgttttaaaagttttgcttgtctatttagcattcctttttgggtctcaagatttatggaacaataaatgtcatttaatgctgtgtgcttattttgaattcctcatcaggttttagaagcggggtaaaaatacttagatgcttatcagacttgaaattatactgagtggcattgaacgtgagtttgtcccagtgaaacaggctaaataatttttggcaccagcaaatttgttactttgtttttttaatagtaggatgtacacatttcagtataaataaatgttttctgattgt

SEQ ID NO: 19732 - DNA, 1243 bp, Homo Sapiens
gcacgaggcttttattgaaatacaaaatgttaaatatgcaagctgtactaatgaaggtgctccttgaagttgattaaggagggctgggctgcttgtggcttccattttcaattgccaggaaagaggtagaaatatcttgtcatggacagtcgttctatggtggtccttgagctttggcccttggagtttcaaatgattgctgtaccttccgaaatacttcctctaggtggcagcaccaagaatatttctggaagcatgtgatgagttgtgtgatgaagatagagcccattgtgctgtctctccaggacacgttgtgtggcgttgaagagcagaaagcaatgaagtccttctccacgtgggtcttgtaaacagcatcttcctccaggttctcagatgactgtgaagaggccacttccaaggatgctggagagtctctgacccacagttccccacggtttgcacctctgcaggcctggacaatgatgaccttgggtttgtccttcagactgaggcagttgcggttgttgaatatctggaagatggtgtcataaagcagcacatctggttttttctcatcatgcacagttccgcagattccctccaggatgccatgagacatgagtaccaagaatgtgctgtcagaggacttgtgctctggtctggtagcaaatgccctcagcgctgactccatatccctggctgtcagattctcttctacatctacactatagtccagaccctcaagtagctccttcatccctgtgatgtcaaagtcagctccattcctcggaggcagatggtcaaactctgtattgcatatgatgagagccaggcgtgtgcggttgtttctctcctttattggatagatctcttcagctctttctttacatagtctcaggaattcttcatgaggacaaagcttgagggcatctgtagattctcctgactcaggtggtccagcctccatattcggatgagcttttttattgggggatatttggtctatgttaaaaaaggtttgaagaagcatttgtcctgccatacgttgcttctcttgcatagagtctgccatgacccgaactttgtcttcagttttagcatcgtaatatttctttttttcctcttccttccagttcagtacattttgttccaccaagttatccaaaacaccagtgaggaaatctttgcccagggattccaacaccttaagtggcttttttctgtggttgccttctcctcgtgc

SEQ ID NO: 19733 - DNA, 1569 bp, Homo Sapiens
  misc_feature (1240)..(1257): n is a, c, g, or t
  misc_feature (1304)..(1331): n is a, c, g, or t
tcccccgggctgcaggaattcggcacgagggtctttaatagattacacctgccagacctcattattgtcttaatcctccttcccatgacttctcactgcctaggtggtcacacagtagattcctgcttcttctcctcgggaaccccaagtctcttgacaggggtaaatgcagagtgttcagggttagactaatgatgtgactaggccctgctggtgtgcctgtctgatggaaatagatgttatttgtgtagtctcatgggtggcctggcactgagtaattacttggctaaagaaagctggaggttgaagaggctagaaagcgttgttttctgacaagtttgctgctgaactttggatgccctaacctcagtgttaacgtctatgtctgcttctctcctctctcttttgccttccttcttgcctattttgttgacaccctgactcttctagatcctagctatcgttcttttcactctggtggatatggccaggatgccttgggtatggaccccatgatggaacatgagatgggtggccaccaccctggtgctgactatccagttgatgggctgccagatctggggcatgcccaggacctcatggatgggctgcctccaggtgacagcaatcagctggcctggttcgatactgacctgtaaatcatcctttaggtaagaagttttaaaaagccagtttgggtaaaatacttttactctgcctacagaacttcagaaagacttggttggtagggtgggagtggtttaggctatttgtaaatctgccacaaaaacaggtatatactttgaaaggagatgtcttggaacattggaatgttctcagatttctggttgttatgtgatcatgtgtggaagttattaactttaatgttttttgccacagcttttgcaacttaatactcaaatgagtaacatttgctgttttaaacattaatagcagcctttctctctttatacagctgtattgtctgaacttgcattgtgattggcctgtagagttgctgagagggctcgaggggtgggctggtatctcagaaagtgcctgacacactaaccaagctgagtttcctatgggaacaattgaagtaaactttttgttctggtcctttttggtcgaggagtaacaatacaaatggattttgggagtgactcaagaagtgaagaatgcacaagaatggatcacaagatggaatttagcaaaccctagccttgcttgttaaaannnnnnnnnnnnnnnnnnaagaatatctgtaatggtactgactttgcttgctttgaagtagctcnnnnnnnnnnnnnnnnnnnnnnnnnnnngcaataactgttttttaagtctctcgtaatgttaagttatagtgaatactggtacagcaatttctaatttttaaaaattgagtaatggtgtaaaacactaattaattcataatcactctaattaattgtaatctgaataaagtgtaacaattgtgtaacctttttgtataaaatagacaaataaaaaatgggccaattagtttcctttttaatatgcttaaaataagcaggtggatct

SEQ ID NO: 19734 - DNA, 852 bp, Homo Sapiens
  misc_feature (116)..(184): n is a, c, g, or t
  misc_feature (326)..(346): n is a, c, g, or t
gcgtccgacatagtaaaacaaccttttatttccaaattgttaaagagccagccattgatgctgctacatgagttccatgctcaagagccattgtaagagattaaggggtttctagnnnnnnnnnnnnnnnnnnnnnnnnnnnnnnnnnnnnnnnnnnnnnnnnnnnnnnnnnnnnnnnnnnnnngattaaaacatacacacagctgttagcataaagtcgtggggggcattttctggaatgctcagcagttctgattaactgccaagcccaggttgcctctcatgaggcaactgaaaaaatcctgtgtcttgatagcatgggtgcnnnnnnnnnnnnnnnnnnnnnctgcattcatgccttaactcgggttactgcacaactttagttcttgacttagtctgcaccgtcatctagattgtattgtacatctcggtctgaacttcatcctggcaaaaacaaagttgcaggcacaacagtttaagaatgcattcctccagaagagtatctggtcaggttgaccctgagccttctttggacttgatttggaacttagcctggaaagcgaaagtggactgtccaacagaaagatgtcaacaaggaaaagaggagagccaagcgctagcatgccttttgcctctgcatatctgtgcacactgtatgttgttcatgatagcttgtctacaacttgactaggttggagttctggtaatagtggcaatcttgacattcttggtcagagtttagagagatgtaagactttcaattaatgtcttatttactcctttatgttgattagtctttgatacatgtgctgaatcagaaacctaaataaagataattttttaaaatgt

SEQ ID NO: 19735 - DNA, 518 bp, Homo Sapiens
gcacgaggatttcttatcaccacagtaagttcctactaggcaaaatgagagggcagtgtttcctttttggtacttattactgctaagtatttcccagcacatgaaaccttattttttcccaaagccagaaccagatgagtaaaggagtaagaaccttgcctgaacatccttccttcccacccatcgctgtgtgttagttcccaacatcgaatgtgtacaacttaagttggtcctttacactcaggctttcactatttcctttaaaatgaggatgattattttcaaggccctcagcatatttgtatagttgcttgcctgatataaatgcaatattaatgcctttaaagtatgaatctatgccaaagatcacttgttgttttactaaagaaagattacttagaggaaataagaaaaatcatgtttgctctcccggttcttccagtggtttgagacactggtttacactttatgccggatgtgcttttctccaatatcagtgctcgagacacacctcgtgc

SEQ ID NO: 19736 - DNA, 1670 bp, Homo Sapiens
gcacgaggagttctcttggtccagttggcttggataaaatgttggtggatgatattggtgatgtaaccattactaacgatggtgcaaccatcctgaagttactggaggtagaacatcctgcagctaaagttctttgtgagctggctgatctgcaagacaaagaagttggagatggaactacttcagtggttattattgcagcagaactcctaaaaaatgcagatgaattagtcaaacagaaaattcatcccacatcagttattagtggctatcgacttgcttgcaaggaagcagtgcgttatatcaatgaaaacctaattgttaacacagatgaactgggaagagattgcctgattaatgctgctaagacatccatgtcttccaaaatcattggaataaatggtgatttctttgctaacatggtagtagatgctgtacttgctattaaatacacagacataagaggccagccacgctatccagtcaactctgttaatattttgaaagcccatgggagaagtcaaatggagagtatgctcatcagtggctatgcactcaactgtgtggtgggatcccagggcatgcccaagagaatcgtaaatgcaaaaattgcttgccttgacttcagcctgcaaaaaacaaaaatgaagcttggtgtacaggtggtcattacagaccctgaaaaactggaccaaattagacagagagaatcagatatcaccaaggagagaattcagaagatcctggcaactggtgccaatgttattctaaccactggtggaattgatgatatgtgtctgaagtattttgtggaggctggtgctatggcagttagaagagttttaaaaagggaccttaaacgcattgccaaagcttctggagcaactattctgtcaaccctggccaatttggaaggtgaagaaacttttgaagctgcaatgttgggacaggcagaagaagtggtacaggagagaatttgtgatgatgagctgatcttaatcaaaaatactaaggctcgtacgtctgcatcgattatcttacgtggggcaaatgatttcatgtgtgatgagatggagcgctctttacatgatgcactttgtgtagtgaagagagttttggagtcaaaatctgtggttcccggtgggggtgctgtagaagcagccctttccatataccttgaaaactatgcaaccagcatggggtctcgggaacagcttgcgattgcagagtttgcaagatcacttcttgttattcccaatacactagcagttaatgctgcccaggactccacagatctggttgcaaaattaagagcttttcataatgaggcccaggttaacccagaacgtaaaaatctaaaatggattggtcttgatttgagcaatggtaaacctcgagacaacaaacaagcaggggtgtttgaaccaaccatagttaaagttaagagtttgaaatttgcaacagaagctgcaatcaccattcttcgaattgatgatcttattaaattacatccagaaagtaaagatgataaacatggaagttatgaagatgctgttcactctggagcccttaatgattgatctgatgttccttttatttataacaatgttaaatgcaattgtcttgtaccttgagttgagtattacacattaaagtaaagtacaagctgt

SEQ ID NO: 19737 - DNA, 890 bp, Homo Sapiens
gcacgaggagaaactgttggagtttatatacacaggaactttaaatcttgacagttggaatgttaaagaaattcatcaggctgctgactatctcaaagtggaagaggtggtcactaaatgcaaaataaagatggaagattttgcttttattgctaatccttcttctacagagatatctagtattactggaaacattgaattgaatcaacagacttgtcttcttactctgcgagattataataatcgagagaaatcagaagtatctacagatttgattcaggcaaatcctaaacaaggcgcgttagcgaaaaagtcatctcaaacgaaaaagaagaagaaggctttcaactccccgaaaacagggcagaataaaacagtgcaatatcccagtgacatcttagagaatgcatctgttgaattattcctagatgcaaataaactgcccacacctgtagtagaacaagttgcacaaataaatgataattcagaactcgagttgacatcagttgtggaaaatacttttccagcacaagatattgtgcacactgttacagtgaaacggaaacgtggaaaatcacagccaaactgtgctctgaaagaacactctatgtctaatatagccagcgtcaagagtccttatgaggcggagaactccggggaagagctggatcagaggtattccaaggccaagccaatgtgtaacacatgtgggaaagtgttttcagaaaccagcagtttgagaaggcacatgagaatacataaaggagtcaaaccttacgtctgccacttatgtggaaaggcatttacccaatgtaaccagctgaaaacgcatgtaagaactcatacaggtgagaagcccatacaatgtgaattgtgtgataaaggatttg

SEQ ID NO: 19738 - DNA, 856 bp, Homo Sapiens
cccgggctgcaggaattcggcacgaggattacacacatatatttaacagtacagttttacacagaatgctaagagcacttttcttcatattttacagaagggcttgaaacatacagactattcgtaatcatacaatagcacatccaaatctaactcctaaatagatgatgcattataatttgtttagaatttaaaggcttaatggcaataatcaggggaggaagaagagtatgtttattttacataactgacggaaaaataaattcaacaaatagtaaatagaatttaatatggtctcatgcgccctgaaggaggtggtgcccgatttggaggggtaattgctatgtccaagtaatctcctatctggaacttctgcgactgcagggtcatggaatcatcagtcccctttctgccagacatggtgctgccaatctccttaactcgatagccaggtcttttaacatctgtaaaaacgattgcaaaattgaagtgagtgcccttctttctagcttctgggtagacttcttttactaagcttgtcagttctttcaaggttgcatccatccaagtgtagatctgcaactcgctggacggtacatttccccgggagaactcgtccattcggtggtggcggccgttattggtggtgaagacccgtagcaacagtgggcatgtcttctcgcggtcgatcggtttctctggctccttcttaatttcctcctgggtaacgcgcgactccaccgccatcttcctcctacggcctgcgagacgctcgccctgacctccgacccctgcctcgtgccgaattcctgcagcccgggggatctttaaatgtctagagcggccccccccgcgg

SEQ ID NO: 19739 - DNA, 1198 bp, Homo Sapiens
  misc_feature (158)..(180): n is a, c, g, or t
gcacgaggcggaggagaagtagcagtcgctggcagagcacacaggctgctctgggggatgagctggtgcgtttaaggaacaggccagcactggcattcgcaagcagtggggaaggggagagatgccgaggtggtcagtatcctgactttcagaggccnnnnnnnnnnnnnnnnnnnnnnngctagattgatattaaaaactcatgtggaggaactcaaggaatgtttagaagaccaaaagtccccaatgacaggaacaaaagcaaccaatttttaactttctcttctcattcctgttttcattgatttcccacatgtagtccttttgctcaggaagtctttggggaaattaaggatctttgaagctctgaaataggtgatcaggttagtggtgtctgtcagctgtctaagaggttggaaaatgaactactcaagatagtcacgaaaatactgaaagtttgatttttctttccatatttgaattaattttttctgtttgactggaaggggtttttgtataactaaaacctcagcgcataaaggagatttaaaaggagcacatgatttagtgggtgggccatgaaactagagatgggatttgggggtgaatttgtcaatatctggattttaatccagacatctctgctaacaagcctttggtaagtcacttcagatacttttcctcctttttacaaagagagggctggcttagttatttgccaaagccccttccaggcctgaattccacaagtacgatttactgtagtgtcttatcactctttcatgtcacaatagcgtggagcattagagaaaagcctagacttttagttgatagccagttgaaatatcattgatagaattttagttttaggaaaaattggtttgatttctagctttattactattaggtatgtgagcttgggcaaatcgcttaatctttgagtctagttttctctcaaaatgagaacattaggctaaatgatttccgagtttccagctagtcctagagttctatatttctacatagttgaattattttatcatgctgttgctggggaatatgactaacccttttgaagctactaattttatgtcgagctttaaagtccataattgttatcttcagaaaatattatttgacctacagtatgtccaaatcaatttaataaaatcgctttataacagggaaaacctcgtgc

SEQ ID NO: 19740 - DNA, 686 bp, Homo Sapiens
gcacgagggtcctttgggtccatgtaccccacacgcattgaaggggccacacgactcttctgtgatgtgtataatcctcagagcaaaacatactgtaagcggctccaggtgctgtgccccgagcactcacgggaccccaaagtgccagctgacgaggtatgcgggtgcccccttgtacgtgatgtctttgagctcacgggtgacttctgccgcctgcccaagcgccagtgcaatcgccattactgctgggagaagctgcggcgtgcggaagtggacttggagcgcgtgcgtgtgtggtacaagctggacgagctgtttgagcaggagcgcaatgtgcgcacagccatgacaaaccgcgcgggattgctggccctgatgctgcaccagacgatccagcacgatcccctcactaccgacctgcgctccagtgccgaccgctgagcctcctggcccggaccccttacaccctgcattccagatgggggagccgcccggtgcccgtgtgtccgttcctccactcatctgtttctccggttctccctgtgcccatccaccggttgaccgcccatctgcctttatcagagggactgtccccgtcgacatgttcagtgcctggtgggggctgcggagtccactcatccttgcctcctctccctgggttttgttaataaaattttgaagaaacc

SEQ ID NO: 19741 - DNA, 886 bp, Homo Sapiens
gcacgaggaaagttttggtcaggactgtaaatctctcgcagaccctgggagctcagatgatgatgatgttagtagtttggaagaagaacaagaattccacatgagaagtaaaaacagtttacagtactcagcaaaagaacatggaatgcctgaaaagaatccagctgaagggaatacagtatttgtttataatgataaaaagggcaccgaagacccaggagactcacatcttcagtggcagctcaatctccttacacacatagaaaatgtgcagaacgaagttaccagcaggatggacctaatagaaaaagaagtcgatgttctggaaagctggcttgatttcacaggggagttggagccaccagatcctcttgcaagattgccccaacttaaacgccacataaaacagctcctaattgacatgggcaaagtacagcagatagcaactctttgctctgtatgacaacagtgaacacttaatgaaagaatgtggctttcttcagtcaaagcatttttattatccacgtgatggctaagtggataatttaaaagcttagtaatgtctggtcattcactgatttgtgatgtcaataggatggcaccttggaaagaaaaatgaagaacaactttatcaaggaagctagtatttaaaaacaaattcatgagcaagctgcaaatgagaatgtgttatatgccaaggaacaatgaagtagaatataatgtatactaaggatttcaagttctcagaattttttgagtagttgcttacgtgaagctcaagatacctgtagaaagaaatatggtatattttgtatagttttaatagaaagatctatgtttataaaccagcacttgggccaaaaacaaaattgtaaaggaaatttaa

SEQ ID NO: 19742 - DNA, 1080 bp, Homo Sapiens
  misc_feature (809)..(863): n is a, c, g, or t
gcacgaggcccacactcgcctcccgggccccacggtggagctgcccgcccggccttgtggcagaggctcctcccgcggggacggccccgacggcttctctgcgagtctctctttatgttcaggtcgcttggtcggttcgtctcccatttgccatccaggcctcacacccacactcgagcccacccggccggccagctttagaggaggggaggagcagggcgagttcacattattccttttccatcggaagtggcgctcgtgcattcaacttgttcccgctcatggaacccctctttaaaaagacgcagggcacctgtgagcgcaggagcgagcctaaggccacccagcggcagcgcccgtgtcctgggcactcagcgtgctgggcagagcaggtgcgatggccccagtcctagcagccctcgcccatgtcctgtgcccttacatggctcccggactgtgcagggagccgatacgtttgctgatagcaatactggaaccaccgggtgcgatggcagtgaggagactgcccagtgcctttggggctgtgcttgcaataaagaaagaatttcctggaaaggcagtctgcaaaagagggaaccggtgactcagaaagacagatgttttggtaatttaccccaaatgtgccatccacatagtgctttttcctcttgcccttcggcttgtttgaatctcacaattatgtatttaattctcaaagaaatatgtatctgtagccgtttgttgacactaatacagatgattaaggaaaacagctgatctttggggaagggagctaccaacactttatnnnnnnnnnnnnnnnnnnnnnnnnnnnnnnnnnnnnnnnnnnnnnnnnnnnnnnntatttacagggaaatttttcagggtttttaaaagagtatgtgattggtagtaagagacacacagaatgtttatgaagaaattgcattttctttttcctttacatttgaacttctttatagtttaaatataacgtcttgagatggcacattcctacgattgaagaaggggtcttgagatcccctaaacttgcatacccagttttttggatattgtaat

SEQ ID NO: 19743 - DNA, 926 bp, Homo Sapiens
  misc_feature (736)..(785): n is a, c, g, or t
gcacgaggcagctctctgaggccaaggatctccaggctcgaaaggccttcaactgcaaatactgcaacaaggaatacctcagcctgggtgccctcaagatgcacatccgaagccacacgctgccctgcgtctgcggaacctgcgggaaggccttctctaggccctggctgctacaaggccatgtccggacccacactggcgagaagcccttctcctgtccccactgcagccgtgccttcgctgaccgctccaacctgcgggcccacctccagacccactcagatgtcaagaagtaccagtgccaggcgtgtgctcggaccttctcccgaatgtccctgctccacaagcaccaagagtccggctgctcaggatgtccccgctgaccctcgaggctccctcttcctctccatacctgcccctgcctgacagccttccccagctccagcaggaaggaccccacatccttctcactgccatggaattccctcctgagtgccccacttctggccacatcagccccacaggactttgatgaagaccattttctggttctgtgtcctctgcctgggctctggaagaggccttcccatggccatttctgtggagggagggcagctggcccccagccctgggggattcctgagctggcctgtctgcgtgggtttttgtatccagagctgtttggatacagctgctttgagctacaggacaaaggctgacagactcactgggaagnnnnnnnnnnnnnnnnnnnnnnnnnnnnnnnnnnnnnnnnnnnnnnnnnnaggaaaccctcaaccaccctccacgaggtgtgactaactatgcataatccacccccagtgcagccccaggcctgcggaggcggtggcagactaaagtctggaaatgcccgagccaggcagctatttcagccttctgtttgg

SEQ ID NO: 19744 - DNA, 785 bp, Homo Sapiens
gcacgaggcttccttcctctaccactagagagatgactccaggtgagattaaattctctgttcatgtggagtctgtcctgaatcgtgtacctcagccagagtaccgtcagctgctggttgaagccatccttgtcctcaccatgctggcagatattgaaattcatagcatcggaagcatcattgctgtggaaaaaatagtgcatattgccaatgacttgttccttcaagaacagaaaacccttggcgcagatgataccatgttggcaaaggatcccgcatctggcatctgtactcttctgtatgacagtgcacccagtggcaggtttggcaccatgacctacctctccaaggcagccgccacctacgtgcaggagttcctgccccacagcatctgtgccatgcaatgagggctttggttcctggcttctgggagccttttgacagctggtccctgcctcggttgattgtgcatggaactaaaatgttattgcctaatcactccaaccctgcccctttctgtcccatccttcccaagaagagagaactttttcgataaactaactactgtagaagaagtgaacacttacctggaggctcaccttgcagaaccagtgacaatcttatgagtataatgaacactcagccaggcctgtcatgattggctttatttctttcatcattcataaaagtttgcatgtgtttttattctctagatctgttaccaatatagttttctaactcctgtttggggagcaagtgttaataataacttatccctaaaaaaa

SEQ ID NO: 19745 - DNA, 1225 bp, Homo Sapiens
gcacgaggctattaccgtgtgcagggccgggcagtgctgcccatccgctggatggcctgggagtgcatcctcatggggaagttcacgactgcgagtgacgtgtgggcctttggtgtgaccctgtgggaggtgctgatgctctgtagggcccagccctttgggcagctcaccgacgagcaggtcatcgagaacgcgggggagttcttccgggaccagggccggcaggtgtacctgtcccggccgcctgcctgcccgcagggcctatatgagctgatgcttcggtgctggagccgggagtctgagcagcgaccacccttttcccagctgcatcggttcctggcagaggatgcactcaacacggtgtgaatcacacatccagctgcccctccctcagggagcgatccaggggaagccagtgacactaaaacaagaggacacaatggcacctctgcccttcccctcccgacagcccatcacctctaatagaggcagtgagactgcaggtgggctgggcccacccagggagctgatgccccttctccccttcctggacacactctcatgtccccttcctgttcttccttcctagaagcccctgtcgcccacccagctggtcctgtggatgggatcctctccaccctcctctagccatcccttggggaagggtggggagaaatataggatagacactggacatggcccattggagcacctgggccccactggacaacactgattcctggagaggtggctgcgcccccagcttctctctccctgtcacacactggaccccactggctgagaatctgggggtgaggaggacaagaagggagaggaaaatgtttccttgtgcctgctcctgtacttgtcctcagcttgggcttcttcctcctccatcacctgaaacactggacctgggggtagccccgccccagccctcagtcacccccacttcccacttgcagtcttgtagctagaacttctctaagcctatacgtttctgtggagtaaatattgggattggggggaaagagggagcaacggcccatagccttggggttggacatctctagtgtagctgccacattgatttttctataatcacttggggtttgtacatttttggggggagagacacagatttttacactaatatatggacctagcttgaggcaattttaatcccctgcactaggcaggtaataataaaggttgagttttccac

SEQ ID NO: 19746 - DNA, 1246 bp, Homo Sapiens
gcacgagggcgacgcgactctggtgcgggccgtcttcttccccccgagctgggcgtgcgcggccgcaatgaactgggagctgctgctgtggctgctggtgctgtgcgcgctgctcctgctcttggtgcagctgctgcgcttcctgagggctgacggcgacctgacgctactatgggccgagtggcagggacgacgcccagaatgggagctgactgatatggtggtgtgggtgactggagcctcgagtggaattggtgaggagctggcttaccagttgtctaaactaggagtttctcttgtgctgtcagccagaagagtgcatgagatggaaagggtgaaaagaagatgcctagagaatggcaatttaaaagaaaaagatatacttgttttgccccttgacctgaccgacactggttcccatgaagcggctaccaaagctgttctccaggagtttggtagaatcgacattctggtcaacaatggtggaatgtcccagcgttctctgtgcatggataccagcttggatgtctacagaaagctaatagagcttaactacttagggacggtgtccttgacaaaatgtgttctgcctcacatgatcgagaggaagcaaggaaagattgttactgtgaatagcatcctgggtatcatatctgtacctctttccattggatactgtgctagcaagcatgctctccggggtttttttaatggccttcgaacagaacttgccacatacccaggtataatagtttctaacatttgcccaggacctgtgcaatcaaatattgtggagaattccctagctggagaagtcacaaagactataggcaataatggagaccagtcccacaagatgacaaccagtcgttgtgtgcggctgatgttaatcagcatggccaatgatttgaaagaagtttggatctcagaacaacctttcttgttagtaacatatttgtggcaatacatgccaacctgggcctggtggataaccaacaagatggggaagaaaaggattgagaactttaagagtggtgtggatgcagactcttcttattttaaaatctttaagacaaaacatgactgaaaagagcacctgtacttttcagccactggagggagaaatggaaaacatgaaaacagccatcttctatgcttctgaataatcaaaactatttgtgattttactttttaatagatatgactttgcttccaacatgggatggaattaaaaataaataataaa

SEQ ID NO: 19747 - DNA, 1801 bp, Homo Sapiens
  misc_feature (540)..(550): n is a, c, g, or t
gggtaacaaatattttaattcattaaaataaaacttaaaaattacatgcttagtctacacaagtttaacttactttagtcacttagtgaattgtgaaattggctcccattagtggtcaggagaatgtatttggtgtagaaaccaaataaatcaagctattatcgccttgtgagtacaaacaatgtttatttgtttgtaaagtgccaggtttatatttaagtaaacattaaaatctgcgttgaagcagtgaggctgcatcttttaactggctgtgctggttaaaggactgtttaatcccgctgtgctaagctcactaaagggtcacccctcactttaaagccaagactgccattgtcactgctatggtaagtcacagccagccaggccttctggcaaaaggtgatactaccagcactataaacagacaggactggttgtgaggtagctacacagttttaaagatgctgttaatgaacattacggacaattcatggtgtggctagttggtaacacttcagctgatttttcttatgagatggnnnnnnnnnnntcagccaagtaagggcacatcttcagttcatttagaagtcagcatccaaggtaaaagaattctctgttggacttgacatcactcccatcctctgatactcgcctactctcttctcaaagaagttagtctttccttccagtgaaatattctccataaagtcaaatgggttctctactctgaaaaccttgctaaaacccagttccagcataagtctgtctgccacaaactcaatgtattgcttcattagagtgcaattcatcccaatgagcttcacaggcaaggcctcagtgaggaactcctgttctatccgaacagcattgataattatttctcttactctctcctccgatggtttgtgtaccaggtgtttgaacatcaggcaagcaaaatcacagtgtaaaccctcatctctgctaataagttcattagaaaatgtgaggccaggcatcagtcctcgtttcttgagccagaatatcgacgcaaaagaaccggaaaagaaaatgccttccactgcagcaaaggctacaacacgttcaccataggtagcctctttgtccccaatccagcgcaaggcccagtctgccttcttcttgacacaaggcatcgtttcaatggcattgaagagaaattccctttctttgggatcttttatgtaagtgtcaataagaagactatacatttcagaatgtatgttttccatggcaatttggaagccatagaaacagcgggcttctgtaatctgaacttcttggctaaatcgctccaccaagttttcatttactatgccatcgcttgctgcaaagaaagccagaacatgggatataaaatatctctcctcgggtttcagggattcccagtgctgaatgtccttggagaggtccacctcctcggcggtccaaaaggaagcctctgccttcttatacatctgccagatatcatggtactcgatggggaagatgacaaagcggcgggggttttctctcagcagcggctcatcctccacgccgggggcagctgctttagttttcggctccgtgggctcctggaagatcctcctcgcggtcttgctggccaggacgcgggtcccgctcagggccggcggcgtgttctccttgtcgaccaagctgagccccttcagcggcgagagctgcagctgctgcgggtccgtgatgggcgcgagcgggacacggagggagagcatagtggcggcgcagcgaagcagagcgagcagccaggacaggaccctcgtgc

SEQ ID NO: 19748 - DNA, 1009 bp, Homo Sapiens
gcacgaggcaggaaagcttttggaaaacgtatcacctttcccagattctcggattctcgactctttgcaacagcacttgcttgcggaactcttcctggaatgcattcactcagcatccccaaccgtgcaacgtgtaacttgtgcttttgcaaaagaagttgatctgaaattcctctgtagaatttagcttatacaattcagagaatagcagtttcactgccaacttttagtgggtgagaaattttagtttaggtgtttgggatcggacctcagtttctgttgtttcttttatgtggtggtttctatacatgaatcatagccaaaaacttttttggaaactgttggttgagatagttggttcttttaccccacgaagacatcaagatacacttgtaaataaagctgatagcatatattcatacctgttgtacacttgggtgaaaagtatggcagtgggagactaagatgtattaacctacctgtgaatcatatgttgtaggaaaagctgttcccatgtctaacaggacttgaattcaaagcatgtcaagtggatagtagatctgtggcgatatgagagggatgcagtgcctttccccattcattcctgatggaattgttatactaggttaacatttgtaatttttttctagttgtaatgtgtatgtctggtaaataggtattatattttggccttacaataccgtaacaatgtttgtcattttgaaatacttaatgccaagtaacaatgcatgctttggaaatttggaagatggttttattctttgagaagcaaatatgtttgcattaaatgctttgattgttcatatcaagaaattgattgaacgttctcaaccctgtttacggaacttggtaagagggagccggtttgggagagaccattgcatcgctgtccaagtgtttcttgttaagtgcttttaaactggagaggctaacctcaaaatattttttttaactgcattctataataaatgggcacagtatgctcctt

SEQ ID NO: 19749 - DNA, 1177 bp, Homo Sapiens
gcacgaggagacaacgacgaccctcagctcgccagtccggtcgctggcttcgccgccgccatggcaatgagacagacgccgctcacctgctctggccacacgcgacccgtggttgatttggccttcagtggcatcacgccttatgggtatttcttaatcagcgcttgcaaagatggtaaacctatgctacgccagggagatacaggagactggattggaacatttttgggtcataaaggtgctgtttggggtgcaacactgaataaggatgccaccaaagcagctacagcagctgcagatttcacagccaaagtgtgggatgctgtctcaggagatgaattgatgaccctggctcataaacacattgtcaagactgtggatttcacgcaggatagtaattatttgttaaccgggggacaggataaactgttacgcatatatgacttgaacaaacctgaagcagaacctaaggaaattagtggtcatacttctggtataaaaaaagctctgtggtgcagtgaggataaacagattctttctgctgatgacaaaactgttcgactttgggatcatgctactatgacagaagtgaaatctctaaattttaatatgtctgttagtagtatggaatatattcctgagggagagattttggttataacttatggacgatctattgcttttcatagtgcagtaagtttggacccaattaaatcctttgaagctcctgcaaccatcaattctgcatctcttcatcctgagaaagaatttcttgttgcaggcggtgaagattttaaactttataagtatgattataatagtggagaagaattagaatcctacaagggacactttggtcctattcactgtgtgagatttagtcctgatggagaactctatgccagtggttcagaagatggaacattgagactatggcaaactgttggtaggaaaaacgtatggcctttggaaatgtgtgcttcctgaagaagatagtggtgagctggcaaagccaaagattggttttccagagacaacagaagaggagctagaataaattgcttcagagaattcagattgcatctttccttcagcgcctgatgttaaggcctgagcgtcaatcatatgttgcagttattatacaactgactaaaacaagcaagcagagaaaagcatc

SEQ ID NO: 19750 - DNA, 1063 bp, Homo Sapiens
ccccgggctgcaggaattcggcacgagggttttactgagttgcactccctttggcagaatgaagagcgggcagccacagttaccaagaagacttatgagatctggcatcgacggcatgactactggctgctagccggcattataaaccatggctatgcccggtggcaagacatccagaatgacccacgctatgccatcctcaatgagcctttcaagggtgaaatgaaccgtggcaatttcttagagatcaagaataaatttctagctcgaaggtttaagctcttagaacaagctctggtgattgagggaacagctgcgccgggctgcttacttgaacatgtcagaagacccttctcacccttccatggccctcaacacccgctttgctgaggtggagtgtttggcggaaagtcatcagcacctgtccaaggagtcaatggcaggaaacaagccagccaatgcagtcctgcacaaagttctgaaacagctggaagaactgctgagtgacatgaaagctgatgtgactcgactcccagctaccattgcccgaattcccccagttgctgtgaggttacagatgtcagagcgtaacattctcagccgcctggcaaaccgggcacccgaacctaccccacagcaggtagcccagcagcagtgaagatgcagactgataccacctccaccgctgagcagtgaccttcctcactttctcttgtcccagcttctcccctgggggcctgagagaccctcaccttccttctgcccatcttccatgttgtaaaggaacagccccagtgcactgggggaggggagggagtgaggggcagtggtgcccttcctgcagaagagacatgcagcagtagcgctggcgccatctgcaggagctggcgggctggccttctggaccctggcttctccccactgtaacgcctgttacacacaaactgttgtgggttcctgccaggcttgaagaaaatgatctgaattttttcctcctttgggtttattttggtgggtttatttgtgtttcttttcctcttttggggggtattcaaagtgggct

SEQ ID NO: 19751 - DNA, 936 bp, Homo Sapiens
gcacgaggaagaggaggctatttgatgacataacacttgaatattttatgcctcattctgtttatcagttctcgcaatctgtataaatgcattttagaactgatagacagtaaacttgaatttatctttgataagaatacatgccactgtacattcagatattatttaaatttgcaaacacattgttctatatgtaagggtactgtatgtaaaactctgtattaaaactattccacatatcctaaaatttcagcttgcctttttgcggccttatattttgatgtaaatattaaaagaatgtgcaaaacagtcagaaatttttattgccttttgagattctccaacttgacaaatgtgccaaagatcaacagacagaaaatatcatcctgtgtatttacttgtcatactttaactttgtgaaagatcttactgataaatgaaaagctttagcagaggtggtattgtggggtaattgcttaaatttacatatcaaagtaaaaaagtagtgcctgtattccatgtgtggagtaaatttgctaatgtctatattttatgattgatactattatttttcctttgcattttaaaatagtggctctaatattttccctgtcatggctacattctagacattgaatttatatcttctttttttcagatacggagcaaatagcatccttaacctatgaataatggtgttgcctagattcttgtcacacacacagaagaccctttgtacctagtaacattcatcctcttgattcctggtgaacacggttaaattcatgcacatttgttcttgtagtttctaaaaattagatcaatttatttgttagctcagcaaattgaaaattccattattagattaatgaatttttgctctgcttatatgtatacgaactggaaatctgaattttaaatttagatctttaaatc

SEQ ID NO: 19752 - DNA, 1126 bp, Homo Sapiens
gcacgaggcacggcccggcgcgtggctcgggctcgggcggagctggagacgtgtggagctgttcgaggactcgcgggtgtgcagtgcacctatgatatgtgttttagaaatagccattaaactttggtttgaatgaagaatgtctctcaatccacctatatttctcaaacgaagtgaagaaaatagttcaaaatttgtggaaacaaaacagtcacaaactacttccatagcttcagaagatccccttcaaaacttatgtttagcatctcaagaagttcttcaaaaagctcagcaaagtgggagatcaaaatgtctcaaatgtggtggttccagaatgttctactgctatacatgttatgttccagttgaaaatgtacctattgaacagattccacttgtgaagcttccattgaagattgacatcattaaacatccaaatgaaacagatggcaaaagtactgctatacatgcaaaactcttagcacctgaatttgtaaacatttacacgtatccgtgtattccagaatatgaagaaaaggaccatgaagttgcactcatttttcctggacctcagtctatctcaataaaagatatttcttttcatctgcaaaaaaggattcaaaataatgttagaggcaaaaatgatgaccctgacaagccatcttttaaacgcaaaagaactgaagaacaagagttctgtgatttgaatgacagcaagtgcaaaggcacaacactgaaaaaaattatatttatagatagcacctggaaccaaacaaacaaaatattcactgatgagcgacttcaagggttgttacaagttgagttgaaaacaagaaaaacttgcttttggcgccatcaaaaaggaaagccagatactttcctttctacaattgaagccatttactactttctggtagactccatactgatatattaaaagagaaatacagagggcaatatgacaatcttttatttttctattcttttatgtaccagttgataaagaatgccaaatgctctggagataaggaaacaggaaaacttacccattagtttttaacaagccacttatgtctttttattttgctaacattaataaacttatatttgtgctttgttttttctt

SEQ ID NO: 19753 - DNA, 755 bp, Homo Sapiens
cttgagggaagaagaaaggagagaatctgctgcagcagacgctggctttgctctctttgagaagaagggagccttagctgaaaggcagcagctcatcccagaattggtgcgaaatggagatgaggagaatcccctcaaaaggggtctggttgctgcttacagtggtgacagtgacaatgaggaggagctggtggagagacttgagagtgaggaagagaagctagctgactggaagaagatggcctgtctgctctgccggcgccagttcccgaacaaagatgccctagtcaggcaccagcaactctcagaccttcacaagcaaaacatggacatctatcgacgatccaggctgagcgagcaggagctggaagccttggagctaagggagagagagatgaaataccgagaccgagctgcagaaagacgggagaagtacggcattccagaaccgccagagggcttgtgaacagaccggagaggacagtggattgtttatactccagtgtacatagtgtaatgtagcgtgtttacatgtgtagcctatgttgtggtccatcagcccctcacattcctaggggtttgagatgctgtaggtggtatgtgacaccaaagccacctctgtcatttgttgtgatgtcttttcttggcaaaagccttgtgtatatttgtatattacacatttgtacagaattttggaagattttcagtctagttgccaaatctggctcctttacaaaagaaataccttgagaaaa

SEQ ID NO: 19754 - DNA, 850 bp, Homo Sapiens
gcacgaggcgcgctcccagcatggctgtctctgcagtcgagggcaaggactctgcgtgcattctccactgccgtctactcggccactccggtcccgacacctagcctgccggaaagaacacccggaaatgaaaggccaccaagaagaaaggcactacctcctaggacagagaaaatggctgttgaccaggactggcctagtgtttacccagttgcagcaccatttaaaccctctgcagtacctcttcctgttcgaatgggttatccagtaaaaaagggcgtgcccatggcaaaggagggaaatctagaacttttaaagattcccaattttctgcatttgactcctgtagcaattaaaaagcactgtgaagcccttaaagatttttgcactgagtggccagccgcactggacagtgacgagaaatgtgagaagcattttccaattgaaattgacagcactgattatgtttcatcaggaccatctgttcggaaccccagagcacgagtagtagtcttaagagtaaagctttccagtttgaatttagatgatcacgcaaagaagaaattaattaaacttgtaggagagcgatactgcaagaccacagatgtgcttaccatcaaaacagataggtgccctttaaggaggcagaattacgattatgcagtgtatctactaacagtgttataccatgagtcttggaatactgaagaatgggaaaaaagtaagactgaagcagacatggaagagtatatatgggaaaatagctcatcagaaagaaatatcctggaaacgctctccagatgaaagctgctgagaaaaatatgggaaataataaagaagagctccttgg

SEQ ID NO: 19755 - DNA, 918 bp, Homo Sapiens
gcacgagggcacgctgcagcccggagtccccgttcacactgaggaacggagacctgtgaccacagcaggctgacagatggacagaatctcccgtagaaaggtttggtttgaaatgccccgggggcagcaaactgacatggttgaatgatagcatttcactctgcgttctcctagatctgagcaagctgtcagttctcacccccaccgtgtatatacatgagctaacttttttaaattgtcacaaaagcgcatctccagattccagaccctgccgcatgacttttcctgaaggcttgcttttccctcgcctttcctgaaggtcgcattagagcgagtcacatggagcatcctaactttgcattttagtttttacagtgaactgaagctttaagtctcatccagcattctaatgccaggttgctgtagggtaacttttgaagtagatatattacctggttctgctatccttagtcataactctgcggtacaggtaattgagaatgtactacggtacttccctcccacaccatacgataaagcaagacattttataacgataccagagtcactatgtggtcctccctgaaataacgcattcgaaatccatgcagtgcagtatatttttctaagttttggaaagcaggttttttcctttaaaaaaattatagacacggttcactaaattgatttagtcagaattcctagactgaaagaacctaaacaaaaaaatattttaaagatataaatatatgctgtatatgttatgtaatttattttaggctataatacatttcctattttcgcattttcaataaaatgtctctaatacaatacgtgattgcttgtgtgctcaacatacctgcagttgaaacgtattgtatcaatgaacattgtaccttattggcagcagttttataa

SEQ ID NO: 19756 - DNA, 1828 bp, Homo Sapiens
ccacgcgtccgagagaaaatcactgttacaccgtcatctaaagagctgctcttttatcccccttcaatggaagccgttgtcagtggagaaagctgcccagggaagctgatcgagatccacgggaaggcaggcctgtttttagaaggccagatccaccccgagttggaaggagtcgagattgtcatcagtgaaaagggggcaagttcaccgctgatcacagtctttactgatgacaaaggtgcctacagtgttggccccctgcacagtgacctggagtacacggtgacctcacagaaggagggctatgttctgactgcagtggaaggaaccatcggagacttcaaggcctatgccctggcaggcgtaagctttgagataaaagctgaggatgaccagcccctcccgggagtcctcttatccctgagtggtggcctgtttcgttccaacctcttgacccaggacaacggcattctgacattctcaaacctgagccctggccagtattacttcaaacccatgatgaaggagttccggtttgagccatcctcacagatgatcgaggtgcaggaaggccagaacctgaagatcaccatcacggggtaccgaaccgcttacagttgctatggcacagtgtcttccttaaacggagagcccgaacaaggggttgccatggaagcggtgggccagaacgactgcagcatttacggagaagacaccgtgacagacgaagagggcaagttcagattacgtggattgctgccgggatgtgtgtaccacgttcagctcaaggcagaaggcaacgaccacattgagcgggcgctcccccaccatagggtgattgaggttgggaataatgacatcgatgatgtaaacatcatagttttccggcagattaatcaatttgatttaagtggaaatgtgatcacttcctctgaataccttcctacattatgggtcaagctttacaaaagcgaaaacctcgacaatccaatccagacagtttcccttggccagtccctgttcttccatttccccccactgctcagagatggcgagaactatgttgtgcttctggactccacactccccagatcccagtatgactacatcttgcctcaagtttctttcaccgcagtgggctaccataaacacatcaccttgatttttaatcccacgaggaagctgcctgaacaggacatcgcacaaggatcctacattgccctgccattgacgctgctggttctgctggccggttacaaccatgacaagctcattcctttgctgctgcagttgacaagccggctacagggagtccgcgcgctcggccaggcagcctctgacaatagcggcccagaagatgcaaagagacaagccaagaaacagaagacaaggcggacttgaggaggaaggggacagttgcagtctcacttgggacaggccacagccaggggtccggccactacccgcccgtgggataaaagccaaaagcatgcgtcagctaacttcagcctgtgctgctgggcccgcaccccatgtcccttgtcactgtggcatcctgcacccatcctcacccctccgtagagcccctcgtgcaatgcaatgaatggaccctcctgtcactctgctgaacagaatttattttctgagtcaaatataatttattattatttttgtcaaagaagtatttaaagctgtgctgtggtgtgagaatgtcatttcttgatcttcagccttcgtttgcaagaagagttccagttgatgtggtgtttggttccatggcgggtaccctaaggattcatctgttttcttcacttccctttgcatctga

SEQ ID NO: 19757 - DNA, 771 bp, Homo Sapiens
cctaaaaaaagatcccccgggctgcaggaattcggcacgaggccccaataccaaactatatttactgtttacagtagtaaaggacaacaaataatgtacaaattggtgaataaacacaacagagccaacaaacatcccacccgagcccatacagcaaacaggaaatgagaacatttcagcaagatttcaagcaagcaagagatgatgggtcattgttcaggtgactgtaaaaaggcagagaatggccaccaagcagcaatggagcctcagggaaggacaataggcagaactatgaaaatgtttaattggtatagatcccaaaatatttcacagaactgaaatcaccagactaatgcataaattcaatacctatttggaaagcagcacggcacaaacccacgagaagaacatgaagtcatcattccatgggttcatttgtaaccacacttggaagtagctcttatacacgacaacataactgcaaattcagcaatacttagtcttacttttttatgtatagaccataatcattcatcagaagcaaatactagaagaaatctgaggccacaacaccattaccaaatgagaaatgtgggaatttcttcaatattaagagggagaaaaaggccaattttggttgtgccaatccttgcctgtgtaccaacgccaggtactgagcaaggagtggggtgggacgggtggcaggggggtgggtcctggggcctcagaccccgaagttacatgcttgaaggccgagagcacgtgggggtc

SEQ ID NO: 19758 - DNA, 947 bp, Homo Sapiens
  misc_feature (413)..(421): n is a, c, g, or t
gcacgagggtaacttaatgtttgcaaggccagagtgtttgaaagttttgtatttaactttataattaccttgtcctttctggttgactatactaggctaagccctcttaatagccatgagtgtaaaatttagtttactcatttttcacaaattgtatataaacatgcacttcactacattggtaatacactaaaattgtggtccttttcctcttgtgaccaccacatgtctagtgattattttgtttatttggttgctacttacctagcacattgtaatgttccatgaatgctaatattaaattttgtaaaaataacttatttataaataatttttaaagagaaaaatctcatataatttgtcataacctttcaataaataaaactgttaaatcatggcctgatatcatcttnnnnnnnnntctcagaatctgaaataagccctaaatttctccccaaaatcaagactcttgagagcatcataggtctccttgtgctaccttttactccctataaatagaaatccaagtatactttaatatgtgtatattttttggttttcctacagcttctccccatctttcaaaagaatcacgaaatttcttctgcaccttggctattctgtttaaatctgataatcagttgatctcaggtttttcactgtacattactttgcagatatggacagcctttacaaaaataatttttaaatgcttaattattttaatttgttctttaaggtaccttcagttattttgaattaatttaacttctcaattatgccaaagttgcacttgcatgaaataaatattattttgtccttgtatagactggaacagtaataaatttatctgaattaaaattgttttatgctgtgatcagtaagcccagtaagctaggtaaagttgtatggatataactatagtacacctctattttacttttggc

SEQ ID NO: 19759 - DNA, 1021 bp, Homo Sapiens
gtagaagactcagaggagaatctttcttatggctccctctgttgagattggaattggaagagaacttaattttttgtatttaaaatgcagtgtcatgcctataagcatttctcctatataggactgctttgctagtgtgccctcttgctgtgtcttacttcataaggagttgtatcttcccacctccatttcaatactgccggttaggacctaagtagaagagcagtaaaggctgattgacacacagggggatggagttggtccttgtccattctctcacccttgctgtgcatgtatcaatccttatcccagaaggtactatttagactgtatagactgatttagattacatactttagaggattaaggaaaccatagagtttgggccttggaactgttactgccttgtcctagagttgtcctgatcaggcttggggcctagttacagattagtcttaaagaattgcattaacttaaaaaaaatcaaaccttggcaagagctaaaataatttggagatatctttgcccttgacttgtagacgacatctaagaggatgaagaaaggagagtctaagtgagactctggcctacttcctaacaatgtcttggaagtgggatgatggtaaaggagaaaggccagtccaatccctctgccttcagatagggaactcaaatcctgaaattactgttttctttctggccttttctcctggttagaggaggaagcggaaagtagttttgagtaatactttgttcatattaccccccttttgttttttgtttctggcccctctaccaatagggcagtagcctcctgccctggatgggtataaggtgggcttggtccaacaggttcccagagggtacatactcctttctggggagagaatgctccctaccatatagttgacagtggttaggaactctccctttccctacctaccttccttttaatagcagaattcctatttttcccttgattatgtgtattgatcaccctgcaatcctattatgtatctga

SEQ ID NO: 19760 - DNA, 644 bp, Homo Sapiens
gtgtgagccactgcgcccggctgcttggacactttttttaaccacttgttaaagaaatacattaaaatgaaaatgttttgatgccattcaaatactgttacttaaaaactctggtttttaagaaggatataatataataccagagaaatctgctttgaatcttggaaggctttttcaccctaaagcaactgccttttgaataagcatcataaaaaaatgcagtgtaagatgattcacaaatagtgcaaaataaggcaatagtcttccatcattttgtcagggtttcctaataaggttaagttctctttcaacaccccccttagtcaaaggcagtttttggtttctttggtaatacgtacaaattgcttcattccacatctgtcatttctagtccatcactttctttgacatataccactgaacccaaggctttcccagaaagagatcctgtgccagtcccttcaatccttgtaaagttttcttgatttgtgtcttctaatcttattttcttggtgttttgaaataactgagtcgctggttccaacctgcttttttcagtccctcgtattaagtgatcatccacttttgaatccatatgtatagcagatacctgagtagcagatttactaagtggaaatcccatt

SEQ ID NO: 19761 - DNA, 859 bp, Homo Sapiens
gcacgagggctggatgtgtctaggagattggaagactcatggcagtgaatactatgagtgcagtcgttacaaggagaatcctgacatcgtgaaccagagccaacaagcccaggcgagggaagccctcaagaagtacttattctactttgagaggtgggaaaaccacaataaaagcttgcagctagaggcacagacataccagcggattcacgagaagattcaggagagggtcatgaacaatctggggacatggatcgactggcagtacctacagaatgctgccaagctcttggccaagtgtcgatacaccctgcaatacacctacccatatgcatattacatggagtccggacccaggaagaagctgtttgaataccagcaggctcagctggaggctgagatcgaaaacctctcatggaaagtggagcgtgcagacagctatgacagaggggacttggagaaccagatgcatatagcggagcagcggaggagaaccctgctgaaagatttccatgacacctaagttgggatgtggatgtgccggggtgaggaagatgtggctgcaaggtctcccggctgccatactgcatgctgcaggctctgcctttcatgaccccaggcaacagccagggccccactcctgagagacactggcaacacctcttagttgatttctgttttcttctcttttcactttttgtttctaccagggtagaggccatgttgaactggcctcttttcaggacttttatttccccctggatggttgttgggagggagggaaagtgttttctgaatggctattaatagtataaatcctaacaactttatgtaactttccaaggttgtacaattatac

SEQ ID NO: 19762 - DNA, 594 bp, Homo Sapiens
gcacgagggtcactcctgggctcaagtgatccagccatcttggcctcctgggattacagccgtggggccaattttttaactcagatcttgctgagaccaggagcatctgatttaacaggaagtttcagattataccgaaaagaagttctagagaaattaatagaaaaatgtgtttctaaaggctacgtcttccagatggagatgattgttcgggcaagacagttgaattatactattggcgaggttccaatatcatttgtggatcgtgtttatggtgaatccaagttgggaggaaatgaaatagtatctttcttgaaaggattattgactctttttgctactacataaaagaaagatactcatttatagttacgttcatttcaggttaaacatgaaagaagcctggttactgatttgtataaaatgtactcttaaagtataaaatataaggtaaggtaaatttcatgcatctttttatgaagaccacctattttatatttcaaattaaataattttaaagttgctggcctaatgagcaatgttctcaattttcgttttcattttgctgtattgagacctataaataaatgtata

SEQ ID NO: 19763 - DNA, 1090 bp, Homo Sapiens
  misc_feature (69)..(99): n is a, c, g, or t
  misc_feature (899)..(908): n is a, c, g, or t
gcacgaggcatgtctattttgaattggatcgttacaaatgagcatatttgatgcggaaatttctgggannnnnnnnnnnnnnnnnnnnnnnnnnnnnnnttgacattcattgagccaaaagagatgtggagaaacatttttcacctttctgtttggcctgattaacatttaaattcttgccaaaattaaggtaacttttaaaaaacaccttttataggtggatccagcagtctggcaacgcccacagttaccacaacacagaaaactgatcgtgctataaaatggacgctaaactatgaaaacagtgtgacattgttctctgttcttccagagccagtaacatgcttgctcgtgctttctacttctagctgatcattcttttcccaacatatatttacaaatttaccaaattttacctagaattttaggaccaaatggttctcactctttatgctgcaaagacctggatgatgtttggtaactatagaaaaatagaaattacactcaggatcactgttactgctattgccactgatgattcctgcaaaaatataatcgaagttttccatcaaatgtataatatgctattaatacacattagatgataacagttgttccatgaatgattctatgaagctatgcatcttagacctcttgagctgtgaattagcactattttctatagttacttattctctggatcattttataatttccatattaatttcaaatatgctcgtgttattcttcagtgatttccacaattgtgcattttattctttggtttaagtactgaagcatataatgaaagtaattgctaagtagcagcttaaaaattcaattatccgattgtatttaacatctttaagagcatgatcataaagagctatttttgacannnnnnnnnnacttttttaacatttagagttagtaagggttttatatctcttctgtccatattgttttcaaggaatgaggtgtttaggtggctggaaaagcatttgtaggaagttagatttgaatatagacaaggtgggttattcacgttgagaatgttatttgaagaatgcctgtgaagccaggtgtgggt

SEQ ID NO: 19764 - DNA, 934 bp, Homo Sapiens
gcacgagggttcagcaaagagagcttgcagtgacctccccaaaggatggctccatctccattctggggtctgatgatgccactacttgtcacattgtggtcctgaggcacacaggtaatggggccacctgcttgacacattgtgacggaaccgacaccaaagctgaggtccccttgatcatgaactccataaaatccttttctgaccacgctcaatgtggaaggctggaagtacaccttgttggaggcttcagtgacgacaggcagttgtcacaaaaactcactcatcaacttcttagtgaatttgacaggcaagaagatgacattcacttagtgacattatgtgtgacagaattaaatgaccgggaagaaaacgaaaaccactttccagtaatatatggcattgctgtcaacattaagactgcagagatttacagagcatcctttcaagatcggggtccggaggagcagcttcgtgctgcgcgaactttagcaggaggaccaatgattagcatttatgatgcagagacagaacaacttcgtataggaccgtactcctggacaccatttccacatgtggatttctggttgcaccaagatgacaagcaaatactagagaatctttccacttcgcctctggctgagccaccccactttgttgaacatattagatctaccttgatgtttttaaaaaaacacccatctccagctcacacactgttttctggaaataaagccctactctacaaaaaaatgaagatggcttgtgggaaaagatctcttctccaggaagttaaaaaacatgaattaccaaagaaagcaccttcttggcctgacagaccattggtggggctggcacgaatccagatctggatcctacatctgttgggtcttaggcctccttccctcctcagtgtctttcaaatgactttcat

SEQ ID NO: 19765 - DNA, 1206 bp, Homo Sapiens
cccgggctgcaggaattcggcacgaggcacagttgcagttagttattccaggtattatttttgttttcagaaaaagaaaactcagtagaagataatggcaagtccagactggggatatgatgacaaaaatggtcctgaacaatggagcaagctgtatcccattgccaatggaaataaccagtcccctgttgatattaaaaccagtgaaaccaaacatgacacctctctgaaacctattagtgtctcctacaacccagccacagccaaagaaattatcaatgtggggcattccttccatgtaaattttgaggacaacgataaccgatcagtgctgaaaggtggtcctttctctgacagctacaggctctttcagttccattttcactggggcagtacaaatgagcatggttcagaacatacagtggatggagtcaaatattctgccgagcttcacgtagctcactggaattctgcaaagtactccagccttgctgaagctgcctcaaaggctgatggtttggcagttattggtgttttgatgaaggttggtgaggccaacccaaagctgcagaaagtacttgatgccctccaagcaattaaaaccaagggcaaacgagccccattcacaaattttgacccctctactctccttccttcatccctggatttctggacctaccctggctctctgactcatcctcctctttatgagagtgtaacttggatcatctgtaaggagagcatcagtgtcagctcagagcagctggcacaattccgcagccttctatcaaatgttgaaggtgataacgctgtccccatgcagcacaacaaccgcccaacccaacctctgaagggcagaacagtgagagcttcattttgatgattctgagaagaaacttgtccttcctcaagaacacagccctgcttctgacataatccagtaaaataataatttttaagaaataaatttatttcaatattagcaagacagcatgccttcaaatcaatctgtaaaactaagaaacttaaattttagttcttactgcttaattcaaataataattagtaagctagcaaatagtaatctgtaagcataagcttatgcttaaattcaagtttagtttgaggaattctttaaaattacaactaagtgatttgtatgtctatttttttcagtttatttgaaccaataaaataattttatct

SEQ ID NO: 19766 - DNA, 1465 bp, Homo Sapiens
  misc_feature (481)..(497): n is a, c, g, or t
  misc_feature (1068)..(1076): n is a, c, g, or t
gcacgagggttttcccaaagtggagagaatcttcatagagaaaaagagaaggctgtttctttttcggctctgacgaaacactgaagtctgcgtaagagagactgtttgatgaccgtccctcatgcaacatgcacggtactcactaaaaatgaaaactgaagtggaaactaacctgtgttgcttataaagtgtgaaagcacaagcttataaatgtataaaatcttttctgggtgtgacgcacctgcgtccaagtttgaatttttatgatatgtaccacttaattactggcactgagtatcactgaatttcttagttttctagtggggaaacattattgagaagccctcccttattttaagtaagttgattaaatcttatgtgagttgccagttgtaatttttcaaaggaaaaattttgatggggtggaggaatgaattgccagataatctttctggaattccgagagaattccaaagagggnnnnnnnnnnnnnnnnnaggacatcttttgatacctttaaaagaaccactgtcaagtaatccttaaaaaaatatcttggaaaaggaaacagattttttcctgtgtgtaagcaataagtgaagttacatttgccctaaccctagggatgattctttacccagttttaaagcccatcatggtattctaaggtgttgacacactccatcctcagagcaggtcgaaaatattaaatagactggggactctatgatgggcagcctgtgctttttgacttcagtttgctatttttctgtgatcacattagtactgattcatagattctatcttttataattctggagaaaaagatttgttagttttgtaatttttttgtaagaccaaatgtatgtattttagtagctccattgcatgagaagagtgtaactcacactgacttgtgatatcagccttctctgggccttgtgtgtggagagctttctatcttaccaagtggtagggctaaaagaacaacagcctttttggtagtcacatagcagaatgatcagagttacattgcttattccaaaacattggttctttttaaaacannnnnnnnnacccaaagaaaagaataatagaaattactaacaataaatataaattcagagtgttgatataggattcagtatccagagtttatttttaatcttaatcctcagcttcttgggagttgctgggcttcagtgtctctgtggtttcaccagcttagcttgagctctggttattttggatcttttctgccttttttaagtaactgagtcatttttaccacacagtccagtttgcatgtatagctaggaaacatgtattgctctagattggacagtttaagtcattttaaagaaagttagttcatagttgttgctttttaactcatagtcaagcttcagtctttcaaagagaaatgtgtgattttcatttactttgctgatattttgtagttgga

SEQ ID NO: 19767 - DNA, 773 bp, Homo Sapiens
gcacgagggagagaagccttatatttgcagaaagtgtggacggggctttagtcggaagtccaaccttatcagacatcagaggacacactcaggatagaaactttatgtgtatagggaatgtggtacagcctttagccaggagtcatacttcatcagacaccagaggacacacacagtgctgtggctttttcagccattgctagataccaaagtggagacattctgtgtgtgattatgcatgagactgtactggtaagacttgtatctccatccacctgaaggagaattgctggctcattttcaggagccctgcccttcctcactgtggatggtgggttgtggaaacccggtcaggtaatgatagtggcaggaggcagtcaaatgcccaggcagataggggtgggtacctggtgaaacccaaccttaaagctgaagacagtcccggctaaatcctcatactgaattgagaacctgtcttcccatttggtgtgctttcctccgattgatcccaacccttcacctattttacgtatacctgccctttcctaattggtttttacactgctgtgcccaccttttgagtggtgcctttgcatacttacaaatcagtcaacgtgtattctcctattctgagcccataaaagacccagactcagctgcagtgaggagagaaatcaccctgctgtggggttggggaccactccctgcatcccctctccactgagagctgttcttttgctcaaaaaattcttttctacccatcctcacccttc

SEQ ID NO: 19768 - DNA, 963 bp, Homo Sapiens
gcacgagggttgcttctcagtattgtgttgcttctgattctatgaatgttcattttaagaccccttgttgaaatgggacagttggcagcggctctgatgagcccgagaagaggcctgcccttgggtgcggagtctccctccgcacgatgctcccacgcgtccaacttgcacccaaggggcttttccctcttccaagtggactccttcaaggaagctgcagctcggtcagcagagaaggggcctgccgccagcgccctggaggaagaggaagaggaacccaagaggatggcttgtctcccagcagccacaccggctttgtgctcagccagttcatttgagaattacatgaacgacagccttcgcaccgacgtcttcgtgcggttccagccagagagcatcgcctgtgcctgcatttatcttgctgcccggacgctggagatccctttgcccaatcgtccccattggtttcttttgtttggagcaactgaagaagaaattcaggaaatctgcttaaagatcttgcagctttatgctcggaaaaaggttgatctcacacacctggagggtgaagtggaaaaaagaaagcacgctatcgaagaggcaaaggcccaagcccggggcctgttgcctgggggcacacaggtgctggatggtacctcggggttctctcctgcccccaagctggtggaatcccccaaagaaggtaaagggagcaagccttccccactgtctgtgaagaacaccaagaggaggctggagggcgccaagaaagccaaggcggacagccccgtgaacggcttgccaaaggggcgagagagtcggagtcggagccggagcgtgagcagagctactcgaggtccccatcccgatcagcgtctcctaagaggaggaaaagtgacagcggctcctcatctggtgggtccaagtctcagagccgctcccggagcatgagtgactccccac

SEQ ID NO: 19769 - DNA, 865 bp, Homo Sapiens
gcacgaggatttattgcagtaatacaataaaagtttagaaaacatttgtatgactcaaactggtttggaagttgcagagcaatggggaattcctgcaacatgatactgtgaggagattctcgggcactagtcctctaacagcatgccactgaatgctcttccccaaattgagtccttacatgagtcccgtccactctacccaatggtgatatactgtttttcccccttacagatgtgcaaaacttttcttatattccataaccaaaaaatgtctttaacagaccattttaagcagcctgtttggtgcctgtgggtttttattagtattactttgtttcagtaaatcattttaaaatggaaaacatgaccaagttctatggctttttgtttaaacaaaataccagcttcaattttttaaaaagctgtttacatatggttctggcacctacatgaaagattttaatgagcagcaaaaagagtagaaaaaacagtggttgaaatgtatacttaagagtatttacagggtggatccagtgcaaaataatgaaacccaaaatatttcagcagtgtaagccagtatgttggtgttcaaaaccacaaaagggttcgatcacttaaccctatgtaaagtgcctctagttgatattaacaacaacaaacaaaatatatcctatccataaagttcccacatctttgtaaattttgtggaagtactctagatgagtttgtgatctctggattctattctttagcttcatctctcattcatggtttcataagaggcttaagaaaaccatgactgttgtgcatctctcttgggctcttcctctgtggcccattcagtggagctgaccttcctcttggg

SEQ ID NO: 19770 - DNA, 1289 bp, Homo Sapiens
gcacgaggccgacttccgtttccagttaccaaggcagggaggatccggtgttccaacccagggggaaaaatgcggcctttgactgaagaggagacccgtgtcatgtttgagaagatagcgaaatacattggggagaatcttcaactgctggtggaccggcccgatggcacctactgtttccgtctgcacaacgaccgggtgtactatgtgagtgagaagattatgaagctggccgccaatatttccggggacaagctggtgtcgctggggacctgctttggaaaattcactaaaacccacaagtttcggttgcacgtcacagctctggattaccttgcaccttatgccaagtataaagtttggataaagcctggtgcagagcagtccttcctgtatgggaaccatgtgttgaaatctggtctgggtcgaatcactgaaaatacttctcagtaccagggcgtggtggtgtactccatggcagacatccctttgggttttggggtggcagccaaatctacacaagactgcagaaaagtagaccccatggcgattgtggtatttcatcaagcagacattggggaatatgtgcggcatgaagagacgttgacttaaaacgaagccattccaaggacagacggctgtatggaaaggccgagctttgtttcctgtgtttgtgtggactccaccatcatgttgaattttgtcaacactctggcctcttcagggacttcttatttactgtactctctatcactgacaaatgcaggtggattcttattatatacagagatggctcaaaaatggggtttcagatctttgtgacgaaatagaatactgtttcatatttgaatcagagggcttcttgttctgagaaataggttcaaaatcattggaactaggaacaagaatagcttattgttatctgtgataacactgttttctaaacacaagattttcttttttattaatatgcaacatagacattgccataacagaataataaaccacatgtggggttttaaaaatgaaatttggctaataggagcaattcagctatttttctatacagtaattggtgtgtggtatagaagaaaaacgggttcaaaccccacttctgccacctaccagctatatggccttgaatgagtcattcagctttaataaggttcattttcttctgtttaaaaagacacaaaacttgaaaatcagctttggccatctacctgagaattagaaagtctgatttttggaattagaaatcatgattgtaggctgggcacagtggctcg

SEQ ID NO: 19771 - DNA, 1250 bp, Homo Sapiens
gcacgaggtttgtgttctgtccaaaaagtcactgaactcatacttcagtacatatacatgtataaggcacactgtagtgcttaatatgtgtaaggacttcctctttaaatttggtaccagtaacttagtgacacataatgacaaccaaaatatttgaaagcacttaagcactcctccttgtggaaagaatataccaccatttcatctggctagttcaccatcacaactgcattaccaaaaggggatttttgaaaacgaggagttgaccaaaataatatctgaagatgattgcttttccctgctgccagctgatctgaaatgttttgctggcacattaatcatagataaagaaagattgatggacttagccctcaaatttcagtatctatacagtactagaccatgcattcttaaaatattagataccaggtagtatatattgtttctgtacaaaaatgactgtattctctcaccagtaggacttaaactttgtttctccagtggcttagctcctgttcctttgggtgatcactagcacccatttttgagaaagctggttctacatggggggatagctgtggaatagataatttgctgcatgttaattaattctcaagaactaagcctgtgccagtgctttcctaagcagtatacctttaatcagaactcattcccagaacctggatgctattacacatgcttttaagaaacgtcaatgtatatccttttataactctaccactttggggcaagctattccagcactggttttgaatgctgtatgcaaccagtctgaataccacatacgctgcactgttcttagagggtttccatacttaccaccgatctacaagggttgatccctgtttttaccatcaatcatcaccctgtggtgcaacacttgaaagacccggctagaggcactatggacttcaggatccactagacagttttcagtttgcttggaggtagctgggtaatcaaaaatgtttagtcattgattcaatgtgaacgattacggtctttatgaccaagagtcttaaaatctttttgttatgctgtttagtattcgtttgatattgttacttttcacctgttgagcccaaattcaggattggttcagtggcagcaatgaagttgccatttaaatttgttcatagcctacatcaccaaggtctctgtgtcaaacctgtggccactctatatgcactttgtttactctttatacaaataaatatactaaagacttt

SEQ ID NO: 19772 - DNA, 941 bp, Homo Sapiens
cagaaaacaaacacagttttcaggatactcagttccagaacccaacatggtgtgactactgtaagaaaaaagtttggactaaagcagcttcccagtgtatgttttgtgcttatgtttgccataaaaaatgtcaagaaaagtgtctagctgagacttctgtttgtggagcaactgataggcgaatagacaggacactgaaaaaccttaggctggaaggacaggaaaccctcttaggcctgcctcctcgtgttgatgctgaagctagcaagtcagtcaataaaacaacaggtttgacaaggcatattatcaatactagttctcgtttattaaatttgcgtcaagtctctaaaactcgcctttctgaaccaggaaccgatctcgtagaaccttcaccaaaacacacacccaacacgtcagacaacgaaggcagtgacacggaggtctgtggtccaaacagtccttctaaacggggaaacagcacaggaataaagttagtgagaaaagagggtggtctggatgacagtgttttcattgcagttaaagaaattggtcgtgatctgtacaggggcttgcctacagaggaaaggatccagaaactagagttcatgttggataagctacagaatgaaattgatcaggagttggaacacaataattcccttgttagagaagaaaaagagacactgatacaaggaaaaaatcacttctttctgctgccttagctaaatcaggtgaaagggctacaagctctaacacttcttatgattcactacagagcggcattgaagatatagaaactttagaaagtctgtctttagaccagcactccaaaaataagcaagtacacagatgatacagaagagaccttgataatgaaataagccaactaatagactctcagccattcagcagcatatcagatgacttatttgggcccatcc

SEQ ID NO: 19773 - DNA, 836 bp, Homo Sapiens
gcacgaggtgtggacgaggatgccatgaacgcggccatccagcaggccatcaaggcccagccgtccatgtctcccaagaaggcgcccccagcgcctgcaaaggaggccaggaatgtcgtggccgtgggtactggtggccgtgggacccacgaccgagacccgagtgagaaaccaccccggctccagtggtttgaacagcaggcgaagaagttggcaaagcagcaggaggaggacagcgaggaggaggaagaggacctggatggagacgattgggaagatattgattctgatgaagaattggaatgtgaggatactgaagcaatggacgatgtggtggagcaggatgcagaggaggaagaggctgaggaaggcccaccccttggtgccatccctatcacggactgcttattttgttcccatcattccagctcgctgatgaagaatgtggctcacatgaccaaagaccacagtttctttattcctgatatagaatatctttcagatattaagggactgattaaatacttgggagagaaagttggtgttggcaagatttgcttgtggtgcaacgagaaagggaagtccttctactccacagaagctgtacaggcacatatgaatgacaaaagccactgtaagctcttcacagatggcgatgctgctttggaatttgcagacttctatgattttaggagtagctatccagatcacaaggaaggggaggaccccaatatgggctgaggagttgccctcagaaaataacttggaatatgatgatgaacccatggaattgattctgccttctggtgccagagtgggtcatcgctccttgatga

SEQ ID NO: 19774 - DNA, 903 bp, Homo Sapiens
gcacgaggaattggtctttctgctcaaggtgtgaacatgaatagactaccaggttgggataagcattcatatggttaccatggggatgatggacattcgttttgttcttctggaactggacaaccttatggaccaactttcactactggtgatgtcattggctgttgtgttaatcttatcaacaatacctgcttttacaccaagaatggacatagtttaggtattgctttcactgacctaccgccaaatttgtatcctactgtggggcttcaaacaccaggagaagtggtcgatgccaattttgggcaacatcctttcgtgtttgatatagaagactatatgcgggagtggagaaccaaaatccaggcacagatagatcgatttcctatcggagatcgagaaggagaatggcagaccatgatacaaaaaatggtttcatcttatttagtccaccatgggtactgtgccacagcagaggcctttgccagatctacagaccagaccgttctagaagaattagcttccattaagaatagacaaagaattcagaaattggtattagcaggaagaatgggagaagccattgaaacaacacaacagttatacccaagtttacttgaaagaaatcctaatctccttttcacattaaaagtgcgtcagtttatagaaatggtgaatggtacagatagtgaagtacgatgtttgggaggccgaagtccaaagtctcaagacagttatcctgttagtcctcgaccttttaagtagtccaagtatgaccccagccatgaatgaatatccccatttagcatcaggcaaggaagcaccgccacatttttcaggtttgaagtgtattatggtgtattcaataaagcacatcatcctattgcctagaataaccccgtc

SEQ ID NO: 19775 - DNA, 932 bp, Homo Sapiens
  misc_feature (834)..(844): n is a, c, g, or t
gcacgaggcttcagagcctctgaggggccaccacttctggcccaaaattgcagggttgtagatgaggctgcctgtggagaactggtgtgaggaggaagctgtttccaacaaagagcactttcatctgttgagatggctgtggtgagcaactgaacgagcctacgtgtgtacctgaattttccccgtaactcatttcttccatatgaagaaacaccaaactatgtacagagaactttttacaaaaggcagaccttttttaagctgtgtaacccacatagcctaaccacctggcagaatgactacgaataggggtcattgtgctggtaaaagcctctattacgactgtaagtaagttggatgttggcaaaattaaattgttacagtatttagagctgctgtagctgttccttcacaacataaaataggataaatgactagtacgtctttcaggtgggtggcaagcagaacatgcgtaatattctctacctggtctgtagctgtaactgtgatgtacagacaaagcaaaaattaaaagaacttatgaaaacaaatgcaatgatactaggatatacacttttgtatttttattcttatataaggttatttgctggctattgttggcctctagttcagtctgtgttatttaaattctaatatatgaattatttgaattgaattcatgttcggggccacgttgttgtatgtattgatgtacagccttgaatgtgaataattattgtaaactatattttacaacttttttctggctttattatataaattttctattgggtcagtgatttaatcatataatttaatgaatctgtttatccnnnnnnnnnnnccaaatacttgtgctttaggtgtagttaccagatgatgaattttcctcgtatggtcagtagtcttgtaataaaaagcatgtagagtgt

SEQ ID NO: 19776 - DNA, 1372 bp, Homo Sapiens
tcggcagccggaacagggccgccgtcggggagccccaacacacggtccacagctcatcatgatggacttggagctgccgccgccgggactcccgtcccagcaggacatggatttgattgacatactttggaggcaagatatagatcttggagtaagtcgagaagtatttgacttcagtcagcgacggaaagagtatgagctggaaaaacagaaaaaacttgaaaaggaaagacaagaacaactccaaaaggagcaagagaaagcctttttcgctcagttacaactagatgaagagacaggtgaatttctcccaattcagccagcccagcacatccagtctgaaaccagtggatctgccaactactcccaggttgcccacattcccaaatcagatgctttgtactttgatgactgcatgcagcttttggcgcagacattcccgtttgtagatgacaatgaggtttcttcggctacgtttcagtcacttgttcctgatattcccggtcacatcgagagcccagtcttcattgctactaatcaggctcagtcacctgaaacttctgttgctcaggtagcccctgttgatttagacggtatgcaacaggacattgagcaagtttgggaggagctattatccattcctgagttacagtgtcttaatattgaaaatgacaagctggttgagactaccatggttccaagtccagaagccaaactgacagaagttgacaattatcatttttactcatctataccctcaatggaaaaagaagtaggtaactgtagtccacattttcttaatgcttttgaggattccttcagcagcatcctctccacagaagaccccaaccagttgacagtgaactcattaaattcagatgccacagtcaacacagattttggtgatgaattttattctgctttcatagctgagcccagtatcagcaacagcatgccctcacctgctactttaagccattcactctctgaacttcttgggcccattgatgtttctgatctatcactttgcaaagctttcaaccaaaaccaccctgaaagcacagcagaattcaatgattctgactccggcatttcactaaacacaagtcccagtgtggcatcaccagaacactcagtggaatcttccagctatggagacacactacttggcctcagtgattctgaagtggaagagctagatagtgcctctggaagtgtcaaacagaatggtcctaaaacaccagtacattcttctggggatatggtacaacccttgtcaccatctcagggcagagcactcacgtgcatgatgcccaatgtgagaacacaccagagaaaggattgcctgtaagtcctgggcatcggaaacccc

SEQ ID NO: 19777 - DNA, 1212 bp, Homo Sapiens
gcacgaggagaacatagataccctggagcgaatagccgggctggaacaggaggacttggtggaggcgcacggcaccttctacacatcacactgcgtcagcgccagctgccggcacgaatacccgctaagctggatgaaagagaagatcttctctgaggtgacgcccaagtgtgaagactgtcagagcctggtgaagcctgatatcgtcttttttggtgagagcctcccagcgcgtttcttctcctgtatgcagtcagacttcctgaaggtggacctcctcctggtcatgggtacctccttgcaggtgcagccctttgcctccctcatcagcaaggcacccctctccacccctcgcctgctcatcaacaaggagaaagctggccagtcggaccctttcctggggatgattatgggcctcggaggaggcatggactttgactccaagaaggcctacagggacgtggcctggctgggtgaatgcgaccagggctgcctggcccttgctgagctccttggatggaagaaggagctggaggaccttgtccggagggagcacgccagcatagatgcccagtcgggggcgggggtccccaaccccagcacttcagcttcccccaagaagtccccgccacctgccaaggacgaggccaggacaacagagagggagaaaccccagtgacagctgcatctcccaggcgggatgccgagctcctcagggacagctgagccccaaccgggcctggccccctcttaaccagcagttcttgtctggggagctcagaacatcccccaatctcttacagctccctccccaaaactggggtcccagcaaccctggcccccaaccccagcaaatctctaacacctcctagaggccaaggcttaaacaggcatctctaccagccccactgtctctaaccactcctgggctaaggagtaacctccctcatctctaactgcccccacggggccagggctaccccagaacttttaactcttccaggacagggagcttcgggcctccactctgtctcctgcccccgggggcctgtggctaagtaaaccatacctaacctaccccagtgtgggtgtgggccttctgaatctaacccacacccagcgtagggggagtctgagccgggagggctcccgagtctctgcctccgctcccaaagtgggtggtgggcccccttcacgtgggacccacttccc

SEQ ID NO: 19778 - DNA, 932 bp, Homo Sapiens
ggaatttcggcacgaggatttgaaatccagattttaagggagttagaatgtgttattctctgatgggcctttatgaaacatagttaaaggttgccatagaaaacaaccaagtaaaatattttatatattacagtggttggaataaaaacagggttgaatgagttccagaaagcagggttctcaacctcgtggacagcaatctgcagaagaagagaacttcaaaaaaccaactagaagcaacatgcagagaagtaaaatgagaggggcctcctcaggaaagaagacagctggtccacagcagaaaaatcttgaaccagctctcccaggaagatggggtggtcgctctgcagagaaccccccttcaggatccgtgaggaagaccagaaagaacaagcagaagactcctggaaacggagatggtggcagtaccagcgaagcacctcagccccctcggaagaaaagggcccgggcagaccccactgttgaaagtgaggaggcgtttaagaatagaatggaggttaaagtgaagattcctgaagaattaaaaccatggcttgttgaggactgggacttagttaccaggcagaagcagctgtttcaactccctgccaagaaatatgtatatgcaattctggaggagtatgcaaattgcaagaaatcgcagggaaatgttgataataaggaatatgcggttaatgaagttgtggcaggaataaaagaatatttcaatgtgatgttggggcactcagctgctctacatatttgacaggccccagtatgctgaaaatcctcttggctcaccctgatgctccaatgtcctaggtttatggagcaccacacctactgagattatttgtaagaattgggagcaatgttgggcctatacgccccctggatgagaaagcctggctttattgttgggctatttgcat

SEQ ID NO: 19779 - DNA, 685 bp, Homo Sapiens
ggcggccgctctagaaccccataaaaatcccccgggctgcaggaattcggcacgaggatcagtctcaacatagaaagtccgtgcgtcctggtgcctcctacaaacggcagaatgaaggaaatcctgaaagagataaagagaggcctgtccagtctttgaaaacatcaagagatacttcaccctcaagtggttcagcagtttcttcatcaaaggtgttagacaaacccagtaggctaactgaaaaggaacttgctgaggctgcaagcaagtgggctgctgaaaagctagagaaatcagatgaaagtaacttgcctgaaatttctgagtatgaggcgggatccacagcaccattgtttactgaccagccagaggaacctgagtcaaacacaacacatgggatagaattatttgaagatagtcagctaaccactcgctctaaagcaatagcatcaaaaaccaaagagattgaacaggtttaccgacaagactgtgaaactttcgggatggtggtgaaaatgctgattgaaaaagatccttcattagaaaagtctatacagtttgcattgaggcagaatttacatgaaataggtgagcggtgtgttgaagaactcaagcatttcattgcagagtatgatacttccactcaagattttggagagcctttttagatttttctgctcaggct

SEQ ID NO: 19780 - DNA, 1282 bp, Homo Sapiens
  misc_feature (847)..(863): n is a, c, g, or t
gcacgaggagatgggaaccaacaaatgtgccagccaggcaggtatgacagcttacgggactaggaggcatctttatgatcccaaaatgcaaactgacaaaccttttgaccagaccacaattagtctgcagatgggcactaataaaggagccagccaggcagggatgttagcaccaggtaccagaagagacatctatgatcagaagctaacattacagccggtggacaactcgacaatttccctacagatgggtaccaacaaagttgcttcccagaaaggaatgagtgtgtatgggcttgggcggcaagtatatgatcccaaatactgtgctgctcctacagaacctgtcattcacaacggaagccaaggaacaggaacaaatggttcggaaatcagtgatagtgattatcaggcagaataccctgatgagtatcatggcgagtaccaggatgactaccccagagattaccaatatagcgaccaaggcattgattattagatccacacagaaggagctcagtatttagtcctttgtttttattcagtgagaaccaagctagccttgagtaatttttatcttgtcttcctaaaacactattaagcttattgtacttttaagaaaaattgccttacgtacattcctttttcctttttctgcctcttccctcaatagttgccttttagtgctgtaatagttaaatcctacagcataatcaataactcgcatatgaagtaaaaaggaatactgtgaaaggggagtactcttgtacagccagttcttttatgcaaaaatctatgcatttttacaatcttatattaaactggtattttcaaacaataggaaacnnnnnnnnnnnnnnnnnacagtttagtgtatctggtttctacatggaagactaaactcatgcttattgctaaatgtggtctttgccaactaaatttaagatgcagcattttagaaatttacatatcaatgtttctacagtattgtttgctaatttttaaataaagtcatgatcagtgtgcatttgtgattatatgtgtactcattctcttacctagcgaacaagatcttttcaaagtggtgtttctaaaagagcatgtacaaaagtggcctgtggacatttaggcctgggtgatgcatttgctcttcctgtttgtgccaatgtatcaatgtaaagttgctctgttttcttcaactgtatttattgctgcatttctcagcataaacttatcccattgtattttttataaataaatattttttttgaactttcatatg

SEQ ID NO: 19781 - DNA, 437 bp, Homo Sapiens
ccgcggtggcggccgctctagacatttaaaagatcccccgggctgcaggaattcggcacgaggaaccctcacatccagaaagacaaccccaagatagtacatgcttttgacatggaggatttgggagataaagctgtgtactgccgttgttggaggtccaaaaagttcccattctgtgatggggctcacacaaaacataacgaagagactggagacaatgtgggccctctgatcatcaagaaaaaagaaacttaaatggacacttttgatgctgcaaatcagcttgtcgtgaagttacctgattgtttaattagaatgactaccacctctgtctgattcaccttcgctggattctaaatgtggtatattgcaaactgcagctttcacatttatggcatttgtcttgttgaaacatcgtggtgcacatttgtttaaac

SEQ ID NO: 19782 - DNA, 1080 bp, Homo Sapiens
gcacgaggcatacactcactctgtctggtataggctaattttgaagaactcccataagtttctgctgcttctcccataactgctgccaccaccatcagaattcataatcaaacctaacctttttgtttggggcaccaaatctgaagacaaaattaatttgcaccagtaaacttcaagctgctttctttcttgaaaactaaacgtttaacgtataatgtctgtttggatactgttccaaattgttgattgcatgtggttaatgttgcattagagcactttgcaattgcataattcattaatgttttgtgagcttgcatttgtgagttattggatgatcagactgaattttgtcaagtatcacattgtacatcttgcctagatgtcgatgactgcaagtaataatacagtttataatgaaactatctacaattcttgttttagcacatctgttatccgtaaaacacctgtaactagcttttttaatttattatttgaattttaggatagcgaatcactaatttttagttgctgaggttggcattttagtgattattaagcacttctgtcagtctttgaaaaaagaacgtattttttgtgctttgaagatctctgaagaatttcttttataatagaatgggcatgtattgtaacagttttatgtcaaatgatctgtgctgtagaaaaacattaacccttgttcaaaaaagaaatggataaacttggcctttctaagtggtaagaatgacctgtcactataatatactgtatgtttacattttatttaaatttaatctcttatgtatagggtgataaccttccccagaaacaacagtgattgcgattgttttctagaaacttctttaaagtgccacatttggcagtacaaatgagtctgagtggaatagcccagagatttatatatagttgaatgtctaaaatggtaaaatgtgccactgtgtcaagttacaggtggcttatgtttttcatagtaattcaaatgacttcctattttgatagtaaatgtcatttataatatacctgccatttgagcctcactgcaaaattagtgcagaagaaaaa

SEQ ID NO: 19783 - DNA, 1575 bp, Homo Sapiens
gcacgaggctgagaagatattatggctgctgccacggagcataatcgcccgagcagcggtgacaggaacctggagcgaagatgcagccccaacctctcccgagaggtgctctacgaaatctttcgctccctacacaccctggttggacagcttgacctcagagatgatgtggtgaaaattacaatcgattggaacaagctccagagcctctcggcattccagcctgcattgctctttagtgcacttgaacaacacattttatatttacagcctttttttagcaaaacttcagtctccgattaaagaggagaatacaactgctgttgaagagataggaagaacagaaatggggaacaaaaatgaagtaaatgacaaattttccattggcgacctacaagaggaagaaaagcacaaagaaagtgatttaagagatgtgaaaaagacacagatccattttgatccagaagtagttcagataaaggctggaaaagcagaaattgacagacgaatatctgcatttattgaaagaaagcaagctgaaatcaatgaaaacaacgtcagggaattttgcaatgttattgattgtaatcaagaaaatagttgtgcaagaactgatgcgatttttaccccttaccccggatttaaaagtcacgtaaaagtttctagagttgtgaatacatacggaccacagactagacctgaaggaattccagggtcaggtcataaacctaacagcatgcttcgagactgtggtaatcaggctgtagaagaacgactacaaatattgaggcccacttgcggttacagacaggtggtccagtgccaagagacatttatcagagaattaaaaacttgaggataaaatccttgaattgtaaggcatctctcctgaatatttttcagtctgtaagcttttctggaaaaagaagaaaagttcaaccacctcaacagaactattcactggctgaacttgatgagaaaattagtgccctcaaacaagccctcctcagaaaatcaagagaagcagaatccatggcaacccaccaccttccatgaaaaactcctctcgtccttgtcattttacttttttgtatacatatgtgtaacttacactgttattaattcaacggatatatatttatcaatgtagacttctctgtgaagtcaaggtttattttcacatgagtccagcttgcagcaagtaatcttcaaatattccagtaagttttgaaataatgaatgcattgaaaatagcattgttggaatttattcccttctgttttaaaggaggtattttggaaattgaaaaacttaatttacaagtgctggtacatcttttttcttttgtggaccacaggaaggaagatttattttgatattgatactttaaaaggactttatatttgtaacattgatgttaaccagtttattagtttaaatcagtactttgcatataataagcattcaacaaaaatttattgactgaaatgaattttaaatgcatgtgtatgaacttgtttttcttaatctttaagatgtcagtattcatgtaaataaacaatagatccctcgtgc

SEQ ID NO: 19784 - DNA, 951 bp, Homo Sapiens
  misc_feature (48)..(58): n is a, c, g, or t
gcacgaggagtaggtaaatgacagacagctcatattctgttaaacagnnnnnnnnnnngaatacaaacatcacagtgatgaattttcacaaagctaacagatttgaactacagagcaatggaatatttataagcaagatgtcatggtattaatgaccaaattgcatctaactgggttttctaagctcaaaaacatttaaaatctcagacttaaaatttaaatctagacatgacaattgtaagcataccactcagtcatttaaaactattcagtgagtgctactcttcctgcataaatatttttttcctaacattattttttctcccaagatttagaatgtcacatctcatgttcctactagtaatcacacacaggattaaaagcccaaccaagaaagtattctttttataatatgttcttaaaagaagaaagaaaaattaaatgtgaacattttgtacaatagttgctgaagaacagtaaaaccaattccgaaatatcatgtgtactatacagaaaggcatggctcatggaaccaagtattcaacactacagcatttgaatatcagtctttaaaggttggtaatattacatcctgtacacagctctgtgtctctctacctggctagcgcatgcccaggatctgtctgcttttcagttggtaatttttctcaatatctgacagggcttgagcccgcagctgggcagcgtgaagccttttcttcaggtccttgcacttggacttagatgtgagctgactctcagaattctcactcctcatgatgttctctttactttccccactgaaatgaactttcttcttaattactggattacttgccagagacaggaacttccgttcctttagcaagctgtagttcttcaacagattttctgctctagccagtttgtcctctgctagtctctcacgaacacaaagctcctgcctcgtgc

SEQ ID NO: 19785 - DNA, 1240 bp, Homo Sapiens
  misc_feature (46)..(58): n is a, c, g, or t
taaaaatctgtctctcttttcttctctcataaagtgaattattccnnnnnnnnnnnnnatgtaagtgtatatattcttagtttttcttgaaatcattgtaatgttaactttgttgtttcaaatatcttggtgattgcttcattatctcttcaacaaaaaaaacctttaattttgccattgaaactgtagaactatgccatgcttttattagaagcagtgctctgtgttaacaacaagaatggtgtaattagaattgggatgtggatatttactgtatgacaacacatttacagttctgtaatgcaaggatgcagtttaaaaatgtgaagtagtgatggtttttgaaataagctttaaaatatagggatcttgaaggctccctggggtaactattttataacttagataaaatggctagtcatatctgtgtgtttgtaaagttatttttttaatattttaagattacaattttaacaaatgtagaaatgagccaaactatttaaattttaaaacagtaaaacaaaatgaaacttaatagctcacaaaattccagtccatgtttcatgacttattttagtcaatgaattttctatttatactaaacatatggacattttaaatgtgtttctaatatttttgattatctataatgtgcctgtcttcaattcacaagattgggttataacaattatttgccagattaacactagggaattatttgataaccagcttatcttatcagtagttttattgctgatcaggcaaaaatagttttccaaagttatttttaataaagtatatacaaaattcttatatattactagtcatgataaagtaaattaagcagtttttaaaacttagtgtgagtttgttcatcacaggtctgatatgagtttaagggatttcgcactccctgaatcagagaagtaagaccccttccttagattcctgttatacattttttaaaatgtagagtttgttttggagacattttcagtgcattgttattgccatatttatataatatgactattttaaaggctgtgaggccatggggtattggttaagttgcttgcttttgctttgtccattttcatcattttaaaatgggggataataacagaacttgtttcctagggccattgtaagtcacttgaataaaaaatagttttgaagcatgagagtcatacagagcggtccacctaaaaggcactcctgataataataaatgattttaaac

SEQ ID NO: 19786 - DNA, 889 bp, Homo Sapiens
gcacgaggctcaagtacaagtcctgtttctaaaaaaggcccaccccttaagactccagcctccaaaagccctagtgaaggtcaaacagccaccacttctcctagaggagccaagccatctgtgaaatcagaattaagccctgttgccaggcagacatcccaaataggtgggtcaagtaaagcaccttctagatcaggatctagagattcgaccccttcaagacctgcccagcaaccattaagtagacctatacagtctcctggccgaaactcaatttcccctggtagaaatggaataagtcctcctaacaaattatctcaacttccaaggacatcatcccctagtactgcttcaactaagtcctcaggttctggaaaaatgtcatatacatctccaggtagacagatgagccaacagaaccttaccaaacaaacaggtttatccaagaatgccagtagtattccaagaagtgagtctgcctccaaaggactaaatcagatgaataatggtaatggagccaataaaaaggtagaactttctagaatgtcttcaactaaatcaagtggaagtgaatctgatagatcagaaagacctgtattagtacgccagtcaactttcatcaaagaagctccaagcccaaccttaagaagaaaattggaggaatctgcttcatttgaatctctttctccatcatctagaccagcttctcccactaggtcccaggcacaaactccagttttaagtccttcccttcctgatatgtctctatccacacattcgtctgttcaggctggtggatggcgaaaactcccacctaatctcagtcccactatagagtataatgatggaagaccagcaaagcgccatgatatttgcacggtctcattct

SEQ ID NO: 19787 - DNA, 1138 bp, Homo Sapiens
  misc_feature (879)..(892): n is a, c, g, or t
gaaaacatgttttatcatcctctcaaagttggtagaactctgggaggtaaagatggaccagtgggatttgctgatttgtttataagcacattgtccccgcatgtttcctagcaccttttaaaacaacctttgacctggcagatgcacaaacagtatgggctttatctgagtgtgcagtgacactgaaaacaattcatctcaaacggggcccagaatgtgttcagtatcttcaacaagaatacctgccctccttgcaagtagctccagaaataattcaggagttttgtcaagcgcttcagcagcctgatgctaaagtttttaaaaattacttaaaggtgttcttccagagagcaaagccctgaggactggatttccctgtgcctacttcatgatcatgaattccagttaatttataaagaggcgatttttgtgtgccattcacactggtctttttcacattgttttgagcttattgcagtatatgttttgggatttttctgtaaaatgggtgtaattttcctaatacaggtatgtaacaacaaaagaagttgcctgcatgccggtccaaattgttctgtataaagatgctcttaaaagacacaagagttatcctagaaccttaattcttttttatttgaaattttaagtcaagtcctttataaagaccatagcagtggaaaacagtgtactttttaaaaaattgctgaatataaaatctttgaaaattttctttatgtgtgaagacacaaagtatgggggaagacagcaatcaaaactaactttttgtagatagccatttcatttctttaaactgtttcaacgccaatatgtattctacaaaagagaatggttttaggctccagtgttatactttttttnnnnnnnnnnnnnnaaaataaattttacgtagtgaaatcttccaagtcttttctggaattattataaatactttagttttattttctcatcttaatctctccataatttcccatttaaaggtttacaaatatgagtgtgtggatgctttaattcatttaacctcactcctcaaaggtaacatgcaacttagttctgttatatgagagtctttttctttaatgtactggaaaaagcctatgtgaatctgttgatagaattt

SEQ ID NO: 19788 - DNA, 1501 bp, Homo Sapiens
gcacgaggccaccccaaaggaaaggtaaactgaaatttcccttggacatatgtgaaatctttttgtctttatagtgaaacaaagccagagcatctttgtatattgcaatatacttgaaaaaaatgaatgtatttttttctccaaagaacagcatgtttcactcaatggtgaaaaggtggaaacatttatgtaactttatgtgtatctgtcttgatatctactgacattgtctatatgaggaaaatgattactggtcatgctcctgtgagttttttgggaaggtagggtcatttctccctgcctgctttgtgccaactagcatgttgcatctacatgcattatgagtctggttaggcattactttaaacatacataaagagacagtaggacattgtggctgagtctacccagctcaaggtaaaggagaatgttgctaattttttagcaaactagaccagcattattactcaaactaaaaatatcacacctgaaaaatttaatttaggacctaaaatgtctagattagctttctgctttttttatttgaataactcattcagttgtgaatgaattcctctttatttggtgccacagtcaccaaatgacaaggatttgccactttcccaccaaattgtgagtgcttgtaatttaggtctctctaccttaaattcagtataaggaaacgtaattatgattgattttttccaaagatgacaagctgtgttgaaatacattttttcttttgaccaattgacagaatctaataagctttaataatcttccccttttatgtgaaaagttttgagaactgtgaaatgtttaggaacaaactgttgaaatccattggaagggaaaaaagaaagtggtaccagtgttaccagctcaactaaaacctgcaattctgcatttcaactcttcacttcctcagcctacaaatagctcattagatgacattcacgcatgctgggtataggcaaggaaagtaattttcaaagtacatttgcagttctctttttcagagatgattctatgatagtgcctctgaaagttgatgcagcatttttgcctttccaaaaagtatttatcctcactgctttttgcagtacttgtattttcacagatggattatctggggtaattttcttcaaagggagtttgttatacacagtgaaaatgtattatagagtagaatagtaaagctctaggggtttcagaaagctttgatgaacagatgacaaacatctgataccccctccgcactgttacccagtgtgtatataatgacttgttatagctcagtgtgcccttgaatccatacagtttcttaaaagacaataaaatcttattaataaagttaatgtaacttctaagttctagaaaatgctgattctgtctgccccattcaattgggggctactaatgatttgttgcttggatttcctgagaatttctctatttgtagaggggtttttccttttacggtctgtgatgacattacttt

SEQ ID NO: 19789 - DNA, 563 bp, Homo Sapiens
cattaaaatcccccgggctgcaggacgcccgcgaacaaagagcccaaccaaagcgatgcttcgaatttttaaaacggaatctctgcacccaaatgcaggactggtgacttaaggagctgcgaagtctgatttaccggcctactctcgacctgccccccacccccagctcaggggaccttttgtctgaacgccagagctactgaccaggtcggggggccgcggtggggagtggaagagccggtcctgctgtccgccctcccagccccaggtggaaggctcagttgtcggaaagacaaaagcgatttcttcccactcctgcagggccagaagttcaggctgccccgcctccactgggggatcgcacctgtgaattacctgaggtatgcatttcccagaaccgtgggcgtacccaccttggggggcatgttggttctggggggaccacctctccttgcattcaggggctgtgaagctgagtaattttcggtcacagggcaggcccctgttgaaatttcatttgtcctgctctgggcccaaaggtggtggtggtttgggtcatcaga

SEQ ID NO: 19790 - DNA, 1314 bp, Homo Sapiens
gcacgaggaaagtcatctctataggaaggtgctgggcagggatcccagagaaagaaagggtccaagactccattaactgccctggatgaagggcactgctacagcagctagtaccagagactctcctatctcacggttgaggcagacccaggatagaatagagaataaaaggaatgcttataggaaacaattttgtatggaatgctagatggccaagcctcagcctttggtccagtgcaacccttgcctcgcttgtcaacagtgaaaaattagtttggttagaagaaccatctggaaacacaccagcttctgctaccttcatgctcattgttaaaaaaagattaaccagtgtgaacattctgatctgttaattccagggactgttttctttccaatggactgtttgttggtagaataacccccaaaagctcaaagctaaaatgcatcatcagtcctagtcggcagttccttaagaatggactggcggcgtggttgagctgatatggaaaagctgcaccttcctgcagaagatcaactgacctgctatcccaccccaaatttcagcctgaggtatatttcagtgaaggcaggtagctgtgcttctcagagcagagaagcagttttaagagcaaaaaggtagaggaaatctagaaaagaaccgtcttgatacagatttatcccatggtgtgaagggagggcaaagaacccagtggcacttcgcttatccagcaatttctgtcactgtggtgaccaacttctgcccgttccatagggtcttgaactgctcaggaactgggaattcattaaagtcaccgccttctgtaggaatgaggacattcatctcggaagatttggcactgactatttcacaatccagggaattcttgctcaggtaagcatggcagccatctgttttgttgatggatatggttggcactttacccattacctgaactttgacatccttactgttgattatctccacaatgcccaccacgtcatcgaataccaggccaagtttcttacagttatctactgtaatggagttaattttgcccttgatttgcaatgtcgtgttgacacacttgtatatgtaagccacctgtttcagctctgtgtcctcaatcaccaggttggaaacattttcctgattttccactctccacttcttgccctccagttcaagtacagctggctccttctttgtggctcgtttgggggatgggctggtttggggtttaggtgcagagaatggtttggggccactgcgtactggaccactctgagccttcagggcagggttcttcctcgtgc

SEQ ID NO: 19791 - DNA, 1154 bp, Homo Sapiens
ctggcgactgcccctgccctttaaacccgccctccccttttatacctgctcttgttctactgagaaaagcctctccagcaataatgttttctagtcacttcctccgtctccgggacggcgtgcctggacactgtaccgactttgatagatttctacactgaggtttgaattcatatcgcctgagttgcttttacttctctatacaaaatgattttgaagagattttaaagacgttcccttttgtattctcttcctcatccaccgccactgggcctgtcactgatggtggctctggtgtgaagtttgctttgtactgagggttggggtggggaagcaatttgtattttattgtttcttagcacaagcaggtgaactgggagcagctctgtgactccccctctttcacttcatagctcaccaggactgttttataaactgctgtatttggaaaccccttctttacttcccaggccagcaagctcttcactgaaactggttgaagggtgttgcacccttttgggcctagaattctgaactttatctgttctgtttctgtgggaggagaaggggaagtatgttttggggggctgcttcctgtctgagtaagccctcaggagcctctgctcccctgtgaacccactgaaccttctgagcccccactgcttctatggggctctctcttctgccttctcaggaaagctggtgtctgattttggccatcaggactctgacgtctctttggtcttgttgatttcctctgggcatatcccttccccagatctgctcctcccctttcacaggtgggatcggcactcagggggtctggaaagaaggtcataagggagcatgataggatttggggcagagggacaggctcctctggggaaaccccccagagctctttaccaaggatgaaagaggagccaggccttgggctcctgatgaggagaaaggggccccaccggggtctaatggtgacagtccaaacactccactggcctcctggcagaagccgagtgtgctggggtctccgaagagggtccctccctttttgggggaagtcagcccagcccctccaaaggtctgatgtctccactttcacccgcaggccttaccgctctgtttatagtgacccaccctagattcttccccaa

SEQ ID NO: 19792 - DNA, 2196 bp, Homo Sapiens
  misc_feature (873)..(881): n is a, c, g, or t
  misc_feature (2119)..(2130): n is a, c, g, or t
gcacgaggatcacagttgttgaccctcatggatggcctaaagcagagggcacatgtgattgttatggcagcaaccaacagacccaacagcattgacccagctctacggcgatttggtcgctttgacagggaggtagatattggaattcctgatgctacaggacgcttagagattcttcagatccataccaagaacatgaagctggcagatgatgtggacctggaacaggtagccaatgagactcacgggcatgtgggtgctgacttagcagccctgtgctcagaggctgctctgcaagccatccgcaagaagatggatctcattgacctagaggatgagaccattgatgccgaggtcatgaactctctagcagttactatggatgacttccggtgggccttgagccagagtaacccatcagcactgcgggaaaccgtggtagaggtgccacaggtaacctgggaagacatcgggggcctagaggatgtcaaacgtgagctacaggagctggtccagtatcctgtggagcacccagacaaattcctgaagtttggcatgacaccttccaagggagttctgttctatggacctcctggctgtgggaaaactttgttggccaaagccattgctaatgaatgccaggccaacttcatctccatcaagggtcctgagctgctcaccatgtggtttggggagtctgaggccaatgtcagagaaatctttgacaaggcccgccaagctgccccctgtgtgctattctttgatgagctggattcgattgccaaggctcgtggaggtaacattggagatggtggtggggctgctgaccgagtcatcaaccagatcctgacagaaatggatggcatgtccacnnnnnnnnntgtgttcatcattggcgctaccaaccggcctgacatcattgatcctgccatcctcagacctggccgtcttgatcagctcatctacatcccacttcctgatgagaagtcccgtgttgccatcctcaaggctaacctgcgcaagtccccagttgccaaggatgtggacttggagttcctggctaaaatgactaatggcttctctggagctgacctgacagagatttgccagcgtgcagtgagctggcctgcctggaccttgttccctgggggtgggggcgcttgcccaggagagggaccaggggtgcgcccacagcctgctccattctccagtctgaacagttcagctacagtctgactctggacagggggtttctgttgcaaaaatacaaaacaaaagcgataaaataaaagcgattttcatttggtaggcggagagtgaattaccaacagggaattgggccttgggcctatgccatttctgttgtagtttggggcagtgcaggggacctgtgtggggtgtgaaccaaggcactactgccacctgccacagtaaagcatctgcacttgactcaatgctgcccgagccctcccttcccctatccaacctgggtaggtgggtaggggccacagttgctggatgtttatatagagagtaggttgatttattttacatgcttttgagttaatgttggaaaactaatcacaagcagtttctaaaccaaaaaatgacatgttgtaaaaggacaataaacgttgggtcaaaatggagcctgagtcctgggccctgtgcctgcttcttttcctgggaacagccttgggctacccaccactcccaaggcattcttccaaatgtgaaatcctggaagtaagattgcaccttcttcctctcctgatcaacatcggtatgatgtctcctgttgcctcaccctttgtctgcagtatcactggataggactggtggaaagggagcagcctgacagagctccaaatgtggagaatatggcatccctccacctatatttgatgtggacggtaaggctaggcctgcaggatcccttatcctgaccaaagactgtgttggggtgccatttgaaaatcgcagggttgcaaaagaatacaatcttacttgcaggtggatattctctatactctcttttaatgcatctaaaaatcccaaacatcccctggttggtgatcacttacagttgtgtccacctttattttatgtactttgattnnnnnnnnnnnncgtttttgcctcgtgccgaattcctgcagcccggggcttatttttataggagttctagagcggccg

SEQ ID NO: 19793 - DNA, 601 bp, Homo Sapiens
gcacgaggccatgcccagccctgccttggtcccccaacccccagagcttggagtctgggccccacacccagccctgccttggtccctgagcctcagagcgtggaattgctgccctgtggacactggctgggaaggcaggtcttcccctagcacatggggaccccggcctcgagggtgacctccctaccccgcccctgccagccaccaagcgcaggtgcagcgggggccagactcctgccggcctcagaggacacctggcccagcacaggcagctagaagggccggtgggcaccggggccgggaagcccccacctcaccacctgagggcccctgggaggctcctctggcctggctgggctgggtctggggccgccacaggcccctcacggggcggcagaggcaacttcagtgtccctgttagagcaacacgggtccctccgtgggggggctgggtgcggcctcctgccgtgtatttcctccccagggagtggggcctccccgggagctgacgccaccaccctgcttagccctcacagggccccaaggtgtccgagtgtgttgggtctgaacgcgaaataaagaaatcctctcagagaaaaaa

SEQ ID NO: 19794 - DNA, 1010 bp, Homo Sapiens
cgtccgccgctagcgcggcctgggatgcgcttgggctccctgttcgttcccacatgcagggcagcacaaggagaatgggcgtcatgactgatgtccaccggcgcttcctccagttgctgatgacccatggcgtgctagaggaatgggacgtgaagcgcttgcagacgcactgctacaaggtccatgaccgcaatgccaccgtagataagttggaggacttcatcaacaacattaacagtgtcttggagtccttgtatattgagataaagagaggagtcacggaagatgatgggagacccatttatgcgttggtgaatcttgctacaacttcaatttccaaaatggctacggattttgcagagaatgaactggatttgtttagaaaggctctggaactgattattgactcagaaaccggctttgcgtcttccacaaacatattgaacctggttgatcaacttaaaggcaagaagatgaggaagaaggaagcggagcaggtgctgcagaagtttgttcaaaacaagtggctgattgagaaggaaggggagttcaccctgcacggccgggccatcctggagatggaacaatacatccgggagacgtaccccgacgcggtgaagatctgcaatatctgtcacagcctcctcatccagggtcaaagctgcgaaacctgtgggatcaggatgcacttaccctgcgtggccaagtacttccagtcgaatgctgaaccgcgctgcccccactgcaacgactactggccccacgagatcccaaaagtcttcgaccctgagaaggagagggagtctggtgtcttgaaatcgaacaaaaagtccctgcggtccaggcagcattagccatcgtgccctgctgaggggctggctgccttgagtggcctgatcgccacagcccttcttggaagaaaggcgtctgtgtttcaggttccacgcgagtcacctctttcgtcttaatgttcaccgtccacagctttggaataaaccctctgggaagtt

SEQ ID NO: 19795 - DNA, 961 bp, Homo Sapiens
gcacgaggattactattgggcttccagggcatttctgagaaataaccctgggtccttgtctagacccttatgccagaccccactccaaagagcggtaagaattccttagtgtcatagcccagacctgctgagctgcgaggcttaagtgtccctgatcaccaaatgtcctgtgcttcagggtagcgaggctccctcccagaaggtagttatacatgagggaaggacgctttacaactgggtatctaaactgatgagaacacatgttaagcatcactttaggactgagcctaggtagagttttattgtctcatttctacttgtcaattctgggaaagtgcctactgataagggagactcttcgatagaatgatgaatagtaattgggggggtcagcctttaaaaaggtcaacagcaatttaagtacttagcaatttaagtacaagaataaaggtatatgtgcagcctgccaattttctctttttcccctaaaatagccgattccacgactcttctttgcgggagaacatacgatccgtaactacccagccacagtgcatggtgctctgctgagtgggctgcgagaagcgggaagaattgcagaccagtttttgggggccatgtatacgctgcctcgccaggccacaccaggtgttcctgcacagcagtccccaagcatgtgagacagatgcattctaagggaagaggcccatgtgcctgtttctgccatgtaaggaaggctcttctagcaatactagatcccactgagaaaatccaccctggcatctgggctcctgatcagctgatggagctcctgatttgacaaaggagcttgcctcctttgaatgacctagagcacagggaggaacttgtccattagtttggaattgtgttcttcgtaaagactgaggcaagcaagtgctgtgaaataacatcatcttagtcccttggtgtgtggggtttg

SEQ ID NO: 19796 - DNA, 879 bp, Homo Sapiens
gcacgaggcgcggtgcagactgcggcggcggtggtctgaggaagttctatcttggcgctaaagcggagacgcatcccccgacccgaggctacgatgagcacaccggccgtgccccaggacctgcagctgcccccgagtcagagggcgcagtccgcattcaaagagcaaagaagacaaaaactcaaggaacatctgttgagaagaaaaacgctttttgcatacaagcaggaaaatgagatgttatccagtagagatcagagagttgtgacatctgaggaccaagttcaagaagggactaaagtgctgaaacttaaaacaaaaatggctgataaagaaaacatgaagagacctgcagagagcaaaaataatacagtggtggggaaacattgtattcctttaaaaccttcaaatgaactaaccaattcaactgtagtaattgacacacataaacctaaggatagtaatcaaactccgcatttgttactaactgaagatgatccccaaagtcaacatatgacattaagccaggcatttcaccttaaaaacaatagtaaaaagaaacaaatgactacagaaaaacaaaagcaagatgctaacatgcccaagaaacctgtgcttggatcttatcgtggccagattgttcagtctaagattaattcatttagaaaacctctacaagtcaaagatgagagttctgcagcaacaaagaaactttcagccactatacctaaagccacaaaacctcagcctgtaaacaccagcagtgtaacagtgaaagtaatagatcctccaatatgactgccactactaaatttgtgagcactacatctcagaacacacaacttgtgcgacctcctattagaagtcatcacagtaata

SEQ ID NO: 19797 - DNA, 898 bp, Homo Sapiens
gcacgagggataaccgctgtatgtgtcctgctgagaaccctggctgcagagaccagccctttaccatcttgtaccgggacatggacgtggtgtcaggacgctccgttcccgctgacatcttccaaatgcaagccacgacccgctaccctggggcctattacattttccagatcaaatctgggaatgagggcagagaattttacatgcggcaaacgggccccatcagtgccaccctggtgatgacacgccccatcaaagggccccgggaaatccagctggacttggaaatgatcactgtcaacactgtcatcaacttcagaggcagctccgtgatccgactgcggatatatgtgtcgcagtacccattctgagcctcgggctggagcctccgacgctgcctctcattggcaccaagggacaggagaagagaggaaataacagagagaatgagagcgacacagacgttaggcatttcctgctgaacgtttccccgaagagtcagccccgacttcctgactctcacctgtactattgcagacctgtcaccctgcaggacttgccacccccagttcctatgacacagttatcaaaaagtattatcattgctcccctgatagaagattgttggtgaattttcaaggccttcagtttatttccactattttcaaagaaaatagattaggtttgcgggggtctgagtctatgttcaaagactgtgaacagcttgctgtcacttcttcacctcttccactccttctctcactgtgttactgctttgcaaagacccgggagctggcggggaacccctgggagtagctaggttgctttttgcgtacaccgaagaagggctatgtaaacaaaccacagcaagatcgagagggtttttagagatgtgttt

SEQ ID NO: 19798 - DNA, 1373 bp, Homo Sapiens
gcacgaggcttgtgttggggttgagggaggttctcaaacacctgaagctcaaaaaaactgaaatgtgtcattatttctcccaactgtgagaagatacagtcaaaaggtgggctggatgacactttgcacacaattattgattatgcctgtgagcagaacattccctttgtgtttgctctcaaccgcaaagctctggggcgcagtttgaataaggcagttcctgtcagtgtggtggggatcttcagctatgatggggcccaggatcagttccacaagatggttgagctgacagtggcggcccgacaggcgtacaagaccatgctggaaaatgtgcagcaggagctggtgggagagcccaggcctcaggcacctcccagcctacccacacagggccccagctgccctgcagaagatggccccccagccctgaaagaaaaagaagagccacactacattgaaatctggaaaaaacatctggaagcatacagtggatgtaccctggagctagaagaatccttggaggcttcaacctctcaaatgatgaatttgaatttatgagagttcttgcctgtgtgtctgtattttgggtaaggaggggaggtctgaaaaagactttggggctttttcttctgtttttcatgacaatgtaatttgtgtaactgttgaatctggaaattgatcagcattaaagggcacatgaagcagtgtctgcaggcgttcagtgctgcggagcctgttaaaggtcactcagatgtgcaggtgttaatcttctctaaaagcctggtgatacagctctggctttctgagcacactacggatctggaaaatactggaaaatgtgatacttagaatactttggctgctaaggaaacttcctctccattgcagaatagctgagccaagtgagtgagtttgcagaaagcaggtggtgagctcctgcctgctggaggttgccatggagggccattcctgcccggcaacagcaccgtcctgcagggagccacttggcagaagggtgcagggctgctggtgtcagagcaagagggctacagggaaagggccctttctcaggggatgtagcttttttaaaagatttgggaacacttggaggatttgctaaaatgagcctcagaaggaaaattggttttctaacctgtgactttttgaaatgaattattcctttcagtctttatttttcaaagaaacaatgtgtattgaagtacctagatttgtttgataatcaacaaatctttcctttttcaatgaacatattctgaatgtggtttctgtcttagaccaggaggacagagtttgctttcatattttccctgtaagtaagagggcttatttattttaaataaggagcctcgtgc

SEQ ID NO: 19799 - DNA, 1235 bp, Homo Sapiens
gcacgaggcgggagatggggcagagctgtcaacaccaggtggaaagttaccgaggctggacagtgtagtgagactgcagtttaaagaccacattgtcctcacagtactgccggatcaagatcaatctgatgaagctcaagaaaagatggtgtacatctatcattccttaaagaatagtagagagacacacatgatgggaaatgaggaggaaacagagtttcatggacttcgcttccctttgtcacatttggatgcactgaagcaaatttggaatagtccagctatttctgtcaaggacctgaaacttactacagatgaggaaaaggaaagcctggtattatccctctggacagaatgtttaattcaagtagtctagtgcctttgcagaatcaaatgcctactattttatatgcatatattaaaagaaaagcaaagacctgagccgaggagaggatgaattcaagtttccttacctgcgtatctactaacaaacatgagacctccctgttacaggtggtcagttggccaaatgtactaacgggcacatgaaagaaagaacagcaaattaccaagtgtctcagaaaatgacaaaaccatattttgacaagtttatttaatccagtgtggtagaaaaggcacaattccaatgtatcatttagaattgaatgtcattaacctggctttgttctttggaagaaacaacttctttaaagagcttctttggctctagaaaaatttcaaacaattaaaataagaaaaaattttaaactggttttttataatgaaaatatacatacctttgtgtatagacaagcccatgcccattaaaataaagttatcctgtaacataaattttattaaataatacttccccacagatgagaggcacgcaacacctatggacaaaagggagttacagaggctgcttaaaagatggagaaaagcctgagattgaaggaggaaaaaaacccagtatttaaagtctataaaaaatactcaaaatagtgggtcttcgagtttaaaatagtcattgttattttacattctaaagtgcatgtaggttgatattttttaaaatatcattggagaatttaatctttctttataaaaatagagcatttttctgctttctggcaaaagttggggataaaaggaaaaaaagttgtcaaaatgtaattttcagtccaattcaccaggaaaacatgcggacgcgtgggcggacgcgtgggcggacg

SEQ ID NO: 19800 - DNA, 908 bp, Homo Sapiens
gcacgaggcccatacttgctggtctgatccatgcacaaggcggggctgctaggcctctgtgcccgggcttggaattcggtgcggatggccagctccgggatgacccgccgggacccgctcgcaaataaggtggccctggtaacggcctccaccgacgggatcggcttcgccatcgcccggcgtttggcccaggacggggcccatgtggtcgtcagcagccggaagcagcagaatgtggaccaggcggtggccacgctgcagggggaggggctgagcgtgacgggcaccgtgtgccatgtggggaaggcggaggaccgggagcggctggtggccacgctctggatggacaaggaaaaagaggaaagcatgaaagaaaccctgcggataagaaggttaggcgagccagaggattgtgctggcatcgtgtctttcctgtgctctgaagatgccagctacatcactggggaaacagtggtggtgggtggaggaaccccgtcccgcctctgaggaccgggagacagcccacaggccagagttgggctctagctcctggtgctgttcctgcattcacccactggcctttcccacctctgctcaccttactgttcacctcatcaaatcagttctgccctgtgaaaagatccagccttccctgccgtcaaggtggcgtcttactcgggattcctgctgttgttgtggccttgggtaaaggcctcccctgagaacacaggacaggcctgctgacaaggctgagtctaccttggcaaagaccaagatattttttcctgggccactggggaatctgaggggtgatgggagagaaggaacctggagtggaaggagcagagttgcaaattaacaacttgcaaatgaggtgcaaataaaatgcagatgattgcgcggctttg

SEQ ID NO: 19801 - DNA, 1248 bp, Homo Sapiens
  misc_feature (350)..(411): n is a, c, g, or t
  misc_feature (455)..(542): n is a, c, g, or t
ccgggctgcaggaattcggcacgaggggcctgatgataggaaatctgaagacgataaagaggaagaagaaaggaaacgtcaagaggaaatagaacgccagcgtcgagaaagaagatatattttgcctgatgaaccggccatcattgtacatccaaattgggctgcaaaaagtggcaagtttgattgtagcatcatgtctttgagtgtcctattggactacagattagaggataataaagaacattcttttgaggtttcattgtttgcggaacttttcaacgaaatgcttcaaagagattttggtgtccgtatatacaaatcattactgtttcttcctgagaaagaggacnnnnnnnnnnnnnnnnnnnnnnnnnnnnnnnnnnnnnnnnnnnnnnnnnnnnnnnnnnnnnntgatgaaactgatgaaccaaaacccaaacggagaaaatcaggcnnnnnnnnnnnnnnnnnnnnnnnnnnnnnnnnnnnnnnnnnnnnnnnnnnnnnnnnnnnnnnnnnnnnnnnnnnnnnnnnnnnnnnnnaagataacaatcaagatgaatatgaccctatggaagcagaagaagctgaggatgaagaagatgatagggatgaggaagaaatgaccaaacgagatgacaaaagagatatcaacagatactgcaaggagaggccctctaaagataaggaaaaagaaaagactcaaatgatcacaattaacagagatctgttaatggcttttgtttattttgatcaaagtcattgtggttaccttcttgaaaaggatttggaagaaatactttatactcttggactacatctttctcgggctcaggtaaagaagcttcttaataaagtagtgctccgtgaatcttgcttttaccggaaattaacagacacctcaaaagatgaagagaaccatgaagagtctgagtcattgcaggaagatatgctaggaaacagattattacttccaacaccaacagtaaagcaggaatcaaaggatgtggaagaaaatgttggcctcattgtgtacaatggtgcaatggtagatgtaggaagcctcttgcaaaaattggaaaagagcgaaaaagtaagagctgaggtagaacagaagctgcagttactagaagaaaaacagatgagatgaaaaaaccatattaaatttggagaattccaacaaagcctctctggtgaactcagagaagttaaaaggaccttagtcagttacagaaacttaaagatttc

SEQ ID NO: 19802 - DNA, 634 bp, Homo Sapiens
ccccaagcgtccggttgattgtaccttcccaagcccgcccagtgggatgggaggaggaggagaaggggggccttgggccgctgcagtcacatctgtccagagaaattccttttgggactggaggcagaaaagcggccagaaggcagcagccctggctcctttcctttggcaggttggggaagggcttgcccccagccttaggatttcagggtttgactgggggcgtggagagagagggaggaacctcaataaccttgaaggtggaatccagttatttcctgcgctgcgagggtttctttatttcactcttttctgaatgtcaaggcagtgaggtgcctctcactgtgaatttgtggtgggcgggggctggaggagagggtggggggctggctccgtccctcccagccttctgctgcccttgcttaacaatgccggccaactggcgacctcacggttgcacttccattccaccagaatgacctgatgaggaaatcttcaataggatgcaaagatcaatgcaaaaattgttatatatgaacatataactggagtcgtcaaaaagcaaattaagaaagaattggacgttagaagttgtcatttaaagcagccttctaataaagttgtttcaaagctg

SEQ ID NO: 19803 - DNA, 1783 bp, Homo Sapiens
gcacgagggtatcctacggctgtgactttaaaaacaggtttaaagtggctgtggttggggacatgaatcctggatttcagccccctattacacctgacgtggagactttccaaaacaccgtaggagattgcttcggcatcgcaatggttgcatttgcagtggccttttcagttgccagcgtctattccctcaaatacgattatccacttgatggcaatcaggagttaatagccttgggactgggtaacatagtctgtggagtattcagaggatttgctgggagtactgccctctccagatcagcagttcaggagagcacaggaggcaaaacacagattgctgggcttattggtgccatcatcgtgctgattgtcgttctagccattggatttctcctggcgcctctacaaaagtccgtcctggcagctttagcattgggaaacttaaagggaatgctgatgcagtttgctgaaataggcagattgtggcgaaaggacaaatatgattgtttaatttggatcatgaccttcatcttcaccattgtcctgggactcgggttaggcctggcagctagtgtggcatttcaactgctaaccatcgtgttcaggacccaatttccaaaatgcagcacgctggctaatattggaagaaccaacatctataagaataaaaaagattattatgatatgtatgagccagaaggagtgaaaattttcagatgtccatctcctatctactttgcaaacattggtttctttaggcggaaacttatcgatgctgttggctttagtccacttcgaattctacgcaagcgcaacaaagctttgaggaaaatccgaaaactgcagaagcaaggcttgctacaagtgacaccaaaaggatttatatgtactgttgacaccataaaagattctgacgaagagctggacaacaatcagatagaagtactggaccagccaatcaataccacagacctgcctttccacattgactggaatgatgatcttcctctcaacattgaggtccccaaaatcagcctccacagcctcattctcgacttttcagcagtgtcctttcttgatgtttcttcagtgaggggccttaaatcgattttgcaagaatttatcaggatcaaggtagatgtgtatatcgttggaactgatgatgacttcattgagaagcttaaccggtatgaattttttgatggtgaagtgaaaagctcaatatttttcttaacaatccatgatgctgttttgcatattttgatgaagaaagattacagtacttcaaagtttaatcccagtcaggaaaaagatggaaaaattgattttaccataaatacaaatggaggattacgtaatcgggtatatgaggtgccagttgaaacaaaattctaatcaacatataattcagaaggatcttcatctgactatgacataaaaacaactttatacccagaaagttattgataagttcatacattgtacgaagagtatttttgacagaatatgtttcaaactttggaacaagatggttctagcatggcatatttttcacatatctagtatgaaattatataagtattctaaattttatatcttgtagctttatcaaagggtgaaaattattttgttcatacatatttttgtagcactgacagatttccatcctagtcactaccttcatgcataggtttagcagtatagtggcgccactgttttgaatctcataatttatacaggtcatattaatatatttccattaaaaaatcagttgtacagtg

SEQ ID NO: 19804 - DNA, 857 bp, Homo Sapiens
gcacgaggggaaagtgggaccctccagcctggagaccccatggactgatgcctccactgctgtgtgccccatgttgtgttaacacctgcgtgtggggaccccatctgaggtcttggctgaggttggcatctcctgaagaacagagagcacggtgtccagagctggcccttcccccagcccacagccagctccgtgcccgagtgggcgtccccagcgagccttccctctctgccgcttgtccttgtgtctgggctgctccaagtccttgtgctgggcaccctggacacgtcctgctggtgagggacctcgggaaggtgacagtctgtgtgccttggtgtggagaccaacctgaggatgtcctgggaaatgttttcctgatgaatttctccttgactggcctttaaagaacataagaattcccattgcccagcctcagtgcatttggcaaatgcttactttgcttcccagagtcagagaattggcaaaggttcctaaatggtaatctggccggcctgggagaaagactcacgagaaaagccagtggagaaagcgcccttccagggcggcagcagcgggagccacgcagaccccgaggcgcacctgctggctcttgtgtgtggccccagtttctagcggcttttgcagcattagcctacaagctttgtcactccctgccctctgtggtggtcactgtttttctctcttgccaaatgaggcagtctctgagtgacggtgactgtggccttgaagcctggaggactgttgggcatgtagactgggcaccttgaagattcaccattgtttaaataaaatcaggcaaatgcttttttaccaagagcccgagcctcgctctaagg

SEQ ID NO: 19805 - DNA, 1774 bp, Homo Sapiens
  misc_feature (1723)..(1741): n is a, c, g, or t
gcacgaggtactatttcagctgcatattcaccccacaggctcactttgtaagagtggtattaatgtggaccctgcacacatactgcacagctcactacatccaccccactcccactcaggttactctaggctccttctatttatgaaagttattttctctgtcttcctacttacagaattatcagaaaagcttaattgatctcaataaagttatcctactagatccaagtattattgaggcaaagatggaactggaagaggtaactagactccttaatcttaaggataagacagcaccattcaacaaagaaaaggagagaaggaaaattgagattcaagaggtgaatgaaggcaaggaggagcctggaagacctgcaggggaggtctccacgggatgccttgcttctgagaagggaggcaaaagcagcaggtcaccagaagaccctgagaaacttccgatagccaagcctaataatgcctatgaatttggtcagattataaatgctctcagtaccaggaaggataaagaagcctgtgcacatcttttagccatcactgcaccaaaagatttgccgatgtttttaagtaacaaacttgaaggggatacattccttctcctcattcagtctctgaaaaataatcttattgaaaaagatccctcattggtgtatcagcatcttttatacctgagtaaagcagaaaggtttaagatgatgttgacactaattagcaagggccaaaaggagctaattgaacagctgtttgaggacctttcggacacaccaaacaaccattttactttagaagatatacaggccctaaaaaggcagtatgagctttaaatcaagataattgttagatttcttccatgcatgtatgtgttccaggaatgttaatgagatggtattgtaaaagagttgcatggataaaacttggcctagaaaagtttggtctgcactataaaacattttacttattttcctacatagaacatgtatattctacaatctgctttttattagttgtaaatattttcttatgtaccagaaccaaataagtatatttagaacttgttaaaaatacattttaatttatgatatacatattattttaattacttgttaaaattttgagttaagttgcatttctttgggctatgaaggagtcctcttaagtttgatagaaatgaatttcttgtaacattcttttttaaaagtggaagtcattaacagtgattattatatcacttatatcctgctaagatacacataaatcccattttgtactagtacctgtggattacagtcagttaaaatgaaatgcaacactgaagtctataacatgaaatgattattaaattgtttattaatttagagctataagaggaacttattttttctaatacggaagcattgcctaataattaagaacaaaaattgccaaaaatttctaccactttttactagattttaaaaagctactttcttttatattgcctatataagcaaaaaaccaaccactgtattaaagcaaactaagcctgcatttatatctgaattattacctccatattttaccaaacatttgaatgtcccccttcccccttttttgttttctgcttttatgactgtatttattcctttactgtaaaagaatatgaagaactcatacatgttgaaagctcctttgttgactgggtcaaagtgaaggaatttcaatctcnnnnnnnnnnnnnnnnnnnggaacctcgtgccgaattcctgcagcccggggg

SEQ ID NO: 19806 - DNA, 1946 bp, Homo Sapiens
cgcgtccgcggcgaaggaggtggtggctgcgttgggctccgggaagccgttcgggctggggctgtcggccgcggggcggaggcactcgcgcggggggtaattcggggtctgggttctggtgccgcgcagctttccccgatggcccactgcgtgaccttggttcagctgtccatttcctgtgaccatctcattgacaaggacatcggctccaagtctgacccactctgcgtccttttacaggatgtgggagggggcagctgggctgagcttggccggactgaacgggtgcggaactgctcaagccctgagttctccaagactctacagcttgagtaccgctttgagacagtccagaagctacgctttggaatctatgacatagacaacaagacgccagagctgagggatgatgacttcctagggggtgctgagtgttccctaggacagattgtgtccagccaggtactgactctccccttgatgctgaagcctggaaaacctgctgggcgggggaccatcacggtctcagctcaggaattaaaggacaatcgtgtagtaaccatggaggtagaggcagaaacctagataagaaggacttcctgggaaaatcagatccatttctggagttcttccgccagggtgatgggaaatggcacctggtgtacagatctgaggtcatcaagaacaacctgaaccctacatggaagcgtttctcagtccccgttcagcatttctgtggtgggaaccccagcacacccatccaggtgcaatgctccgattatgacagtgacgggtcacatgatctcatcggtaccttccacaccagcttggcccagctgcaggcagtcccggctgagtttgaatgcatccaccctgagaagcagcagaaaaagaaaagctacaagaactctggaactatccgtgtcaagatttgtcgggtagaaacagagtactcctttctggactatgtgatgggaggctgtcagatcaacttcactgtgggcgtggacttcactggctccaatggagacccctcctcacctgactccctacactacctgagtccaacaggggtcaatgagtacctgatggcactgtggagtgtgggcagcgtggttcaggactatgactcagacaagctgttccctgcatttggatttggggcccaggttccccctgactggcaggtctcgcatgaatttgccttgaatttcaaccccagtaacccctactgtgcaggcatccagggcattgtggatgcctaccgccaagccctgccccaagttcgcctctatggccctaccaactttgcacccatcatcaaccatgtggccaggtttgcagcccaggctgcacatcaggggactgcctcgcaatacttcatgctgttgctgctgactgatggtgctgtgacggatgtggaagccacacgtgaggctgtggtgcgtgcctcgaacctgcccatgtcagtgatcattgtgggtgtgggtggtgctgactttgaggccatggagcagctggacgctgatggtggacccctgcatacacgttctgggcaggctgctgcccgcgacattgtgcagtttgtaccctaccgccggttccagaatgcccctcgggaggcattggcacagaccgtgctcgcagaagtgcccacacaactggtctcatacttcagggcccagggttgggccccgctcaagccacttccaccctcagccaaggatcctgcacaggccccccaggcctaggttcccttggaggctgtggcaagtcctcaatcctgtgtcccagaggtccctctgggccacaacccaacccttctcactctcctcagtgctagcactttgtattttttgatacttttatacttgtttctgcttttgctgctcttgatcccacctttgctcctgacaaccctcattcaataaagaccagtgtagacc

SEQ ID NO: 19807 - DNA, 610 bp, Homo Sapiens
cctccaaacagatttattgaatacagcaaaattctatatacaaagtgacctggacctgctgcttcaaaacatgatcctttcttactaatatcttgatagtcggtccatagagcattagaaagcaattgactcttaaataaacagaaaagtgcctaatgcacattaaatgaatggcctaactactggaactttagtagttctataaggtaattaacataggtaggatccagttcctatgacaggctgctgaagaacagatatgagcatcaagaggccattttgtgcactgccaccgtgatgccatcgtgtttctggatcataatgttcccattatctgattctagacacaccacaggaatatcagtggggtcagaggttagcttagctgcttgctgggctagaacagatatcactccagcatgctcatctgacagggtcccgcggcaacccagattaagtccttgtgaatctgtgcacaggactccaacaatggagggattcttcattgtgtcttccaagtgctgctccaaggtcgcctccatcccacccaccgaccactccggctcagaacccagaggcaccctcgtgccgaattcctgcagcccggggg

SEQ ID NO: 19808 - DNA, 982 bp, Homo Sapiens
caggaattcggcacgaggtttccattttagtcaactgttttagaggcaatggaaccatgcaagaatgttcatgttctacgaacgggattcagaatactagttgatcagcaagtttggaaaatagaagatgtcttcacattacaagttgtgatgaagtgtattggaaaagatgcaccgattgctcttaagaggaaactggagatgaaagccttgagggaattagacagattttctgttttgaatagccaacacatgtttgaagtactagctgccatgaatcaccgatctcttatactcctggatgaatgcagtaaggtggtcctagataatatccatgggtgtcctttaagaataatgatcaacatattgcagtcctgcaaagacctccagtaccataatttggatctcttcaagggacttgcagattatgtggctgcaactttcgacatctggaagttcagaaaagttctttttatcctcattttatttgaaaaccttggctttcgacctgttggtttaatggacctgtttatgaagagaatagtagaggatcctgaatccctaaacatgaaaaacattctatctattcttcatacttactcttctctcaatcatgtctacaaatgccagaacaaagaacagttcgtggaagttatggctagtgctctgactggttatcttcacactatttcttctgaaaacttattggatgcagtatattcattttgcttgatgaattactttcccctggctccttttaatcagcttctgcaaaaagacatcatcagtgagctgctgacatcagatgacatgaaaatgcttacaagctgcatactttgggatacttgtctaaaacttgatgatactgtctatctgagggacatagccttgtcactccacagctgcccgcgggagctgctatcgtcacatacaaatgcaaaggtgggcagaggtgctgagcagccttctggaggtgaaggac

SEQ ID NO: 19809 - DNA, 1012 bp, Homo Sapiens
gcacgagggtaatgtttctacaggtctttgcaacaaactgtcactttcgtctccagcagagggagctgtaggaatagtgcttccagatgtggtctcccgtgtggggcccagcaatgggggcccctgatgccaagagctctggaggttcttgaaagaggggacacgaaggaggagtgactgggaagcctcccatgccaaggaggtgggaggtgccctggaaatagctgcctcatgccacttaggccatgactggatttaatgtcagtggtgtgccacagtgcagaggctagacaactgaaaggggctaccaaggctgggaaaaaaatgcaattgttgctgtgagtgactttgaaagactctggtgccttgtggtgcccttctgaaattcaaacagtaatgcaaaagtgtctgcattagaatttacggtgtctaaaattcatgtttttaaaagagcttgcctacagatggtttccacacttgaaattgtgccctgcgagttgcatagctggaagttcaatgctcagtcctaccttggctcccattaaacatttggtgctctgtggattgagttgaacgtgttgaggctttgcaatttcacttgtgttaaaggctctggcatttttccatttctatgcaaatttctttgaagcagaattgcttgcatatttcttctctgccgtcacagaaagcagagtttctttcaaacttcactgaggcatcagttgctctttggcaatgtcccttaaccatgattattaactaagtttgtggcttgagtttacaaattctacttgttgcattgatgttcccatgtagtaagtcatttttagtttggttgtgaaaaaaccctgggctgaagttggcatttcagttaaaagaaaaaaagaaactagtcccagatttgaaaacttgtaataaaattgaaactcactggttttctatgtctttttgaactcttgtaatcgagttttgatcatattttctattaaagtggctaacacctggctaaaaa

SEQ ID NO: 19810 - DNA, 1281 bp, Homo Sapiens
gcacgaggctgatggaaggtttgtttccccgagatgtgaacttgctgaaggaaaacagtgtaaagaggaaggccatacagagaactgtcagctcttcaggatgtgaaggcaagaggaatgaagacaaggaagcagtgagcatgttggttaactgccctgcctactacagtgtgtctgctcccaaggctgagctactgaacaaaatcaaagagatgccagcagaagtgaatgaggaagaggaacaggcagatgtcaatgaaaagaaggctgagctcattggaagtctcacccacaagctggagaccctccaggaggcgaaggggagcctgctcacggacatcaagctcaacaacgccctgggagaagaggtggaggctctgatcagcgagctctgcaagcccaatgagtttgacaagtataggatgttcataggggatttggacaaggtggtcaacctgctgctctccctctcggggcgtctagcccgtgttgagaatgtccttagcggccttggtgaagatgccagtaatgaagaaaggagctctctttacgagaaaaggaagatcctggctggtcagcatgaggatgcccgggagctgaaggagaacctggatcgcagggagcgagtagtgctgggcatcttggccaattacctttcagaggagcagctccaggactaccagcacttcgtgaaaatgaagtccacgctcctcattgagcaacggaagctggatgacaagatcaagctgggccaggagcaggtcaagtgtctgctggagagcctgccctcagatttcattcccaaggctggggccctggctctgcccccaaacctcacgagtgagcccattcctgctgggggctgtactttcagtggtattttcccaacattaacctctccactttaacctcttctaaaatacccaaccaaaagatcactgtttctctcaacactatttaatctgaaaaatgtttcagtacaaaccactgtttgaactatctgggttattggtgtttgttcctgatgaaaggaaaaaaattctctccaggaggaagcctttttccttcttgcccttcctgattgatcttctgagagctcgaatgctgctggacacgtacccctttctattattactttgtagtagaaagaaagttaatgaaactgagaactgattggagggtgtttgatcatttagtttttaactgctgaggcaacatggatcagtgtgtgtccccctcagaatgtatccacagtggccttccttgctggtgggcagtgta

SEQ ID NO: 19811 - DNA, 916 bp, Homo Sapiens
ccacgcgtccgcaattaacgttcttttctacaaaaaaaatgcagggacttgatttttttaaagagcttcactgaattaggatatttttattgcttttaaagaaaatacaaagatgcagtttctgcagggtgtggcgtggaccagtgctgccgaccatagctcagagagccctgcccctgcctcactgcactgcagcctcctcggaggccgcacctccactccactccccacgcgccccctgcctcccacccaggtccacctgccacctggtgaccaccttgagtacagaagtgaaagtggggagagtattttattcaagtcacagcagaactggaaaaaaactcttctgttttaccaacttcttgtgtttcagaaacatattctgttcaaaacttttgaagccctttcggtgtctagtctgcagatgtttttgtatgtgtgcacctctgaccatgtgtgtacatatgtgtcttgctggaaaggacatattcgctgtccccgtgctgctgggagggccgcctcacagcctcacggttcccagccccagcacagtggaggcaggcgtggctgcattcccctcacgctaccctcccagcggcttgtagccgtcactggccagacctccaggatgcggaatcaaataggaagcatgcagagactcggcagcttttcctctgatgtgtaagttatttggaacgcgtgctgtgtcccgcgatgtccctgatgtactgtgcaggcgcggtgcctccgtctcgtcgcacagctgcgcgcccttgtgtgaccctccccataaaggcactttacagcttcatgtttcatccactgtcacttttttttaactgctgatgtaaatggaattttaaaagcagagttctttattgtatggatgacgtttgaataaatatcagcaactcct

SEQ ID NO: 19812 - DNA, 1667 bp, Homo Sapiens
  misc_feature (1230)..(1272): n is a, c, g, or t
gcacgaggccccagtgaaggttgcccgaggatggtcgggcctggcgttgggcgtgcggcgggctgtcttgcagcttccagggctaactcaggtgagatggagccgctatagtcctgaattcaaggatcccttgattgacaaggaatattatcgcaagccagtggaggagctaactgaggaggagaaatatgttcgggagctcaagaagactcagctcatcaaagctgctccagcagggaaaacaagttctgtgtttgaagacccagtcatcagtaaattcaccaacatgatgatgataggaggaaacaaagtactggccagatccctcatgattcagactctggaagctgtgaaaaggaagcagtttgagaagtaccatgccgcttctgcagaggaacaggcaaccatcgaacgcaacccctacaccatcttccatcaagcactgaaaaactgtgagcctatgattgggctggtacccatcctcaagggaggccgtttctaccaggtccctgtacccctacccgaccggcgtcgccgcttcctagccatgaagtggatgatcactgagtgccgggataaaaagcaccagcggacactgatgccggagaagctgtcacacaagctgctggaggctttccataaccagggccccgtgatcaagaggaagcatgacttgcacaagatggcagaggccaaccgtgccctggcccactaccgctggtggtagagtctccaggaggagcccagggccctctgccgcaagaaacagtgtgagctactgccacgctgaaaactacctgtgggttaaggatgtagttcctttgtaagggtgggcaggcctcgtaagaaagatgtagcagcatattcactatccgttaatccttctttctttgaggctggaacttgctctctctgcccctatttccttgtaaagagggagcacattgacttgggaatttcctccaggaaactcagggctgttttctcttcccttaggttggggcggacctttggacatataaaggaagcagttttagtatcagaaaagatttattagaaaattctcacgctgaactggtgtagcatgtggtgcagcattcagtgaaactggctggaggaaataggcttgtttccagagttgtccttatacaaaatgtataaaaagcagtttctggtgtgacttgtgctctgcctccaccccttgacatcccaaaatatcccaccagtggnnnnnnnnnnnnnnnnnnnnnnnnnnnnnnnnnnnnnnnnnnngtagtagttgcactaatggttacacagtgcagtggctcttgggagttgcccttctctgcctggccgtggtgggttgtggtggggaaaggggctcagggcaggaccacggcataagtgggaaacatctcaccaggagatgggaaagtctagaagggaagacactcaaagtctggaagggaaaagtctttgggtgaggcagagactccactgccagctttagaggtgggtagaagaaaggccagtgctggtgaggaagccctgatctggaggcctagtcggagacttcgctgtagtaatacttgtgggcagctggcgttgtcttccagccggccgcccggaactcaatgatctccagcagcagcagctgggccagggagctgaggccagcctcgtgc

SEQ ID NO: 19813 - DNA, 428 bp, Homo Sapiens
cacccacgcgtccggagaagcagagacttttggaggagaaggaccctgtacccctgttcaagatctatgtggcggagctgatccagcagctgcagcagcaggcactgtcagagccggcggtggtgcagaagagagccagtggccagtgaccacacagctcctccatgcctgaccaacaggcccagctttccctgccaggccctttgcactgaggacacagatcccggggagctgtgagggccaccggtgggcagtgggtggatcctggtttcgtgtgctgcccatgcaccttccagcccggggccagcttggcagggatccccaggaggcctggggcgcccagaggctcctctcaggctgggccccgacgtttgcggcagtgttccttgtgcccgtggggccgggagcgagtaaagtctgggccaggc

SEQ ID NO: 19814 - DNA, 502 bp, Homo Sapiens
ccaaaaatgaagagctttaatattcaaaccacccagatgaaatgtcatggcaaatttgataaaaaccaagagggagtgaaactgacgctgggttacagagccagcaaagtgggggagttcaaggagtctgatgattggtccccgctgctactgcttctgcggtgagccttggagcaggattcggagggagatgcgggtgactcctgctccaggacgctaggataggtgaagacgaggttcgaggtgcccggagtgacagcaggtgtggaggtcaccacgatgggggtgtgcaggggctcctcaccgtaaaagcccccagcaatgctgatgggcttgatgacagagcgctgggccttgtccagccccgccgacaaggacgaggggctgtcctcttccaggggctcctgtttcaccactacagcgcccaccgagccacccccactgcgcatgggctgcagcccaggggctgggggcgatcggcgctcctcggggctaatcttgc

SEQ ID NO: 19815 - DNA, 1289 bp, Homo Sapiens
gcacgagggggaagctttatgtgtgtgtatgtcagctcagcatcttttaatcgtgtctgattttactctcgttacttctcgctgttggaagcatctctgggtttcttgtggcgtctggtgtggaatggccttcctctctaggtgcctgaggtgtccgctgacgggtggcctctcacccccctctagagaaacctgacatttacaatggattgtatttgtccggcaaaaaaggcggattcattcatagagcagaaagaacctgttggcgtaaggtcttccactagttagatggtttcttttggggaaatgtttatatttggtaacttctagaaagccagaaaatggactctgatttcatagcattttgataaaatgccacaaaataagggctatagagagatttttacaagtcagattttttgttccccaaatcttttaaatgaagccagtgactcccagttctcaacacatggccccagtcaagacagaacaccatggaaaaaaccctgtaagtattatggcactctccgaatcctcctgaaggcatttcctctacagacatagtgttacaggaagtgaaatgcaaaatgtgcaattttttttaaaggagcttttaaacaaagtaataataattggtgttgagaacatcagttgccttattctaagatttcataaggctgagtttgcacgcttggacttcagttctgctagcatgtaaagagtggtggactttaaacccgtaagaggtatcatttacaagtcacctgggacagactcaaagaacaggttctttgggcaacagacaaagaagaatcaagttctgtgctgtcccgtgagtgtgtctgagtaccattcactggagttgctgcttaggtctgggacgtgtgtgtgactcttaacaattgctgtctgaaaatgagagagaagacttcggaagcacattgtgttcataatgtactccacaatggccagtccaattgctatctatttttttatccagaggcttaattaaatgatgtggtaaaatgatgtttgagcattaagacaatgtaattctttatttctgggtggaaagatataccggattaaatttatctgtttaaaaaaatgacaaaagttatcaccaaaaccccctttcccatcttgcactgtttgttttggattgggtttgggggaaagagatgtttttcttagttgtctactttgtttgaacacttttgttgtggttcaagtgctgttttgtgtgttgggaccaaacagttgtcaataaactttacaagcgagcatct

SEQ ID NO: 19816 - DNA, 1225 bp, Homo Sapiens
  misc_feature (904)..(942): n is a, c, g, or t
gcacgagggaaaagtctggctaatgctcttgtgtagtcacttctgattctgacaatcaatcaatcaatggcctagagcactgactgttaacacaaacgtcactagcaaagtagcaacagctttaagtctaaatacaaagctgttctgtgtgagatttttttaaaaggctacttgtataataacccttgtcatttttaatgtacaaaacgctattaagtggcttagaatttgaacatttgtggtctttatttactttgcttcgtgtgtgggcaaagcaacatcttccctaaatatatattaccaagaaaagcaagaagcagattaggtttttgacaaaacaaacaggccaaaagggggctgacctggagcagagcatggtgagaggcaaggcatgagagggcaagtttgttgtggacagatctgtgcctactttattactggagtaaaagaaaacaaagttcattgatgtcgaaggatatatacagtgttagaaattaggactgtttagaaaaacaggaatacaatggttgtttttatcatagtgtacacatttagcttgtggtaaatgactcacaaaactgattttaaaatcaagttaatgtgaattttgaaaattactacttaatcctaattcacaataacaatggcattaaggtttgacttgagttggttcttagtattatttatggtaaataggctcttaccacttgcaaataactggccacatcattaatgactgacttcccagtaaggctctctaaggggtaagtaggaggatccacaggatttgagatgctaaggccccagagatcgtttgatccaaccctcttattttcagaggggaaaatggggcctagaagttacagagcatctagctggtgcgctggcacccctggcctcacannnnnnnnnnnnnnnnnnnnnnnnnnnnnnnnnnnnnnntgaagcaggccctgtttgcaattcacgttgccacctccaacttaaacattcttcatatgtgatgtccttagtcactaaggttaaactttcccacccagaaaaggcaacttagataaaatcttagagtactttcatactcttctaagtcctcttccagcctcactttgagtcctccttggggttgataggaattttctcttgctttctcaataaagtctctattcatctcatgtttaatttgtacgcatagaattgctgagaaataaaatgttctgttcaactt

SEQ ID NO: 19817 - DNA, 921 bp, Homo Sapiens
gcacgaggctttctccgacagccgccgggggtgccctgcaagctgttccgcgcgtcctgcccgtctgtccccgcgggtcgtcgcccgccacagccgcgccatgaccacccagcagatagacctccagggcccggggccgtggggcttccgcctcgtgggcggcaaggacttcgagcagcctctcgccatttcccgggtcactcctggaagcaaggcggctctagctaatttatgtattggagatgtaatcacagccattgatggggaaaatactagcaatatgacacacttggaagctcagaacagaatcaaaggctgcacagacaacttgactctcactgtagccagatctgaacataaagtctggtctcctctggtgacggaggaagggaagcgtcatccatacaagatgaatttagcctctgaaccccaggaggtcctgcacataggaagcgcccacaaccgaagtgccatgccctttaccgcctcgcctgcctccagcactactgccagggtcatcacaaaccagtacaacaacccagctggcctctactcttctgaaaatatctccaacttcaacaatgccctggagtcaaagactgctgccagcggggtggaggcgaacagcagacccttagaccatgctcagcctccaagcagccttgtcatcgacaaagaatctgaagtttacaagatgcttcaggagaaacaggagttgaatgagcccccgaaacagtccacgtctttcttggttttgcaggaaatcctggagtctgaagaaaaaggggatctcaacaagccctcaggattcagaagtgttaaagctcctgtcactaaagtggctgcgtcgattggaatgctcagaagttgcctatgtgtgacaaatgtggcactgggattgttggtgtgtttgtgaagctg

SEQ ID NO: 19818 - DNA, 1480 bp, Homo Sapiens
gcacgagggaaagtgcgaggtctgttcctagagaaatcaccagttacttagtatagtttaaagccagtgttctgcagatactaggcagaaaggagctactgtcgcatttaaaacaatgtggtcattataaaataaacgctttaatctataaacaataacaaaaacacacaaaccaaatgaaaatgtactaaaatttaatcatccataaaagctgtaatttaatctgacagtaaaacacaagaagcaatattagagttggtttagtatattatatattttagctttgaaagccatagaaatcagttatcccagtttttttcctataaaagacccatttttccaaagcattatgcacaattttaattagaatataatgacagatgatattccataattttttaaatataaaatgaagtcaatgactcaaaaaagttatctgctgcaatgagtttgaggggacatttcataatcagtatcattacagatataaagtataatggttcaactttttagtgcttgatagggaggatcatgataaaaagatcaatatgaaatcatttgattatagtagcaatatctaacatttgaaatgcatccatgctcttttgtataatcatattagagtcaagtatattttcacatctgttataactgctattgcaaaggagaaatactattgtcttattttccaagagatatacacagagcaatttttttctccagggaacttgtgcaaccaatataagatctaaattcttcacataatatataaaacaggagaagcctcttcagatttttatttttgaagtctggaatgctggcactttccaattaggcaacagttcttcattcctgtaatctggctcagagctgctgctgactatgggcctagagcagcagacatgatttctttttaggcttcttcttttccactggtgttttcctatttatctgtctgaccaggtcataaaatatctcattaacattgatctttgactttgcagaagattctaaaaaggcacagttacaccactgtcttgctaaattctggccctgctctttgccaactactcgctcatcttccaggtcacatttattgccaaccaaaatcattggaacatcttccgtgtccttaacccgtaaaatctgttccctcaggtcctgtaagtcgttaaacgtggactgagctgtaatagaatatactagtgcaaaaccttggccgttcttcatatacaaatccctcattgctgtaaattgctctgtccctgcagtatccaggatttcgagcatacactgttggcaatcgacttcaacttgctttctgtaggaatcttctatcgttgggtcatatttttcaacaaaaattccctgaacaaactgaactgtcagagcagacttcccaacgcctcctgaaccaaggaccactagcttgtactcacgcatgatgtgatctgtttaaatactgacgatcccctcgtgc

SEQ ID NO: 19819 - DNA, 924 bp, Homo Sapiens
gcacgaggcctccctccccagcggtccctcaagcagcccagggagcgtccctgccactgtgcccatgcagatgccaaagcccagcagagtccagcaggcgctcgcaggcatgacgagtgttctgatgtcagccattggactccctgtgtgtcttagccgcgcaccccagcccaccagccctcccgcctcccgtctggcttccaaaagtcacggctcagttaagagattgaggaaaatgtccgtgaaagaagcgaccccgaagccagagccagagccagagcaggtcataaaaaaactacacggaagagctgaaagtgcccccagatgaggactgcatcatctgcatggagaagctgtccacagcgtctggatacagcgatgtgactgacagcaaggcaatcgggtccctagctgtgggccacctcaccaagtgcagccatgccttccacctgctgtgcctcctggccatgtactgcaacggcaataaggatggaagtctgcagtgtccctcctgcaaaaccatctatggagagaagacggggacccagccccagggaaagatggaggtattacggttccagatgtcgctccccggccacgaggactgcgggaccatcctcatagtttacagcattccccatggtatccagggccctgagcaccccaatcccggaaagccgttcactgccagagggtttccccgccagtgctaccttccagacaacgcccagggccgcaggtcctagagctcctgaaggtggcctggaagaggcggctcatcttcacagtgggcacgtccagcaccacgggtgagacggacaccgtggtatgggacgagatccaccacaagacagagatggaccgcaacattacgggccacggctatcccgacccactacctgcagaacgtgctggctgagctgg

SEQ ID NO: 19820 - DNA, 1166 bp, Homo Sapiens
ccacgcgtccgcagcgtcttcatctccaccttcctcggctagccaaaacagctggcaggactgccggtcacacaccagcacgtcccacctcgtgctcacggattttattacacagatagtggcggcaatggcctcagcccagcccaccctcacctgcttttccagcccacaaagggggacgatcacggcccagcaaaagcgatgctgagaggggaaacagtccagagtccaacagcagaacttgggggaagcggtcggggtggccaggaacataaactatgtataggggccgggggcttctgcccagggctcccctggaccaggacgccaggtagggcagggaacctcagtagtcctccacccagccattctcagagatgaatgcgtcaataacctccttcatagccaagttggggatgagctgttcctgggtcagggggctccgggtcacggggtcaaaatgacccacacgctgcagtgacaagaagggcagagggcagtcatggggcccaggaccatgccactggccctgctcccccagccgcaggcctcacctgcaggtgctcctcgatgtccttgcggtcgtaggtgatgccactgggcgtgatgcacggctcccgcatcagctcaaagctgatcttgccacacaggtagtcggggatgtctcgcttctgtggcacaggggcacacggtcagaggctgaaaaggggcactgcacgagcacctgccagccatcggcagcaagcgacacacactcaccttcctcttctcatccacctgagaaaaaagctcgtccatgtccgccatgtacttgtcctgtgaagagttgagtgctgtgcttgggggagacaccccacctccctcctccatggggcacagacccaacacaaggcggggatgctcccacgccacgtgcacacacacagacccacatgtgggtggggggcaccctcacgtgcttggcctcaatgcaggcctgctgggcccggacgtggctgtcgtcctcatcaccctcgtggtttcgctggcactcttccagctccctgggggttgaccaggagccggtcagagatggacctggccagatgtctgaccacaccccaatctcagagctaacatccacacttccccacatttcctgcttgccagtaaagccttcgataaac

SEQ ID NO: 19821 - DNA, 2335 bp, Homo Sapiens
ggaattcggcacgaggctctacccctagccatactcagtcaaaaggaatgacttaagatgaagatgatcatctgctcgagtctaaaatatacattgtatataagaattggtgattagaaaagcaaaaaacctaaaacttaaatctaggagtctgtatactgtctccatgtctccatgcctcagatctcatctaaatctttgaacagcaccattcaaccaatctgaggccttgacttgcttgtaagatgattctcagagatcggctgagttaaaaaagatgacgacttgattaccaaagaaagtagggccaactttgacaaatctggctctgctgaccctgtcactcccagatgtagcatagactcctaaacagaacctcaagtctgattgaggataaggccttctcctgagctgaaagttctttggcagatgagcaagaaactgaaagctgatgtacctgactggctctgtaagatcagaaaactgtatccagaataagccctatggattaacccctgagtacccagagtaaaaactaatttacagaacttccttattgatctgctggttcttccagatcatattctggctattggtatggctggcctttctgaaggtaccctgcttgtctattttcctgactcagctcttgcctgcctttttcacatgttgctgcaattagactcaccgtgaggactacagtcaatttcagtctatcttgtgcccaatacaacaaggatttttaatagtaacaacccacacctcacccactaggactcaatgttcacaacaggaaggaccattgctgcatactccttgaccagcaacttttttgaagatatttttaagtgcagagtaggcctctattcctgtatgtaattgttcattttcagcacctggaacctcatctatcgggtctggaaggaatacagcagttcgaaagccgcgtccatttctctccttcagtagtgcagaaatgagtccgattcaccagtacacacagaactgtaccagttcaacctagcaaaagaagaaaagtttccactgtacttaaaatttacagctgactcaaattgcctcacagaattatttgatgtagaaggctagttgtcttacttcagatcagcaggacagttgggctctcagactcatgaccactgagtttgcttgtgttgaaactgtggtttcatccaacatatgctattggacatgattattattccattcaaatggattacagacttcttgaggacaggacaaacttatctctcatggtgtttttttagaatacttttataaccaaggaagaaaccatgccagctgttaccattcaacttcttaagcagagattaagctttttcatatctgttcttatcctggacatcagtagtttttaattgcccagcatccgttccatcttgtaacaactccctgatgtttcttaaaaccacctcttcctattttcagtctgtggtttggacagtctgacccaaccttgagctttgtgggtgaacatgtaattcagacctcatcaatcagcaaatccatctgaactgtggaggagaagctctctttactgagggtgctttagctttgtaggatgaaaacctcaaactaacagggcctaccatgtagagaatgaagccagtgcaggggaaagcagagccaaaatatggagagacttgaatcctgatgacagcgtttgtgcccctggatccaaccgtgcctgaagctagaatatcccctggacttttcagttatgtgaaccaataaatacccttttttgcttaagttactttgagttgggtttctgttacttgaaattgaatccacactaatatatctaccaacattgagacttgacagatccaagtatttattaagctagaggtcatggtcactgaaattactttccaaagtggaagacaaaatgaaacaggaactgagggaatatttaagatcccacagaagcgtaaaaatgacatggtagaaagtaatagaaaacctaaatgtctgtcattaaaggataggttaaggtgtggttcagccatataggaatatctcgtatctgttaaaatgaataaagtacattcattgtgtatggaaaaatggccatgatacattaggtgaaacaagttattaatagaaaagtgtacagtgtgaactcatttttaaaatgtgtgtgcttatgtttataaatgcatagaaagggtctattcacagcctttctttgaacagtgtaaatcacatggaaactttcaacttatacatttcggtataatattttacactacccacattatttttaactttatttaaataaagaatttttaaa

SEQ ID NO: 19822 - DNA, 1814 bp, Homo Sapiens
gcacgaggggaaacacaaagatgcagccatctacctagtgacatctttggcatcaaaagcccaaacacagaagcatggaattacacaagcaaatgaacttgtaaacctaactgagttctttgtgaatcacatcctccctgatttaaaatcagctaatgtgaatgaatttcctgtccttaaagctgacggtatcaaatatattatgatttttagaaatcaagtgccaaaagaacatcttttagtctcgattcctctcttgattaatcatcttcaagctgaaagtattgttgttcatacttacgcagctcatgctcttgaacggctctttactatgcgagggcctaacaatgccactctctttacagctgcagaaatcgcaccgtttgttgagattctgctaacaaaccttttcaaagctctcacacttcctggctcttcagaaaatgaatatattatgaaagctatcatgagaagtttttctctcctacaagaagccataatcccctacatccctactctcatcactcagcttacacagaagctattagctgttagtaagaacccaagcaaacctcactttaatcactacatgtttgaagcaatatgtttatccataagaataacttgcaaagctaaccctgctgctgttgtaaattttgaggaggctttgtttttggtgtttactgaaatcttacaaaatgatgtgcaagaatttattccatacgtctttcaagtgatgtctttgcttctggaaacacacaaaaatgacatcccgtcttcctatatggccttatttcctcatctccttcagccagtgctttgggaaagaacaggaaatattcctgctctagtgaggcttcttcaagcattcttagaacgcggttcaaacacaatagcaagtgctgcagctgacaaaattcctgggttactaggtgtctttcagaagctgattgcatccaaagcaaatgaccaccaaggtttttatcttctaaacagtataatagagcacatgcctcctgaatcagttgaccaatataggaaacaaatcttcattctgctattccagagacttcagaattccaaaacaaccaagtttatcaagagttttttagtctttattaatttgtattgcataaaatatggggcactagcactacaagaaatatttgatggtatacaaccaaaaatgtttggaatggttttggaaaaaattattattcctgaaattcagaaggtatctggaaatgtagagaaaaagatctgtgcggttggcataaccaaattactaacagaatgtcccccaatgatggacactgagtataccaaactgtggactccattattacagtctttgattggtctttttgagttacccgaagatgataccattcctgatgaggaacattttattgacatagaagatacaccaggatatcagactgccttctcacagttggcatttgctgggaaaaaagagcatgatcctgtaggtcaaatggtgaataaccccaaaattcacctggcacagtcacttcacaagttgtctaccgcctgtccaggaagggtccatcaatggtgagcaccagcctgaattgcagaaagcgctccagtatctccaagggtaccttcaggcagccagtgtgacactgctttaaactgcatttttctaatgggctaaacccagatggtttctacgaaatcacaggcttctgagcacagcctgcattaaaacaaaggaagtcctccttttgaacttgtcacgaattcatcttgtaaaggatattaaatgttgcttaaacctgaaaaaaaggggg

SEQ ID NO: 19823 - DNA, 1693 bp, Homo Sapiens
gcacgagggtaaacctctagataatgccagtaagcttgcacagcttgttgaaaaaaagcttgaagactactacaagattgatgaaaagagcctaataaagggtaaaactcattcacagctcttaataattgatcgtggctttgatcctgtgtccactgtcctgcatgaactgacctttcaggcaatggcatatgatctactaccaattgagaatgatacatacaaatataaaacagatggaaaagaaaaggaggccatccttgaagaagaagatgacctctgggttagaattcgacatcgacatattgcggttgtgttagaggaaattcccaagcttatgaaagaaatttcatcaacaaagaaagcaacagaaggaaagacatcacttagtgctcttacccagctgatgaaaaagatgccccatttccgaaaacagattactaagcaagttgtccatcttaacttagcagaagattgcatgaataagttcaagcttaatatagaaaagctctgcaaaactgaacaggacctggcacttggaactgatgcagaaggacagaaggtgaaagattccatgcgagtactccttccagttctactcaacaaaaatcatgataattgtgataaaataagagcaattctactttatatcttcagtattaatggaactacggaagaaaatttggacaggttgatccagaatgtaaagatagaaaatgagagtgacatgattcgtaactggagttaccttggtgttcccattgttccccaatctcaacaaggcaaaccgttaagaaaggatcggtctgcagaagaaacttttcagctctctcggtggacaccttttatcaaagatattatggaggatgctattgataatagattagattcaaaagaatggccatattgttcccagtgtccagcagtatggaatggttcaggagctgtaaggttctacacatgttttaacacccaaaaagctgttggatgatataaagatgctgaataaacccaaggataaagtctccttaattaaagatgaatagcatttctttttggagggtttagagattcttactaatatgttgaactaaaatagaaagaaaatgttgctgtcatgtaatttaaacaatgtaaatattttatggaataatggcttttcaaatacatttcttaaggaactgtttatgattattactggatttgtcatttttgataatttaaatattgctgctgctttgtagatgatgagaagaaatgttaaagtgctttctaaaaggaaattttttcacctttggaggagaatatattagagttgtgggtaatttttcacagccacctatgtacatactaattacccattggatacttatatctaaaagtctcatgctgaagtatagtttttgggaaagaatgattttaaataaagagattgtaaaagtaaaaaactgtaaatgtatatgtatgatagaattgtttcctctaagtgtagtttttctttcaactaaaattcagtttatgtgtaaaataattcagtcattaatagaaatggagtgatttcacagtgtgtactgttttgccacatacttctaaagaacacaattttatataattttgaaatcatgtatgtttaaattagaaaaccaaaaatcatgaacattctaagagaaaataaatatagaatttaaaaaat

SEQ ID NO: 19824 - DNA, 1894 bp, Homo Sapiens
cgtccgggcggcggcggggacgagcaccggcctgcgcgcggagccggcaccggatgacccaacatgagtgaagtttcctgcaagaaacgggacgactatttggaatggccagagtattttatggctgtggccttcttatcagcacagagaagcaaagatccaaattcccaggtcggcgcctgcatcgtgaattcagaaaacaagattgtcgggattgggtacaatgggatgccaaatgggtgcagtgatgacgtgttgccttggagaaggacagcagagaataagctggacaccaaatacccgtacgtgtgccatgcggagctgaatgccatcatgaacaaaaattcgaccgatgtgaaaggctgtagtatgtatgttgccttgttcccttgtaatgaatgcgctaagctcatcatccaggcaggtataaaagaagtgattttcatgtctgataaataccatgatagtgacgaggcaactgctgcgaggctcctgtttaatatggccggggtgacattccggaaattcataccgaagtgcagcaagattgtcattgactttgattcaattaacagcagaccgagtcaaaagcttcagtgagttacatctcattcaatctccagaagattgggattatcgtcttctaagaggttgctaatgcctttcatcttgaagttacacataacttcttactagccagtatggcaaaagtaggcatctaaagaatataaagcctcaaatcttccttactgtctctcttgtcacatggaatctacatgtgtttgaactattgctttaggatttaaaataggggagcctgtggtggcctggtgcacagggctagaacgagagtgcctccccttcttgtgtcctggctggctgggatgctggtggctcttcagaggagcatcagctgtctgtcatctgctgcgatccggcagcctctcttcactgctacatgtgctggaaggacaaataaataattgtggttgtgttcttaatggggacgagcagacacactgatctgaacatctggcccaagtgaagcatggcatatagtgcccttggaagaaaattaggcctcaaatgacagtagcattgaagtgtttgctgcagagttgagggaaacccccagccaccctcccggaatccgagatagggtggcacatctgtcctgacagacgaggagtgtaactgaaccaggaatatttcctccattcctgctctcccactgcacacagggtggtggcacattatccctctggggggtggggacgcctgttgttttggctcaatttgggtttgttggtcacatggagctcttccatttcgtttagctgaataatgagttgttcctagaggagacagcctgtctctccttgttgcccccaaagcccatgccctgccgtggtggcagctggggctgtggatgggaggggtccccaacatggatgtgttgcccctcctccgcatgccaacgcagttcatgtacaaggcccctctgcaactggagagaaaattaattcctatcccgtgagtggattgtgagaaattccacccacgtggagacagcttactgcagcactgttggtgttcggagctcttctgtgccctggctccatgctttcacctacacaagcatcaccttcctaatcaccgcggggcggggagcgtgtggctgtgccccttctctttaatctcatttaatttttattaaacatgctcagtacctgtgttgagaaaaggctttctttatcctaaagattattacctttttaaagtgctcttatattttcatgagtttttattttgtctctgagattttgtattccacattctagggtattctgtaatttggctccttaccaatattattaaaatcttattaaaatct

SEQ ID NO: 19825 - DNA, 1002 bp, Homo Sapiens
gcacgaggcccccttctgtaggacagtcaccaggccagatccagaaggcttgaggccctgtggtccccatccttgggagaagtcagctccagcaccatgaagggcatcctcgttgctggtatcactgcagtgcttgttgcagctgtagaatctctgagctgcgtgcagtgtaattcatgggaaaaatcctgtgtcaacagcattgcctctgaatgtccctcacatgccaacaccagctgtatcagctcctcagccagctcctctctagagacaccagtcagattataccagaatatgttctgctcagcggagaactgcagtgaggagacacacattacagccttcactgtccacgtgtctgctgaagaacactttcattttgtaagccagtgctgccaaggaaaggaatgcagcaacaccagcgatgccctggaccctcccctgaagaacgtgtccagcaacgcagagtgccctgcttgttatgaatctaatggaacttcctgtcgtgggaagccctggaaatgctatgaagaagaacagtgtgtctttctagttgcagaacttaagaatgacattgagtctaagagtctcgtgctgaaaggctgttccaacgtcagtaacgccacctgtcagttcctgtctggtgaaaacaagactcttggaggagtcatctttcgaaagtttgagtgtgcaaatgtaaacagcttaacccccacgtctgcaccaaccacttcccacaacgtgggctccaaagcttccctctacctcttggcccttgccagcctccttcttcggggactgctgccctgaggtcctggggctgcactttgcccagcaccccatttctgcttctctgaggtccagagcaccccctgcggtgctgacaccctctttccctgctctgccccggttaattgcccataagtgggaatcaaaggtctccaggcaatgccgaacgctgcctttgttcttcattataaagcactggtccttcatgggccc

SEQ ID NO: 19826 - DNA, 617 bp, Homo Sapiens
catattcaggcacctccaaacatattttctttatttcctccaaaaaacaggctttagtactgaggtccttgtaaacatttaacaaaactggtttaaaaacaaactaaaagcatctatatccttgccctgtgttgctggggtgagtttatacaaggagaagttggaacaaatgcagtgggcacaatgaccttcttactcagttcaaagtaggtcttgggatgaaagttccacacggccagtacagctgactttctgtgatttccaaggggtgcccaaaacattaaacgccatggtccttgggaaggactgatgatgtttctgctcattgttgatcagggtcaaaccttttcactaaccgggactgctctttccaagaagtcaaaggtcaaaaagctggtagcgtcgtacaaaaccgtctcgacagcatgtgtaaatctgcttctcccatgtggctaccttgtacacagggtcacagtcagccccagtgagctcagtgacatagtctaagtcttgctggacaataaaacagcttccatcaccttggctagcaatgaatccatctctgacacttagcagggatagaactggtgctcctgatctgtggatgacttgtaccg

SEQ ID NO: 19827 - DNA, 1399 bp, Homo Sapiens
gcacgagggtatcctacttaaatttaaataaattaattgcaaataaaaattaagctacaatatatagcctgaataaaaatgactagaacaaatacaacacaggacttgctttcttgcattagtcacaaagcatgtgacaatctagaaaacttcaaaatcaattacatttctttgaaaaaggggtaacagcagttactgatacatcacaactaataaacttataatacaagtttcctgacatgcatttcctgagtgaacccaaatgatcattttttaaaacaaggaagtttcgacagttgaagtaaaataaaataattcatggcttctaagcaacaagttttgttttttaaaaaccaaaagaaaattcagaacagttttgtaataggataaattaaaggtatgctaccacatataaaactttgctacagtcagttaagtattatacaacttttcaaactaaaggaaaacaaatcaaaatattaaaagaagatactgtctaatctaaaagtgtactggtttctacaagtgtcaaaaaaagatttgatgtagtgcaactgtctatacttgtggtgcctttgaaaaaagggtgggaaggaggggagagaagaaacttttcttgcttctgaagcaaaagacatattggaattagagaataaacagaccatgcagtgcgtcactccacgctgcagtcattggtgctcatctgccaaccaaacatttccttaagtctcactgtggcaatctccttaggattcaaacccagagttaaggctggtctgctaaaaacgggggcactattgtcattcaaccctttagatctctagatttcctaatgcccgaataaggccaaatacagaataattaattaagcatttctttttccaaaagcaaatcaagtcactctcctttcttgctaatttatactttttcttatggcaatgatttttttctagaaacagtgaacagatgaaccacagtttatatccaaaaaataaacttgccaaatgctgctgatactaaaaacagattagttatcatgggagaaaaatagataatctagattaaattgcatatccaaaggagcatataaaatgtttcttagcattaagtttttgttatagtactacgctcgagagaaacattaagaaaaaatctttcctgattatcttcaatgttgttaaaaacaaacacctttcacgcgggtaattagtatgaatttggtcttacaaattacaaagtattctaatttaccaaattccatatttagattggggtggggagagaggctctctcgtccttcttcctaactttgcaaatccttgagctaggttgctcactaagctaccattcacaccaagggtgtgacaccatcgttaccatgctactctatccctcgtgc

SEQ ID NO: 19828 - DNA, 945 bp, Homo Sapiens
ccgggctgcaggaattcggcacgagggcggctcgggacggaggacgcgctagtgtgagtgcgggcttctagaactacaccgaccctcgtgtcctcccttcatcctgcggggctggctggagcggccgctccggtgctgtccagcagccatagggagccgcacggggagcgggaaagcggtcgcggccccaggcggggcggccgggatggagcggggccgcgagcctgtggggaaggggctgtggcggcgcctcgagcggctgcaggttcttctgtgtggcagttcagaatgatggatcaagctagatcagcattctctaacttgtttggtggagaaccattgtcatatacccggttcagcctggctcggcaagtagatggcgataacagtcatgtggagatgaaacttgctgtagatgaagaagaaaatgctgacaataacacaaaggccaatgtcacaaaaccaaaaaggtgtagtggaagtatctgctatgggactattgctgtgatcgtctttttcttgattggatttatgattggctacttgggctattgtaaaggggtagaaccaaaaactgagtgtgagagactggcaggaaccgagtctccagtgagggaggagccaggagaggacttccctgcagcacgtcgcttatattgggatgacctgaagagaaagttgtcggagaaactggacagcacagacttcaccagcaccatcaagctgctgaatgaaaattcatatgtccctcgtgaggctggatctcaaaaagatgaaaatcttgcgttgtatgttgaaaatcaatttcgtgaatttaaactcagcaaagtctggcgtgatcaacattttgtttaagattcaggtcaaagacagcgctcaaaactcggtgatcatagttgataagaacgggtagacttgtttaactggtggagatcctgggggtta

SEQ ID NO: 19829 - DNA, 1090 bp, Homo Sapiens
tccgctcaagtccaaatcctgccatgatctctctgtactctaggaacccagggtcacccagatgtccctttgatggccgttgttgaaggccattgggaccaataatctatattagattgaatacttaagttagatgtggtttcccccattgtagcagggagctagcgtattagccttgtgggcaacatgatgcatgggaaatgaaagatttttgtaaaaagtcagtatttatttccaggaaaagcctgaccttgctatttgaacacccaagactctttagaggatgtgtttggtgttcacatgtgtttcttctattttggatagtagagaagtaaagcttacaaagaatgcctagaacaagaacttttcatcattaaaaatttttcccagtgttctgatatgtgactttgaggccaatgagtcataaacaaatataagaaagctgtcaatgagtttcttcaaaggagggaaaactttctacgaatctaagatccatggagctagaattgtagaactaggctcatcagaatcgtgactattattgctccatcaaactgtgaaaagaaatgatgtggaccttgctggaaacaaaggcttagcaaacaatttttgttcaatgcccaccaagacatatagaattgggaactgatacatgtgtcccttataggctcaaaaattatatcttacaatttcttatttaggggggaattatttgaatcagattctatttagtcaaaccaccttttatgttttattatttttgaattcatggagccatcataaaaatatttttaaaatcagaattattgataccctgtagtgcaaaatgtcaatttttaatgtataatcagaagtctgaatttttataaaacatatagcataaaaacttcccagtactttggttgacccttgtatgtcacagctctgctctatttattattattttgcaaataaccattttaacatttgataaagcatatttatgaacatatttccttataagaaaatatccattttattaccattttctatctttttcaaatatgcaagttttaacctatatgtcttataataaagaaataaatattgg

SEQ ID NO: 19830 - DNA, 1424 bp, Homo Sapiens
gcacgaggatccaacccagcctttcattctaactagcagtgatgacatgcttattaagctctgggactgggataaaaaatggtcttgctcacaagtgtttgaaggacacacccattatgttatgcagattgtgatcaaccccaaagataacaatcagtttgccagtgcctctttggacaggactatcaaggtgtggcagttgggctcttcgtcaccaaacttcactttggaaggacatgagaaaggcgtgaattgcattgattactacagtggtggggacaagccatacctcatttcaggtgcagatgaccgtcttgttaaaatatgggattatcagaataaaacatgtgtgcagacactggaaggacatgcccaaaatgtgtcttgtgccagctttcatcctgagttgccaatcattatcacaggttcagaagatgcttggtcgggaggaacctgccatgtccatggatgccaatggaaagataatttgggccaagcattcagaagtccagcaggccaacctaaaagcaatgggagatgctgaaattaaagatggtgaaagattgccactggcagtaaaggatatgggcagttgtgaaatataccctcagactattcagcacaatcctaatgggcggtttgtggtggtgtgtggtgatggggagtatatcatctacacagcaatggcattgagaaacaagagctttggatctgctcaggagtttgcatgggcccacgattcttcagagtatgcaataagagagagcaacagcattgtaaagatatttaagaactttaaggaaaaaaaatcatttaaaccagattttggagcagaaagtatctacggcggcttcttattgggagtcagatctgtaaatggcttagccttctatgactgggacaatacagaactcatacgaagaattgaaattcagcccaaacatattttctggtctgactctggagagctagtctgtattgctactgaggaatcattttttatccttaagtatctgtcagaaaaagtcttggctgcacaggaaacacatgagggagttactgaagatggcattgaagatgcctttgaggttcttggtgagattcaggaaattgtgaaaacagggctttgggtaggcgattgcttcatttacacaagttctgtgaacagattaaattattatgttggagggagaaatagtcaccattgcccacttggacaggacgatgtatctcctaggctacattcctaaaggacaacaggctttatctgggggataaagaattgaacatcattagctattccctgctggtttcagtcctggaataccagacagctgtcatgcgggagggactttaccatggctgataaggtcctttcttacattccaaagacagaaggacagatttgcacactttttggaaaa

SEQ ID NO: 19831 - DNA, 1093 bp, Homo Sapiens
gcacgaggctgtccttcatgggcctgctggccatgtacacctacttccaggccaagataagggccctgaagggccatgctggccaccctgcagcctgaaccacctggggaggaggcgggagagggagctgccatctctaggcacctcaagccccctgaccccattccctcccctcccaccccttgctccttgtctggcctagaagtgtgggaaattcaggaaaacgagttgctccagtgaagcttcttggggttgctaggacagagagctcctttgacacaaaagacaggagcagggtccaggttcccctgctgtgcagggagggcagccccgggcagtgggcatagggcagctcagtccctggcctcttagcaccacattcctgtttttcagcttatttgaagtcctgcctcattctcactggagcctcagtctctcctgcttggtcttggccctcaactggggcaagtgaagccagaggagggtcccccagctgggtgggctggaatggaactcctcactagctgctggggctccgcccaccctgctcccttccggacaatgaagaagcctttgcaccctgggaggaaggaccaccccgggccctctatgcctggccagcctccagctcctcagacctcctgggtggggtttggcttcagggtggggtttggaagcttctggaagtcgtgctggtctcccaggtgaggcaagccatggttgctgggctgtagggtgagtggcttgcttggtgggacctgacgagttggtggcatgggaaggatgtgggtctctagtgccttgccctggcttagctgcaggagaagatggctgctttcacttccccccattgagctctgctccctctgagcctggtcttttgtccttttttattttggtctccaagatgaatgctcatctttggagggtgccaggtagaagctagggaggggagtgtcttctctctccaggtttcaccttccagtgtgcagaagttagaagggtctggcgggggcagtgccttacacatgcttgattcccacgctaccccctgccttgggaggtgtgtggaataaattatttttgttaaggc

SEQ ID NO: 19832 - DNA, 777 bp, Homo Sapiens
gcacgagggaaccatgcacggccatgaccacaatgtttcttcagtagccatcatgcccaatggagatcatatagtgtctgcctcaagggataaaactataaaaatgtgggaagtgcaaactggctactgtgtgaagacattcacaggacacagagaatgggtacgtatggtacggccaaatcaagatggcactctgatagccagctgttccaatgaccagactgtgcgtgtatgggtcgtagcaacaaaggaatgcaaggctgagctccgagagcatgagcatgtggtagaatgcatttcctgggctccagaaagctcatattcctccatctctgaagcaacaggatctgagactaaaaaaagtggtaaacctgggccattcttgctgtctggatccagagacaagactattaagatgtgggatgtcagtactggcatgtgccttatgaccctcgtgggtcatgataactgggtacgtggagttctgttccattctggggggaagtttattttgagttgtgctgatgacaagaccctacgcgtatgggattacaagaacaagcgatgcatgaagaccctcaatgcgcatgaacactttgttacctccttggatttccacaagacggcaccctatgtcgtcactggcagcgtagatcaaacagtaaaagtgtgggagtgccgttgattgtgtctccttcggcccctcctccctctttcctctggatgcactctgatgataccatggttaccccattgagctctgtttaataaatattg

SEQ ID NO: 19833 - DNA, 769 bp, Homo Sapiens
gcacgagggacatccttagcctctcccttcgggaaaggtggacagtgttcaagggtctgctgtggtacattgttcccttggtcgtagtttactttgccgagtatttcattaaccagggactttttgaactcctctttttctggaacacttccctgagtcacgctcagcaataccgctggtaccagatgctgtaccaggctggcgtctttgcctcccgctcttctctccgctgctgtcgcatccgtttcacctgggccctggccctgctgcagtgcctcaacctggtgttcctgctggcagacgtgtggttcggctttctgccaagcatctacctcgtcttcctgatcattctgtatgaggggctcctgggaggcgcagcctacgtgaacaccttccacaacatcgccctggagaccagtgatgagcaccgggagtttgcaatggcggccacctgcatctctgacacactggggatctccctgtcggggctcctggctttgcctctgcatgacttcctctgccagctctcctgatactcgggatcctcaggacgcaggtcacattcacctgtgggcagagggacaggtcagacacccaggcccaccccagagaccctccatgaactgtgctcccagccttcccggcaggtctgggagtagggaagggctgaagccttgtttcccttgcaggggggccagccattgtctcccacttggggagtttcttcctggcatcatgccttctgaataaatgccgattttatccatgg

SEQ ID NO: 19834 - DNA, 814 bp, Homo Sapiens
  misc_feature (577)..(590): n is a, c, g, or t
ggttacttttcctttattcccctttcctggattggtacccttcccccatgggagcattcaaaaactaatacaagctgaaattatattggctgacaattcaagtattttaattttaaaaaacaatttcctatttaaagtaaaaagcaaacaatttatccctctgattggtaaaaagttttacatcccccttacaattggggctgcatcaaacggaaagtccttcctcccccgtatgattggtactgggtgaaaacatacggggacctgggttctgaatgcctgcttggaaaaaacctccctggcatctgccctactacgggacaaatcagtatctactccaattcccacttccagaatgaaaggactcctcaggggtttaggagtttgcaaagccttcaaaatggatcgtgcttgaattttgactcctctgaaataaaataactgacaaatgctcaaaaaaacaaacttgtttaacttttactgaaaaggctctcagtgaaaacttgttttgaactctactagtaaggtagaatattagtttttcttcccctccacaccagaaaaggcagttttctcnnnnnnnnnnnnnngggatgcagcatatataaaatgtgatctagaattgaaattgtaaaacagaataatcctcttaaaaaaatcagcctatgaacagtcagacttgtcctttcatggaaacataatctaaacttctttaaaactggccatattttttcagtctgtaatcgaataatgagatggcataacaaattttttgctactagaatgcgcaaagatgagatggatacacaggttt

SEQ ID NO: 19835 - DNA, 873 bp, Homo Sapiens
  misc_feature (566)..(574): n is a, c, g, or t
gcacgagggctttcctctgccgcatggtcctgggccgttggcgtcggaagcctgaagcatgggcgctgagtgggagctgggggccgaggctggcggttcgctgctgctgtgcgccgcgctgctggcggcgggctgcgccctgggcctgcgcctgggccgcgggcagggggcggcggaccgcggggcgctcatctggctctgctacgacgcgctggtgcacttcgcgctggaaggcccttttgtctacttgtctttagtaggaaacgttgcaaattccgatggcttgattgcttctttatggaaagaatatggcaaagctgatgcaagatgggtttattttgatccaaccattgtgtctgtggaaattctgaccgtcgccctggatgggtctctggcattgttcctcatttatgccatagtcaaagaaaaatattaccggcatttcctgcagatcaccctgtgcgtgtgcgagctgtatggctgctggatgaccttcctcccagagtggctcaccagaagccccaacctcaacaccagcaactggctgtactgttggctttacctgnnnnnnnnnaacggtgtgtgggttctgatcccaggactgctactgtggcagtcatggctagaactcaagaaaatgcatcagaaagaaaccagttcagtgaagaagtttcagtgatctttcaaaaccataaacaccattatctaacttcatgaaccagaatgaatcaatcttttttgtttgggccaaaatgtaatacattccagtctacacttttgttttgtattgttgctcctgaacacctgttttcaaattggttttaaggcgaccagttttcgttgtattgtgttcatttaaatgggtgatatagg

SEQ ID NO: 19836 - DNA, 677 bp, Homo Sapiens
gcacgaggaagaaatagtgatctgaatcttttagagtggacccatcacagcatgaaaccacacgagattcctcaacagctgaatgggagtgattgtggaatgtttacttgtaaatatgcagattatatttctagggacaaacctatcacatttactcagcaccagatgcctctcttccggaagaagatggtgtgggaaatccttcatcagcagttgctgtgagaaaactttgcctggtccctctagctgctggtggttctttcacagacatttccatatacctcatgcattgttgagtataaacctcagaattgtaggggctggcctgagctgtttatttcaaaagatactattcaatttaaagctatttttcctcagagtttttgttttctatatattaagtctaaattaagttttctactcattaagactaacatctccccactccatccccactgaaatttgtggaagaaaatttagtacttggctctgaggttgccagttatacaataatctattttgcatatgaaagtttgtatttaacttttttgttcattaaaaaccttactgatatggttataacttcagacagtttagagttggtcagaacatattttgcaagatctagtgcctagtgttgcttttctgatgtaataaaaggtggtctggcagaacct

SEQ ID NO: 19837 - DNA, 338 bp, Homo Sapiens
  misc_feature (183)..(200): n is a, c, g, or t
gcacgaggttagtctttggggcaagaggagaacaggaatgctgggctgtttactttaggtggagaatccatcttcagacctttggactattttctttcaactgcagtgtatagaaaaaccaaactacgacctcagagcagagtattaatgaaaagcacaaaaaaaggaactaagttcagcgannnnnnnnnnnnnnnnnnagatttttcttttgaaaattaatgactcttatgacatttgtttttcagttcaagtgctcttcagcactgtcttgtctcccaatattccaaccccactggcacatttttctcttgctttctctctccgattttgctctg

SEQ ID NO: 19838 - DNA, 989 bp, Homo Sapiens
  misc_feature (886)..(912): n is a, c, g, or t
ggaattcggcacgaggcccccgccaagccactccgaggcccggcggccggcggcgcgcacctgtactgccccctgcggctgcccgcagccctgcaggcggcctcagtccgccgccctggcccgcacctgccgtacccggtggagacgctcctagcctgagtagcgccgcggggcccgggaacgccgagtgcgcgccgtcggggaggcgggaacgcgggcccgcgcgcggactttgcactttgaatccagaggaagatgaatttttaaaatctccatcaaacgtgccttaaagctaaagcattttgacaggagtatttaaacttagtccaggatattttcctttgtgttttataactttacagaggaccaaagcaattcttgttttagtttctttgcgaagcctgctcctccttcccttcataaggactttttttgtctttctttaacgcccaggcttcgtcttatttctactgtttttgtcgcaacttccattgatttatgtcccttccctcccccctaagtacatcagggaacctttccacactataaatgatatgactactgtttggggtttctgggcccccatccgtgtacgtatgtggcatttccaggtatgactgagtgtgagagacatgtcagaggctcttcagtgatttcttgctattgaccgatgcttcactgtgccaaaagagaaaaaaaatgttgggttttgtaattaaattatttatatatttttgaaacccgaattgaaaatgttgcaggcaacgggctacagctttattagtggttctctaactgtggtctccttgggccaagcaatttctttaaaggaaaagttgattatgtatgtggggtgccaggaccactgccttgaaagcaagtgtgnnnnnnnnnnnnnnnnnnnnnnnnnnngtgtctgtgtacatattcatgtataaattttatgaaacccaagcatagtgcttattttttaataaaacaactgactt

SEQ ID NO: 19839 - DNA, 1401 bp, Homo Sapiens
  misc_feature (97)..(141): n is a, c, g, or t
gcacgagggccaccctatgtgactccagccacatttgaaacccctgaggtgcatgcaggcactggagtggtgggcaacaagcccaggccccgcggcnnnnnnnnnnnnnnnnnnnnnnnnnnnnnnnnnnnnnnnnnnnnnccgctgcccagcctagatgtcttcctgagccgctacacgagtgaggacaatgcctccttccaggagatcatggaggtggccaaggagagaagccgggcacgccacgcttggctctaccaggctgaggaagagtttgagaagaggcagaaagataatctcgaactcccgtcagcagagcaccaggccatcgagagcagccaggccagtgtggagacctggaagtacaaggccaagaattccctcatgtactatccagagggtgtccctgacgaggagcagctgtttaagaagccccggcaggtggtacataagaacacgcgcttccttagggaccccttcagccaagccctgagcaggtgccagctccagcaggcagccgccctcaatgcccagcacaaacagggcaaggtgggccccgatggcaaggagctgatcccccaggagtcccctcgagtgggtggatttggatttgttgccactccttcccctgcccctggtgtgaacgagtccccgatgatgacctggggggaggttgagaacacacccttgagagttgaagggtcggaaacgccctacgtggacaggacacccggcccagcttttaagatcctggagccaggccgcaggtgcggctgggtctgaagatggccaacgaggccgctgccaagaaccgggccagaagcaggaagccttgcggagagtgacggagaatctggccagcctcacccccaaaggcctgagcccagccatgtcgccagccctacagcgccttgtgagcaggacggccagcaagtacacagaccgggccctgcgggccagctacacaccatccccagcacgctccacccacctcaagaccccggccagtgggctgcagacccccacaagcacaccggcgcctggctctgccacacgcacccctctcacacaggacccggcctccatcacggacaacctgctgcagctccctgcccggcgcaaagcttcggacttcttttagagccaggcctgggctgggctcatagacgcttcacagagcctgcagggcagctgtacacccagcagaggactccagccttctcggggcccaggcctgggccagaagctgttgaccataccaggagtcactggagaaaggggctgtgctggggccagactggcacaaggcactcgtgcccacaccacaccccagggccttgccaagctgtttgctgtttaattggccccttgaactgtcattaaagaacacctatgtacagt

SEQ ID NO: 19840 - DNA, 1039 bp, Homo Sapiens
gcacgagggccaatcagggcctagtttctattaataaattggataaatttaataaaataagagtgatactgaaagtgctcagatgactaatattatgctatagttaaatggcttaaaatatttaacctgttaacttttttccacaaactcattataatatttttcataggcaagtttcctctcagtagtgataacaacatttttagacattcaaaactgtcttcaagaagtcacgtttttcatttataacaattttcttataaaaacatgttgcttttaaaatgtggagtagctgtaatcactttattttatgatagtatcttaatgaaaaatactacttctttagcttgggctacatgtgtcagggtttttctccaggtgcttatattgatctggaattgtaatgtaaaaagcaatgcaaacttaggcgagtacttcttgaaatgtctatttaagctgctttaagttaatagaaaagattaaagcaaaatattcatttttactttttcttatttttaaaattaggctgaatgtacttcatgtgatttgtcaaccatagtttatcagagattatggacttaattgattggtatattagtgacatcaacttgacacaagattagacaaaaaattccttacaaaaatactgtgtaactatttctcaaacttgtgggatttttcaaaagctcagtatatgaatcatcatactgtttgaaattgctaatgacagagtaagtaacactaatattggtcattgatcttcgttcatgaattagtctacagaaaaaaaatgttctgtaaaattagtctgttgaaaatgttttccaaacaatgttactttgaaaattgagtttatgtttgacctaaatgggctaaaattacattaataaactaaaattctgtccgtgtaactataaattttgtgaatgcattttcctggtgtttgaaaaagaagggggggagaattccaggtgccttaatataaaggtttgaagcttcatccacccaagttaaataaagctattttaaaatgcacttt

SEQ ID NO: 19841 - DNA, 846 bp, Homo Sapiens
gcacgaggcttaggtaccagttagcgtcaggggagctgggtcaggcggtcgccgggacaccccgtgtgtggcaggcggcgaagcgctctggagaatcccggacagccctgctccctgcagccaggtgtagtttcgggagccactggggccaaagtggagcgaccccattacgctaaagatgaaaggctggggttggctggccctgcttctgggggccctgctgggaaccgcctgggctcggaggagccaggatctccactgtggagcatgcagggctctggtggatgaactagaatgggaaattgcccaggtggaccccaagaagaccattcagatgggatctttccggatcaatccagatggcagccagtcagtggtggaggtgccttatgcccgctcagaggcccacctcacagagctgctggaggagatatgtgaccggatgaaggagtatggggaacagattgatccttccacccatcgcaagaactacgtacgtgtagtgggccggaatggagaatccagtgaactggacctacaaggcatccgaatcgactcagatattagcggcaccctcaagtttgcgtgtgagagcattgtggaggaatacgaggatgaactcattgaattcttttcccgagaggctgacaatgttaaagacaaactttgcagtaagcgaacagatctttgtgaccatgccctgcacatatcgcatgatgagctatgaaccactggagcagcccacactggcttgatggatcacccccaggaggggaaaatggtggcaatgccttttatatattatgtttttactgaaattaactgaaaaaatatgaaaccaaaagt

SEQ ID NO: 19842 - DNA, 1458 bp, Homo Sapiens
gcacgaggagaacacgctgtgtggctgaaaagtgaaggcaagagctgatttggcctctgtgctcccctccgcaaggggatcgttttctccagaagagctggatattctttcgcccagttatggcagacaagttaacgagaattgctattgtcaaccatgacaaatgtaaacctaagaaatgtcgacaggaatgcaaaaagagttgtcctgtagttcgaatgggaaaattatgcatagaggttacaccccagagcaaaatagcatggatttccgaaactctttgtattggttgtggtatctgtattaagaaatgcccctttggcgccttatcaattgtcaatctaccaagcaacttggaaaaagaaaccacacatcgatattgtgccaatgccttcaaacttcacaggttgcctatccctcgtccaggtgaagttttgggattagttggaactaatggtattggaaagtcaactgctttaaaaattttagcaggaaaacaaaagccaaaccttggaaagtacgatgatcctcctgactggcaggagattttgacttatttccgtggatctgaattacaaaattactttacaaagattctagaagatgacctaaaagccatcatcaaacctcaatatgtagaccagattcctaaggctgcaaaggggacagtgggatctattttggaccgaaaagatgaaacaaagacacaggcaattgtatgtcagcagcttgatttaacccacctaaaagaacgaaatgttgaagatctttcaggaggagagttgcagagatttgcttgtgctgtcgtttgcatacagaaagctgatattttcatgtttgatgagccttctagttacctagatgtcaagcagcgtttaaaggctgctattactatacgatctctaataaatccagatagatatatcattgtggtggaacatgatctaagtgtattagactatctctccgacttcatctgctgtttatatggtgtaccaagcgcctatggagttgtcactatgccttttagtgtaagagaaggcataaacatttttttggatggctatgttccaacagaaaacttgagattcagagatgcatcacttgtttttaaagtggctgagacagcaaatgaagaagaagttaaaaagatgtgtatgtataaatatccaggaatgaagaaaaaaatgggagaatttgagctagcaattgtagctggagagtttacagattctgaaattatggtgatgctgggggaaaatggaacgggtaaaacgacatttatcagaatgcttgctggaagacttaaacctgatgaaggaggagaagtaccagttctaaatgtcagttataagccacagaaaatttagtcccaaatcaactggaagtgttcgccagttactacatgaaaagataagagatgcttatactcaccacaattttgtgaccgatgtaatg

SEQ ID NO: 19843 - DNA, 895 bp, Homo Sapiens
  misc_feature (815)..(833): n is a, c, g, or t
ccccgggctgcaggagaacattgagtccagtgagattaagtgatttttgcaggctatgaggttttatgctattcctgtgttctccaaaacaagaaaataaaaagacatgacttattctctgttcatacagcaagtatggaaaaaagatgatctagaagtcaactatctcaacctccattgttacccactaggtttttttctaataatgttaaaggctatttaatttatttaatcaactttaagcattacattctcaattggggacaaaaattggttcttggggtgaaaaaatattagatatggcttgtggacttccaatatcatcctatccaacaaaatcttattccttagtattaatttatctcattgggaagaaatttgtagttaaaactaatataatttgaatttaatttctgtaattgggaaggagggtaataatgaacaaaaagtttgagaaaaaaatgctttaatgggttttacaggcatgctacaatccaggactgtggtgttctatgtgccgtgtatggtcatattagtagctatttgttgcaagatacttgaagccaaatgtttgcagtataggttcctggctactgtttatgctgtgatttcactctgtctatcatgggcagtattagaaaacacactggttttcactatctggtttacaaacactatcattattttacctggattgaagtgcagaatttggcatatcgatgcatgcaatggaaagaaaaaaatttgttaaaatttgtaaatgttcagctaaatctcaaatatactgtgggatgagtatctcagggtaagtaacnnnnnnnnnnnnnnnnnnntcactgaatttttccctcacagtcagtagctttgtttgatatttaacaatagtatatggtga

SEQ ID NO: 19844 - DNA, 991 bp, Homo Sapiens
gcacgaggcctgtatagatgtcctcaaggaacttgtacttttgagtccccatgattttcttcatactctggttccctttctacaacacaaccattgtacttaccatcacagtaatataccaatgtctcttggaccttatttcccttgtcgagaaaatatcaagctaataggagggaaaagcaatattcggcctccgcgccctgaactcaatatgtgcctcttgcccacaatggtggaaaccagtaagggcaaagatgacgtttatgatcgtatgctgctagactacttcttttcttatcatcagttcatccatctattatgccgagttgcaatcaactgtgaaaaatttactgaaacattagttaagctgagtgtcctagttgcctatgaaggtttgccacttcatcttgcactgttccccaaactttggactgagctatgccagactcagtctgctatgtcaaaaaactgcatcaagcttttgtgtgaagatcctgttttcgcagaatatattaaatgtatcctaatggatgaaagaacttttttaaacaacaacattgtctacacgttcatgacacatttccttctaaaggttcaaagtcaagtgttttctgaagcaaactgtgccaatttgatcagcactcttattacaaacttgataagccagtatcagaacctacagtctgatttctccaaccgagttgaaatttccaaagcaagtgcttctttaaatggggacctgagggcactcgctttgctcctgtcagtacacactcccaaacagttaaacccagctctaattccaactctgcaagagcttttaagcaaatgcaggacttgtctgcaacagagaaactcactcccagagcaagaagccaaagaaagaaaaactaaagatgatgaaagagcaactcccattaaaggcggccgtgttagcagtgatgagggagcacactgtagacagctgcatcagtgacatgaaaaacagaaa

SEQ ID NO: 19845 - DNA, 1458 bp, Homo Sapiens
gcacgaggattgatcccaacatttacttggagtataatttctttgaaacgactatcaagtttgccccagcaaacctaggctatgcgagaggcgtagatcccccaccatgtgacgctgggacagaccaggactccaggtggaggttgcagtatgatgtctatcagtattttctgcctgagaatgacctcactgaggagatgttgctgaagcatctgcagaggatggtcagtgtgccccaggtgaaggccagtgctctcaaggtggttaccctaacagctaatgataagacaagtgtttccttctcctccctcccgggacaaggtgtcatatacaatgtcattgtttgggacccgtttctaaatacatctgctgcctacattcctgctcacacatacgcttgcagctttgaggcaggagagggtagttgtgcttccctaggaagagtgtcttccaaagtgttcttcactctttttgccctgcttggtttcttcatttgtttctttggacacagattctggaaaacagaattattcttcataggctttatcatcatgggattcttcttttatatactgattacaagactgacactcatcaagtatgatggaaacctaaagatttttcatgatgatggtgtattctgggtcactttctcttgcatagctatcctcattccagtagttttcatgggctgcctaagaatactgaacatactgacttgtggagtcattggctcctattcggtggttttagccattgacagttactggtccacaagcctttcctacatcactttgaacgtactcaagagagcgctcaacaaggatttccacagagctttcacaaatgtgccttttcaaactaatgacttcattatcctggcagtatggggcatgctggctgtaagtggaattacgttacagattcgaagagagagaggacgaccgttcttccctccccacccatacaagttatggaagcaagagagagagcgccgagtgacaaacattctggaccctagctaccacattcctccattgagagagaggctctatggccgattaacccagattaaagggctcttccagaaggagcagccagctggagagagaacgcctttgcttctgtagatgcccaggggcttggtcagtgtgcctcagctttggagttcatgcctggagtggttcaacagtctctggtgcaagtctaataagagatcaggcatatatatctgttctttgcataatattatggtgcccttattgatatatggtaagggtgtactaggggattaggatgattgtaagagaatgagaaagatgaccaaaaggttggtggtagggaggctttttcttatttccaaatacttgagaaattaccttttggtttacaaatctatgatcaacttattccattaaatagatacattaaaaaaattaaaaactgattcttctgcag

SEQ ID NO: 19846 - DNA, 918 bp, Homo Sapiens
gcacgaggcttctacgctgcctcaacactgaaggttgacacaggaaagtcgtactgttcacacacacagtttgagactccaagccaagagtgccacatccctatcctgtggccttttggaaatccaaattgcctgaacatggcggggctttcctgcacattctcctgatttgagattcacgggcacacctttcttttcttttcctcttgtgcctagttaagtgggaatgtgtttggagataggggaaatcacataactggtacaagtatggggtaattgcttaaacatgcctggtggaagtctgatagcgtctctgcacgtgacctctgacaaagcccatcccaggagacggggtgaagctattccccacactctcctgtgaacactggagtcttgcaagacccagggagaacccactgcttttcccaggaggctccaggattaggaaatgtgtgtatttagtgaaaaataggtttgtagtgaaatagttactatttcatgaaagtagatatttttagaatttttgaaataccacagttgttttcctggattataaggaaaggcacattacatttagtcttcctttcgatataaaactctttgaagaaatatgatttttagaaatcagctacccattatagcacaaaatcagccaaagcagaatttttaaaaattggcttttttaggattctttttctccccctcccatcttagtcttaccttgagggaacagtcatatgagaaggaactttgtcacatctaagctgtggtgtgttccccatgtgtgtgtacaacactggtgactccaggaaccattttcacctattaccagtgttccctggggactcctcttaatgtttccaaatgggaaggacagttgatttccaacatgaggtttttgttttttatccagaaata

SEQ ID NO: 19847 - DNA, 1598 bp, Homo Sapiens
gcacgagggaactaatggattgttgcttgatagtgtatcatccttatagacctttgctccagtatgtgcaggacatgggccaagaagacatgttgcttccccttgcatggaggatagtgaatgatacctacagaacggatctttgcctactgtatcctcctttcatgatagctttagcttgcctacatgtagcctgtgttgtacagcagaaagatgccaggcaatggtttgctgagctttctgtggatatggaaaagattttggaaataatcagggttattttaaaactatatgagcagtggaagaatttcgatgagagaaaagagatggcaaccattcttagtaagatgccaaaaccaaaaccacctccaaacagtgaaggagagcagggtccaaatggaagtcagaactctagctacagccaatcttaaaacattccgaagaattccatagtggaccacttggaaataaaccattggacagatttcagtaatgtcttcagtggaacacaaatgaaaatgaatagcttgtttctgtcaagcatattggaaagtgattttatttttgcaaaataagtttttctttaatatgattctagtacataattgattaaaatctcttgattataaatgtttggaaaggttctaaggggacctacagacagacatacatagacatttcaaaattaatagcttttgattagtataatatttcttaatttggataataaaaattgtagctttttattaagccaggaaacatgaagcataatttgtttaaaattctctttggtcattgagggaccaaaaaaggacgtaaaatttacagtcaatctatgagggtttttttccctccataagtttaactttaaaactgtatttaaggaatcaaatcttacaaaatcctggaagattttggtaatgatgttgataatttcagggaaattaatcaagtacctatattgatttaaaagtgtattttattcagtagtttgaggatcttgccgtggaagatactagcccagcctagcagaaaagtgcaatatgtatagcatactttgacattttaaacatgatagtccataaccattttgaaatgctgggcaaactacatgaagttatttataattaattcacagctaatcaggcattttgaaagcttaattggattcaaaaatcataatgttggaatttggtaaaattttaatgttgatttttactgtgaaaaggtttttataagatatacacaccctagtttaatgttgtgtcttggtgtggatttacagatttactacaggtattctgaaccaggaacacaatcaggtttcaggccagtttgatactggctgtccttaattctaatatgagagtaggacatcatactaaatgttatgtcagtgggactgtactgtctgtggaacttagcaaattaatcattttcttcagacttgaaggagagtgataaataaaatttggagtcataggatattgatgcacaatttaaggattaaacatttttaatcaattgtggatgatggcttattaaatgttgacttcctagtataaaactgcaagaataaaagtaacttctccagctgt

SEQ ID NO: 19848 - DNA, 1163 bp, Homo Sapiens
agttctgctagactttattcaaaactggctctattcttaattatttgagagacctaaaattctagtgttcaaatgtaaatacccatcatatactgaaaagtcatcttcaaatttgtgttctgacccaaatttggctcaattaaatcatacgaaagtcagacaacacaaatggttacacctcagcatataacaaaatcctggaagcagcatagcaagtgagctatgacatcatttaactctcaaacagaactgtaatcttaagttacacacaccacaatacacctttgcacaggtaattttattctctcctgtgggtgttgacagtgctcattgattgaaatttgaaacgttcagaaatcccatacctgaagatggtcacatattctttacatcatgattcagtaactattcaacagttatgtctactaaatacagtgaacaaaacagtataaatgtttacaccattcccctgtgaacagggcttttgtgcacaatagtaacaaatggaattaatgcataccatgatatcaataaggaagagaccttctctttaaataaactattttgtttataaataaactctgatttttttagtacacatttacagacctgatcaataaaaagaaactatatatatatattttttcctttaaaaagaaaatgttgagatacagaccactgtgggagaattcacctaggaaagggggtaagaagcaagcaaaggatactagagttaaaagtacgaccatactgcaacttatttctgttagcacacacaaacacaaggacaggattgtcgggggaggagcccattttcacttgaattccagcaagttgcaatcaatcttgtagtacacataggggtagtattcttgttgactcaggtttaaacctggaatatccataggagcatcaataatagctgctgcactgctgtctagatgtttatacaattcatgtaatacttctctcagtttcttcaaagttttcttattgggctgaagtaacattgcttggaagttcactggcaagccataccttaaaacagactcaacgaaaacccgtaatgctttcacgtgaatccatgcaataaatgcttcactaaaattcactttcagccacgtacaagtggtccaaattgttttttcttatcagtagaaagc

SEQ ID NO: 19849 - DNA, 1153 bp, Homo Sapiens
  misc_feature (1102)..(1112): n is a, c, g, or t
gcacgaggggcgtgcctgcgctctctgcaggcagaagcgaacaaagacccagcaagagaaggcagaggctaagacccatcccgtatctgctctcctgaaataattctggagtcatgcctgaaatgccagaggacatggagcaggaggaagttaacatccctaataggagggttctggttactggtgccactgggcttcttggcagagctgtacacaaagaatttcagcagaataattggcatgcagttgggtgtggtttcagaagagcaagaccaaaatttgaacaggttaatctgttggattctaatgcagttcatcacatcattcatgattttcagccccatgttatagtacattgtgcagcagagagaagaccagatgttgtagaaaatcagccagatgctgcctctcaacttaatgtggatgcttctgggaatttagcaaaggaagcagctgctgttggagcatttctcatctacattagctcagattatgtatttgatggaacaaatccaccttacagagaggaagacataccagctcccctaaatttgtatggcaaaacaaaattagatggagaaaaggctgtcctggagaacaatctaggagctgctgttttgaggattcctattctgtatggggaagttgaaaagctcgaagaaagtgctgtgactgttatgtttgataaagtgcagttcagcaacaagtcagcaaacatggatcactggcagcagaggttccccacacatgtcaaagatgtggccactgtgtgccggcagctagcagagaagagaatgctggatccatcaattaagggaacctttcactggtctggcaatgaacagatgactaagtatgaaatggcatgtgcattgcagatgccttcaacctccccagcagtcacttaagactattactgacagccctgtcctaggagcacaacgtccgaaaatgctcagcttgactgctccaaattggagaccttgggcattgtccaacgaacaccatttcgaattggaaatcaaagaatcactttggcctttcctcattgacaagagatggagacaaacggtctttcattagtttatttgtgttgggttcnnnnnnnnnnnaaatgaaaagtatagtatgtgccactttttaaagaacaaag

SEQ ID NO: 19850 - DNA, 997 bp, Homo Sapiens
gcacgaggtggcggcggcggaggccggtggcgacgacgcccgctgcgtgcggctgagcgccgagcgggcacaggcgctgctggccgacgtggacacgctgctgttcgactgcgacggcgtgctgtggcgcggggagaccgccgtgcctggcgcgcccgaggccctgcgggcgctgcgagcccgcggcaagcgcctgggcttcatcaccaacaacagcagcaagacccgcgctgcctacgccgagaagctgcggcgcctgggcttcggcggccccgcggggcccggcgccagcctggaggtcttcggcacggcctactgcaccgcgctctacctgcgccagcgcctggccggcgcccccgcgcccaaggcctacgtgctgggcagcccagccctggccgcggagctggaggccgtgggcgtcgccagcgtgggcgtggggcccgagccactgcagggcgagggtcccggcgactggctgcacgcgccgctggagcccgacgtgcgcgcggtggtggtgggctttgacccgcacttcagctacatgaagctcaccaaggccctgcgctacctgcagcagcccggctgcctgctcgtgggcaccaacatggacaaccggcttccgcttgagaacggccgcttcatcgcgggtaccgggtgtctggtccgagccgtggagatggccgcccagcgccaggccgacatcatcgggaagcccagccgcttcattttcgactgcgtgtcccaggaatacggcatcaaccccgagcgcaccgtcatggtgggagaccgcctggacacagacatcctcctaggcgccacctgtggcctgaagaccatcctgaccctcaccggagtctccactctaggggatgtgaagaataatcaggaaagtgactgcgtgtctaagaagaaaatggtccctgacttctatgttgacagcatagccgaccttttgcctgcccttcaaggttaaagattgagtgtctttaatctgcag

SEQ ID NO: 19851 - DNA, 1721 bp, Homo Sapiens
gcacgaggctgggatccgcatctgcctgggatcatcaagccctagaagctgggtttctttaaattagggctgccgttttctgtttctccctgggctgcggaaagccagaagattttatctagcttatacaaggctgctggtgttccctcttttttttccacgagggtgtttttggctgcaattgcatgaaatcccaatggtgtagaccagtggcgatggatctaggagtttaccaactgagacatttttcaatttctttcttgtcatccttgctggggactgaaaacgcttctgtgagacttgataatagctcctctggtgcaagtgtggtagctattgacaacaaaatcgagcaagctatggatctagtgaaaagccatttgatgtatgcggtcagagaagaagtggaggtcctcaaagagcaaatcaaagaactaatagagaaaaattcccagctggagcaggagaacaatctgctgaagacactggccagtcctgagcagcttgcccagtttcaggcccagctgcagactggctccccccctgccaccacccagccacagggcaccacacagccccccgcccagccagcatcgcagggctcaggaccaaccgcatagctgcctatgcccccgcagaactggctgctgcgtgtgaactgaacagacggagaagatgtgctagggagaatctgcctccacagtcacccatttcattgctcgctgcgaaagagacgtgagactgacatatgccattatctcttttccagtattaaacactcatatgcttatggcttggagaaatttcttagttgggtgaattaaaggttaatccgagaattagcatggatataccgggacctcatgcagcttggcagatatctgagaaatggtttaattcatgctcaggagctgtgtgcctttccatcccttccggctccctacccctcacttccaagggttctctctcctgcttgcgcttagtgtcctacatggggttgtgaagcgatggagctcctcactggactcgcctctctcctctcctccccccaggaggaacttgaaaggagggtaaaaagactaaaatgagggggaacagagttcactgtacaaatttgacaactgtcaccaaaattcataaaaaacaatagtactgtgcctctttcttctcaaacaatggatgacacaaaactatgagagtgacaaaatggtgacaggtagctgggacctaggctatcttaccatgaaggttgttttgcttattgtatatttgtgtatgtagtgtaactattttgtacaatagaggactgtaactactatttaggttgtacagattgaaatttagttgtttcattggctgtctgaggaggtgtggacttttatatatagatctacataaaaactgctacatgacaaaaaccacacctaaagaaattttaagaatttggcacagttactcactttgtgtaatctgaaatctagctgctgaatacgctgaagtaaatccttgttcactgaagtctttcaattgagctggttgaatactttgaaaaatgctcagttctaactaatgaaatggatttcccagtaggggtttctgcatatcacctgtatagtagttatatgcatatgtttctgtgcatgttctctacacaattgtaaggtgtcactgtatttaactgttgcacttgtcaactttcaataaagcatataaatgttgat

SEQ ID NO: 19852 - DNA, 1219 bp, Homo Sapiens
  misc_feature (206)..(231): n is a, c, g, or t
taagtcactaccccagccagaaactaacattctcaaaagctactaccaaaaaaaccccacaaatttgccaatccatgaaagtatcataggaagtctacctttccaaggaatttggcattgtggccctgctcttgccaaatgctctccagcattgttggtatcaaggtggtctggttgagtaaacttgaccaaacaaaaattaactnnnnnnnnnnnnnnnnnnnnnnnnnngctgatcaaaaagcccttcagggtctcttgtgcatccaggaggtcattgtagatatcaataatatagtgcctaagtgccactttattgccaagtctagattgatacttttttcagataaaccagctttttatgtaaagagtaagggaaaaagttaaatctttaattctgacctgccataaatacccaaagatataaactgtcttccaccacccccctcataactaagacatccttcctgagtcactcttaatcatgaaacttgattttctcaattggccagtcttctgatctttagtatctctttagttcagtaatttttacctacctacttgatttattttcctttaaaaggtgaaatgacatttaaagaaaaacaaacacccatcattcctcagtcccaacacagcagttcttttcactcttgcttgtaactttcaggccttacccacatgtgttcctatagagttgcatgtagctaaaattatagtgtgctgcctaactttgtgctaataacgaaggacacacattatcattgcctcacagtggatggcacctgaccccatttttccaaggattctattttccagtgaatttttgtcaccgagttaatttcccaagtctgatagcatgaatgcttatttgtgctgtgaaaagcagagcagcctgactcagctttccattttcataggataatatgtgccaaaaaaggtttattttcttggtaaaatcagaattgtagaattgtgctatttttaatttttaaaatttttggttagagcttatagacattacttttatgattattttgcgtgctaataagttaaagggtatgttttgaactatagcactaattaatgtgtgtgatcctagtatgttgatagctttgatttgtgagtggtttactagtcatttattatgattcccatgaactctgatatgattcatgtggtttaactcaggttgaataaaagcatccatttcttttat

SEQ ID NO: 19853 - DNA, 1592 bp, Homo Sapiens
  misc_feature (1233)..(1246): n is a, c, g, or t
gcacgaggctctacgtgcaaggcaatgaacgggcccatggccaggacttgggcacggctggcagctgcctgcgcaagttcagcacaatgcccttcctgttctgcaatattaacaacgtgtgcaactttgcatcacgaaatgactactcgtactggctgtccacccctgagcccatgcccatgtcaatggcacccatcacgggggaaaacataagaccatttattagtaggtgtgctgtgtgtgaggcgcctgccatggtgatggccgtgcacagccagaccattcagatcccaccgtgccccagcgggtggtcctcgctgtggatcggctactcttttgtgatgcacaccagcgctggtgcagaaggctctggccaagccctggcgtcccccggctcctgcctggaggagtttagaagtgcgccattcatcgagtgtcacggccgtgggacctgcaattactacgcaaacgcttacagcttttggctcgccaccatagagaggagcgagatgttcaagaagcctacgccgtccaccttgaaggcaggggagctgcgcacgcacgtcagccgctgccaagtctgtatgagaagaacataatgaagcctgactcagctaatgtcacaacatggtgctacttcttcttctttttgttaacagcaacgaaccctagaaatatatcctgtgtacctcactgtccaatatgaaaaccgtaaagtgccttataggaatttgcgtaactaacacaccctgcttcattgacctctacttgctgaaggagaaaaagacagcgataagctttcaatagtggcataccaaatggcacttttgatgaaataaaatatcaatattttctgcaatccaatgcactgatgtgtgaagtgagaactccatcagaaaaccaaagggtgctaggaggtgtgggtgccttccatactgtttgcccattttcattcttgtattataattaattttctacccccagagataaatgtttgtttatatcactgtctagctgtttcaaaatttaggtcccttggtctgtacaaataatagcaatgtaaaaatggttttttgaacctccaaatggaattacagactcagtagccatatcttccaaccccccagtataaatttctgtctttctgctatgtgtggtactttgcagctgcttttgcagaaatcacaattttcctgtggaataaagatggtccaaaaatagtcaaaaattaannnnnnnnnnnnnntagtaatttatatagatgtcagcaattaggcagatcaaggtttagtttaacttccactgttaaaataaagcttacatagttttcttcctttgaaagactgtgctgtcctttaacataggtttttaaagactaggatattgaatgtgaaacatccgttttcattgttcacttctaaaccaaaaattatgtgttgccaaaaccaaacccaggttcatgaatatggtgtctattatagtgaaacatgtactttgagcttattgtttttattctgtattaaatattttcagggttttaaacactaatcacaaactgaatgacttgacttcaaaagcaacaaccttaaagg

SEQ ID NO: 19854 - DNA, 1708 bp, Homo Sapiens
gcacgaggatgaaccaccacctccaccaagaccaatgctcagattttacctgattggtggtggtatccccatcattgtttgcggcataactgcagcagcgaacattaagaattacggcagtcggccaaacgcaccctattgctggatggcatgggaaccctccttgggagccttctatgggccagccagcttcatcacttttgtaaactgcatgtactttctgagcatatttattcagttgaaaagacaccctgagcgcaaatatgagcttaaggagcccacggaggagcaacagagattggcagccaatgaaaatggcgaaataaatcatcaggattcaatgtctttgtctctgatttctacatcagccttggaaaatgagcacacttttcattctcagctcttgggggccagccttactttgctcttatatgttgcactgtggatgtttggggctttggctgtttctttgtattaccctttggacttggtttttagcttcgtttttggagccacaagtttaagcttcagtgcgttcttcgtggtccaccattgtgttaatagggagggttagacttgcgtggatcatgacttgctgcccaggacggagctcgtattcagtgcaagtcaacgtccagccccccaactctaatgggacgaatggagaggcacccaaatgccccaatagcagtgcggagtcttcatgcacaaacaaaagtgcttcaagcttcaaaaattcctcccagggctgcaaattaacaaacttgcaggcggctgcagctcagtgccatgccaattctttacctttgaactccacccctcagcttgataatagtctgacagaacattcaatggacaatgatattaaaatgcacgtggcgcctttagaagttcagtttcgaacaaatgtgcactcaagccgccaccataaaaacagaagtaaaggacaccgggcaagccgactcacagtcctgagagaatatgcctacgatgtcccaacgagcgtggaaggaagcgtgcagaacggcttacctaaaagccggctgggcaataacgaaggacactcgaggagccgaagagcttatttagcctacagagagagacagtacaacccaccccagcaagacagcagcgatgcttgtagcacacttcccaaaagtagcagaaattttgaaaagccagtttcaaccactagtaaaaaagatgcgttaaggaagccagctgtggttgaacttgaaaatcagcaaaaatcttatggcctcaacttggccattcagaatggaccaattaaaagcaatgggcaggagggacccttgctcggtaccgatagcactggcaatgttaggactggattatggaaacacgaaactactgtgtaacattgctgggcttcctaggcagaaattcatataaactgtgatactcacattccttgaagctatgagcatttaaaaactgtttacagccaccatagggattcaaaagaatttggaataaactttgaagttttggattttacttatttttatccccaaattgttgctattttttaggatctgaaacaaaatctttctaaaacattgttttagttgtcaaagcaccaacaggacattttgggatgtgaaatgtaatttcttggaatctgtaatttgtacttaatatttcaggcttgtatttaatataataaataggtgtttgttattgtgtc

SEQ ID NO: 19855 - DNA, 819 bp, Homo Sapiens
gcacgagggctcaaagtgctaaattttcaggagtgaaaagaaaaagaggaaggaagaaacccctctcaggcaatcatgtacagccacccgaaacaatgaaatgtaatacattcataagacaagtgaaagaagagcatggcagacacacagatgcaactgtgaaagttccttttcttaagaaatgcaaggaagcaggacttcttaattacttacttgaagaaatattagacaaagttcattcaattccagaaaaactcatggatgagactacttcagaatcagactatgaagaaatcgggagtgcactttttgactgtagattgttcgaagacacatttgtaaattttcaagcagcaatagagaaaaaaattcatgcatctcaacaaaggtggcagcagttgaaggaagagattgagctacttcaggacttaaaacaaaccttgtgctcttttcaagaaaatagagatcttatgtcaagttctacatcaatatcatccctgtcttattagggattaccatttcctaagccaagagtcatgtcaaattgcaatcaggctcaaaaccagagaccaggctgtgaaatccacacatctttagaactagtcgtctcctcttggcctcagcagctcttccctgttcttactggttgacattttgatcactctttgcacactcttgtgttttttgctcactgtcacactcccagcacctagtatgctcagtaaatgtttgtggaataagtgcataaaatgttcttaacctttgattctacttacagcccatgatagcctcttagatataataaatttggattatact

SEQ ID NO: 19856 - DNA, 500 bp, Homo Sapiens
gcacgaggccgagtcagtagttgaagtccagggcattcgatactgtttatgatttccatatatgtatagtgcctatcccatgctgtagtcactgttatgttaaatccagaagttacactagagccagcgatactttatttgtagacaatcaatttgaatccatatgttattactggcagatgatacatgattacagttctgaatctgtaacacttacaaaaggaaacccagagcagcttgatgagtttttgtttctgcttcgttcctgggagtcagtagaaacagcagttgtatgtggttatgttagtctcaagatacttaatttgttgaccttacttcagaaaaattttgtatgtattatatttgtgggaaggtaaaataatcatttgagatttttatcaaatatgaagattagttatttatgaaaaacaaagaaatgtctatttttctttgttcccaattaatgtagataaattttaaaatgcattaaagcctcgtgc

SEQ ID NO: 19857 - DNA, 950 bp, Homo Sapiens
gcacgaggcaagaactgagctacactgagggactgagcctggtgtatatggcagcaagactggatggtggctttgcagcagtctccagagcattccatgagatccgggctcgaaatccagcatttcagccacaaactttgatggactttggctcaggtactggttctgtcacctgggctgctcacagtatttggggccagagcctacgtgaatatatgtgtgtggacagatcagctgccatgttggttttggcagaaaaactactgaaaggtggttcagaatctggggagccttatattccaggtgtctttttcagacagtttctacctgtatcacccaaggtgcagtttgatgtagtagtgtcagctttttccttaagtgaactgcccagcaaggctgaccgcactgaggtagttcaaaccttatggcgtaagacaggtcatttcctggtactggtggagaatggaacaaaagctgggcacagccttctcatggatgccagggatctggtccttaagggaaaagagaagtcacctttggaccctcgacctggttttgtctttgccccgtgtccccatgaactcccttgtccccagttgaccaacctggcctgtagcttctcacaggcgtaccatcccatccccttcagctggaacaagaaaccaaaggaagaaaagttctctatggtgatccttgctcgggggtctccagaggaggctcatcgctggccccgtatcactcagcctgtccttaaacggcctccccatgtgcattgtcacttgtgctgtccagatgggcacatgcagcatgctgtgctcacagcccgccggcacggcagggatttgtatcgttgtgcccgtgtcagctcctggggagatcttttacctgtgcttattccgtctgcgtttcctccatctacggctcaggatccctctgagagttgatgagga

SEQ ID NO: 19858 - DNA, 838 bp, Homo Sapiens
gcacgaggccttgttttgaagtcgctcatcagcgtcatccacctgatcacggccgcccgcaacatggctgccctggacgcagcagaccgcgccaagaagaagtgacgctggagccccgggtcctggctgcccacctgccctgggagtcttgctgtgccacacagctccccaccccctgctaggaggtcccagtctcacgccttcctcatgtgttgttctacctgctgggatgggggtcagcctctctttggtgacgtcacgttctctgggatcctgaggacccgggcctcaaatcagggaggatacgcgggaggccccctccatccaggcggtgctcctggggtgccgggaccgggcagtgtcacaccctgcctgctcagtcctggggtccgagatgctagggacgcttgagtgagggaggtggtgtgagggccaggtttcctgaaaggcgggagtcagacctccgcccccagccagagcaagcttggggcaccatgcccaggagggaagaagccatccacagccttccctgtcaccggctcctctgtcctgcctaccctggtcctggcgggacttcactatttgacttggtttcctttcagatattcttggctcagggcctgggttgagggagcttagggaaggacgtccgtctgggtgcttttcctccagtttgctggctggcttctccgtctacccacagtgacctcacagagaggcccctcctgccacccatgctcatgtggtgtccccaccgcccacttgtttgatgtcactgactgtctacatgtatttatattcttgatattttctaccctcactagaatgtaaactccat

SEQ ID NO: 19859 - DNA, 863 bp, Homo Sapiens
tggccggcgtggagagccgccagggctctatcaaggggttggtgtactccagcaacttccagaacgtgaagcagctgtacgcgctggtgtgcgaaacgcagcgctactccgccgtgctggatgctgtgatcgccagcgccggcctcctccgtgcggagaagaagctgcggccgcacctggccaaggtgctagtgtatgagttgttgttgggaaagggctttcgagggggtgggggccgatggaaggctctgttgggccggcaccaggcgaggctcaaggctgagttggctcggctcaaggttcatcggggtgtgagccggaatgaggacctgttggaagtgggatccaggcctggtccagcctcccagctgcctcgatttgtgcgtgtgaacactctcaagacctgctccgatgatgtagttgattatttcaagagacaaggtttctcctatcagggtcgggcttccagcctcgatgacttacgagccctcaaggggaagcattttctcctggaccccttgatgccggagctgctggtgtttcccgcccagacagatctgcatgaacacccactgtaccgggccggacacctcattctgcaggacagggccagctgtctcccagccatgctgctggaccccccgccaggctcccatgtcatcgatgcctgtgccgcccccaggcaataagaccagtcacttggctgctcttctgaagaaccaagggaagatctttgcctttgacctggatgccaagcggctggcatccatggccacgctgctggccggggctggcgtctcttgctgtgaactggctgaggaggactttctggcggtctccccctcggatcccgctacctgagg

SEQ ID NO: 19860 - DNA, 1454 bp, Homo Sapiens
  misc_feature (955)..(1005): n is a, c, g, or t
  misc_feature (1166)..(1202): n is a, c, g, or t
gcacgagggctactatattaagagaaatactgaaaggactcgattatctccattcggagaagaaaatccacagagacattaaagcggccaacgtcctgctgtctgagcatggcgaggtgaagctggcggactttggcgtggctggccagctgacagacacccagatcaaaaggaacaccttcgtgggcaccccattctggatggcacccgaggtcatcaaacagtcggcctatgactcgaaggcagacatctggtccctgggcataacagctattgaacttgcaagaggggaaccacctcattccgagctgcaccccatgaaagttttattcctcattccaaagaacaacccaccgacgttggaaggaaactacagtaaacccctcaaggagtttgtggaggcctgtttgaataaggagccgagctttagacccactgctaaggagttattgaagcacaagtttatactacgcaatgcaaagaaaacttcctacttgaccgagctcatcgacaggtacaagagatggaaggccgagcagagccatgacgactcgagctccgaggattccgacgcggaaacagatggccaagcctcggggggcagtgattctggggactggatcttcacaatccgagaaaaagatcccaagaatctcgagaatggagctcttcagccatcggacttggacagaaataagatgaaagacatcccaaagaggcctttctctcagtgtttatctacaattatttctcctctgtttgcagagttgaaggagaagagccaggcgtgcggagggaacttggggtccattgaagagctgcgaggggccatctacctagcggaggaggcgtgccctggcatctccgacaccatggtggcccagctcgtgcagcggctccagagatactctctaagtggtggaggaacttcatcccactgaaattcctttggcannnnnnnnnnnnnnnnnnnnnnnnnnnnnnnnnnnnnnnnnnnnnnnnnnnaaaagtcaacgagagccttcgctgactccaccgaagaggtgcgccactgggagccaccccagtgccaggcgcccgtccagggacacacacagtcttcactgtgctgcagccagatgaagtctctcagatgggtggggagggtcagctccttccagcgatcnnnnnnnnnnnnnnnnnnnnnnnnnnnnnnnnnnnnnaccatagtgcacatattccaggaaagtgtctttaaaaacaaaaacaaaccctgaaatgtatatttgggattatgataaggcaactaaagacatgaaacctcaggtatcctgctttaagttgataactccctctgggagctggagaatcgctctggtggatgggtgtacagatttgtatataatgtcatttttacggaaaccctttcggcgtgcataaggaatcactgtgtacaaactggccaagtgcttctg

SEQ ID NO: 19861 - DNA, 501 bp, Homo Sapiens
gcacgaggtgaaggagagggagctttgctctctctaggtgggcaagtttcctgggctctctgtgttgcctccctctggcttcttcctcccgtgccctctccccgtgtgccccagggggatcagggatcctcaccctcctgaggcccagtggggaagaatgaacatggcttcatccaggttaactgatgctgccatttgcccagcctcttccatcccagccctgtcagtgagcccaggtctggtgcaactgctgcaggatgcctgtagtagggaactctggaagtgtattgggctgaggtgggattttccctccccacagtgcactgagcaatggagggtggtgagggagccatgctgctgaattctggttggcatttccccattatgtaaaatggggtgttgggtagggcagactctgcttgggtttggttgtaagataaacctggaggagaagcacagttgtcccattgaattatttgagcaaaaactactgtaaataac

SEQ ID NO: 19862 - DNA, 133 bp, Homo Sapiens
gcacgagggctgagcacctcccatcctgctcacacgtccttccccataactatggaaatggccctaatttctgtgaaataaagactttttgtatttctggggctgaggctcagcaacagcccctcaggcttcc

SEQ ID NO: 19863 - DNA, 2014 bp, Homo Sapiens
  misc_feature (1602)..(1610): n is a, c, g, or t
ccccacgcgtccggaagaagcttataataatatacagtatatgtatatgtagggagcaattggtcaaaagtggctttttgtttccccaaggggaaagactggctttgtaattataattttttccttatttattttacttaaaactggtagagtctaagtattatatgaagtgcccatgattctgtcagtaaatttgaacatatttttattagttaatgtcagtttaagttgtccttttgtttgtttctatttttaaggtgaattttaatttctatctgaaatcagttaagataccttgagaaaaactgcagtgagaggagataaatatcctttttcaggaggaactgatatctctggctaaatatttgtccttttattatggtttctaaatcagttattttcttcagctttaatttcataaaattaaaaaactattttaaaaattcctgtagttgttggaataattaaaaattctggtgcagtggtggtataccaatctttagaattcttaagtattctaatgtttcaagttgagatcatgcttgggaaaatcatgtcatagcatttatgttattttcagatgccattttttaccctggaaagaagtcataatgttcatcataaccctagcagcctggatagtgagctaaacaaacccttcaaagattaaattttaatcaagtagaccgggaatacaaaagacaagtccttccttcccttccccccacctttacaaatcttactggaagggtgttcagaaattaaaatctgtgtttgctaagacttcattctgttgggggttttaagaagtaatatatgtaacataaaatatatgtaaacgattgcagtttttttggacgtttttccatgcatcagtaagttgtctgacagtagccaaatgtaacttgcagaaaattattgaaaattatattcagaataatagcaatcaggccttggatgttctttattaaactcttttcaggcagtaaatttaaaaaaaattgtcattttctaaagtccttttgctaaaactgttgactatggaaaacaacaaaaaggaattttttagtctgctgctattattaacatttattatctgtatcttttggctcaggaaatgacttcacctattttttccataagcagacctttaacagagtcacttaattgggctgcttaaacagatgttctgggagaaaattataatatttagtatttgtacaaaatatcaaaaagtattttgacaagtttctttttaagatagttcctaaagccttaccctggctagaggtgttttgtacaaattatatataagccagcctgatctaccaacatgccacagagaatcacaatcaacagtgtggggaaagtcagggcagtggaagtggatgcactctttttattttgaaggcttaaaccaaattgtcttggaattaaagctgtatttctgcagctttcggtacagagaaaaagaggaaagtgaagctgtgtcagttttaacattagctatatcaacatgtttaagaaagatagatgaagtcatttgcataaaggtacagcattgaaatactatgttgtgtttgtttttacatttttgcattnnnnnnnnncatgccgtaaaagccaagttaaatttcatattaaagcaagttctagtgtatgtgttgagttcctggtaatcacatacttgttcacatctacaccgtacttcatagtatgatttgtcaggggagggattgtggggtgacagttttacatttactttttcttcttaatgcagctggatctaagtaaaatgttttgaagtttatcagaaactaaatgtacttttaaaacgtatagggtcagggttgggggaaaaatacaggtatagtaagtaagaaaagtgacccatgaagaaagcatcgtgaggttgtatgttggttgactgtgattaaaatgcggggctggtgtaagttgtaagtggtggctgattgccgtgtactatgtacatgattgttgggatggctgtccc

SEQ ID NO: 19864 - DNA, 1322 bp, Homo Sapiens
gcacgaggcacacgcctaaatgggagagggcatgccttgctcattttgcgcccagaagaattgggttttcttcgttacttgaaacaatccaaggttccattaagtgaatttgacttttcctggtctaaaatttctgacattcagtctcagcttgagaaattgattgaaaagaattactttcttcataagtcagcccaggaagcatataagtcatacatacgagcctatgattcccattctctgaaacagatctttaatgttaataacctaaatttgcctcaggttgctctgtcatttggtttcaaggtgcctcccttcgttgatctgaacgtcaacagtaatgaaggcaagcagaaaaagcgaggaggtggtggtggatttggctaccagaaaaccaagaaagttgagaaatccaaaatctttaaacacattagcaagaaatcatctgacagcaggcagttctctcactgaacacatgccttcctttcatcttgaataactttgtcctaaaatgaattttttttccccttgatttaacaggatttttgtagactttagaatttggacttacctaacaagagtataaattgacttgggttgcaagcactgagcactgttacttctatcacgtctctcttttatttctgggatataaaacaggctttaagtttcttggttgcccaagggcagagcaaggaatatctggtgtttcttgtgatgataatattttaattttaaatatccctccctcatacaagtgtatgttaccattttaatataattctttttgtacctttccttcttgttttgcgaagatttttgtggcatggattgctgtgctcactgctgtaaaaggtgacctagtgtactgggcagctggtggcggtgcagaaaagagtctcaggttattttttgtttttagttatttcttggaccttgacagtatctaatgactcctcctgaaaatgctgcagtataaaagagcaaagagctttgggaaatacctaagaagcaccttaagattagggtggcattgcttttatagattcttgattttaaagcaacaggcctttctcaggtgttgcattttttggagcaaaaactatgggttgtaatttgaataaagtgtcactaagcagttataacgtttgatggctggggggtaggaagaggatggaattgagatgtttgagcctcatttacatcaatagaggtgtaatgtactgcatttctttcatttggtaacataacaaagactttcatacaaagaacgatgatgctcctcattaaggatttgtttattcaaggtggtttggatttgg

SEQ ID NO: 19865 - DNA, 1215 bp, Homo Sapiens
  misc_feature (1112)..(1130): n is a, c, g, or t
gcacgaggtgaccttttacctgtcaaaatgttctgaaagtgtgaagcaaaggaatgatgtgttttaccttcaacctgagcgctcctgtgtcccgaatagccccatgtggtactccacattcccgatagaccctggaaccctggacaccatgttaacacgtattctcatggtgagggaggtacatgaagaacttgccaaagccaaatctgaagactctgatgttgaattatcagattaaaacggaagtgaggttcttattttcatacatattggtatgcaccaaactgtgaatgcatccagctgttggaaaatgatgtataagtctaagtcctcttgacttgaccataagatcatggaaaacagatgacttgtgaaccccacagtgtggatgtgcaaatgaaaattgaaggaaagaatatgaactgagaaatgttctttggcagtgatatagttcttagacatcttcagaatgactaatttctccgagtggtgcataatcttattttgtttgggagtaacaaatcgtggaatatttttaaggaaaactgttgtataaaactttaccatagtaaccttagaccttagagaggtagctttggagtgaaactttggctgcaataggctactttggcaagccctccgtaaaagtcagaggagagatcagtacagagctaagagtgacatcaaatgaggactgtgggacccagatttgaagacccaataaaaatactcaactttttaaaaaagatagtgaagtggtcttgattgattttgattttcactgccaagccaatcatgtgaaggacagaagcttttgccatgggcccctcacatcagggaaaatgaccttcactgctgttaacagtaatgtgtccctttcattttctggatcaagccttctcagcggtgggtctggatgtgggtaaactaaggtaaaggggatgatattccacaaactaattatgcacacagaaaatctgtggagcctatcagaccccaagtgtcttgaaatgtttgtagaaacccactaaaatgccccttctctgggtgtgggcccttattgcagctgtctcacagcctgagctgtggtacagagaaatgggggttctccnnnnnnnnnnnnnnnnnnnccccaatggcagcttttctcccgttgtttaccttcctatttcccaaacagttcctcttattttgtcttttgcaccagtttctgga

SEQ ID NO: 19866 - DNA, 901 bp, Homo Sapiens
gcacgagggggaggtgcgtctgcagctggcgcggaagagggaagtgcggctccttcgaagacaaacaaaaacatctttggaagtttctttgctagaaaaatatccgtgctccaagtttataattgctataggaaataatgcagtagcatttctgtcatcatttgttatgaattcaggagtctgggaggaagttggttgtgccaaactctggaatgaatggtgtagaacaacagacactacacatctgtcctccacagaggctttttgtgtgttttatcatctaaaatccaatccctcggtttttctctgtcagtgcagttgctatgttgcagaagatcaacagtatcagtggctggaaaaggtttttggctcttgtccaaggaagaacatgcagataactattctcacatgtcgacatgttaccgattataaaacctcagaatccaccggcagccttccttctcctttcctgagagccctaaaaacacagaatttcaaagactcggcgtgttgtccattgctagaacaaccgaatatagtacacgaccttcctgcagcagttctaagctactgtcaagtatggaaaatcccagcaattctgtacttgtgttatactgatgtgatgaaattagacctaatcacagtggaagcttttaagcctatactttctaccagaagcttgaagggtttggttaagaatattccccaaagcactgagatactaaagaaattgatgacaacaaatgagattcagagtaacatttatacatgatcttaaacattgttttgtagtgtatattacttgtccattcctttaaggggagcagcctgcactcttttgtagattacttttgggggatatattttgagatgatgaaacggaataaaattgtaaaaaact

SEQ ID NO: 19867 - DNA, 1022 bp, Homo Sapiens
caatgacagaagtaaaaatatttattttatcttaaaaatctggtcccgcaaaaaggccaacacttttttcagttcacggtcttgacctttcaaagaagaaatctttcaactgagaggtgagttaataaaaggaatgtcagaggtgctttcagatttcttataaaccagtaaaccaagcaaccctggacttctagtttactgagctccttcttctagccattcacagttcctgaaggagaaaagaagttgtttgcagataaggcactttagaaaccaccaaagagaaaacccaagtctgccaggagctgcactgtgaacatgtgagccgagagggccaccagcagacagagtgccaactcccacagctccatgacaacagcatccaccttcctgccccaacactgttccgtctggcttccagcacccgccttggctctgtgttgcctacctggcctagaatacatggaaaccagacaactggccagagatgaacactgctgcctgaagctcagggcagctgcccacagtgaggaatcccttcagaggccccagctggggcacgccgagggagcagttccttttgcaaagatgagttagtgcggatcagcacattagcaaagcaaaatatttaaacatttttaaaagctgctaatccttccaatttccctcctgattgtagctcaagctgcagcctctaaacctgctaaaaatcaggaagaaacccctcctctggagggcagatggactgaagtggctacagccagtgtgggtacggaaagcctcccgctgaactgtgatcatgtgacacctgcagaccctgggaagggctgatctgaatcctggcagcaaactcaacctcttcttttgcttggggggcttgtgtttaatacaggtcattgcgatggaagaagtctcagagtctctctcacatcaagaggacagatggggacagggatcctggagcttttcttctcctgtgttctggttgcatacttgaatcccaggaaacagtgtcctcgtgc

SEQ ID NO: 19868 - DNA, 493 bp, Homo Sapiens
  misc_feature (66)..(81): n is a, c, g, or t
ccacgcgtccgggtcccatctttaattgagaaacatttatctgtataaaacatatttttggataannnnnnnnnnnnnnnnttgtatcgctacagaaaggctctaaaaagcatttgaggaaaatatttggttcccttttctataatcatcctttaagattcttatagctacatttggtttattcatcatatttacagtatatatattgttcttttcagtgttcacatcttgttccccatttctcacttgtgtcaccagctgtttgtgccatttttagtgtaaaagttgcagacctattagatctgcagtttaagttgccatgctgctaggaaattgtcctttttctttctagctgttaacctacttcctggaaaaagtagtagctctctgtagcattatggagtttcagtggaaccaaatttttgccattaaaaactggcattatactgaactatacattgagaaatcaatcaaaataaaaatttttactttc

SEQ ID NO: 19869 - DNA, 1511 bp, Homo Sapiens
gcacgaggcggctccgaggaaccgcggaggaagtgaagccagtcccgccactcttcagaccggccctccacctcggccaccgtcaccacagagctgaaggaggcctagagagccgcgcgtgccgcgccaccgagaccggaaggaggcggcacagacctggaggacgaccgcggagctgagcgcttagagccgccgaaccatagagatcggaaataggagcgagcggcagcgccggaaaggaggccaagagcgcgggcggcgaggcaagatggcggcaaccaagaggaaacggcgtggaggctttgcagttcaggcgaagaagccaaaaagaaacgaaatagatgcggagccgccagctaagcggcacgccacagcagaggaggtggaggaagaagagagggaccggatcccaggccccgtttgcaagggaaagtggaaaaataaggaacggattctcatcttttcttccagaggaataaattttagaacaagacatttaatgcaggacttgagaatgttgatgcctcattctaaagcagatactaaaatggatcgtaaggataagctatttgtgattaacgaggtttgtgaaatgaagaactgtaataaatgcatctattttgaagctaagaaaaaacaggatctctatatgtggctttccaaattcacctcacggaccatctgctaaattccttgttcaaaatattcataccctcgctgaactgaagatgactggaaactgtttgaaaggttctcggccccttttgtcttttgaccctgcttttgatgaattaccacattatgctttgttaaaagaactcttaattcagatctttagtacaccacggtatcatcccaaaagccaaccatttgtggaccacgtgtttactttcaccattttggataataggatatggtttcggaactttcagatcatagaagaagatgctgctcttgtagaaataggacctcgttttgtcttaaatctcataaagattttccagggaagttttggaggaccaaactttatatgaaaatcctcactaccagtcaccaaacatgcatcggcgtgtcataagatccatcacagctgcaaaatacagagagaaacagcaagtgaaagatgtgcaaaaactgagaaagaaagagccgaagactcttcttccacatgatcccactgcagatgtttttgtaacaccagctgaggagaaaccaatagaaatacagtgggtaaaaccagagccaaaagttgatttgaaagcaagaaagaaacggatttacaaaaggcaaagaaaaatgaaacagaggatggacagtgggaaaacaaaataagtcaatggaaacctgatttgtttttcagttactttatatttattttgtattcaatgtgtaaatactttttattatctaatactatcttacgtctaattagtgtagcatttacaagaaagaaaaattaagatcttaaaatcagtgattatctttttctaaataaaatatcaccagaattc

SEQ ID NO: 19870 - DNA, 893 bp, Homo Sapiens
gcacgaggacaacatggcggcgtccgtgaggggctcctttgggcaggggtagtgtttggtgtccctgtcttgcgtgatattgacaaactgaagctttcctgcaccactggacttaaggaagagtgtactcgtaggcggacagctttagtggccggccggccgctctcatcccccgtaaggagcagagtcctttgtactgaccaagatgagcaacatctacatccaggagcctcccacgaatgggaaggttttattgaaaactacagctggagatattgacatagagttgtggtccaaagaagctcctaaagcttgcagaaattttatccaactttgtttggaagcttattatgacaataccatttttcatagagttgtgcctggtttcatagtccaaggcggagatcctactggcacagggagtggtggagagtctatctatggagcgccattcaaagatgaatttcattcacggttgcgttttaatcggagaggactggttgccatggcaaatgctggttctcatgataatggcagccagtttttcttcacactgggtcgagcagatgaacttaacaataagcataccatctttggaaaggttacaggggatacagtatataacatgttgcgactgtcagaagtagacattgatgatgacgaaagaccacataatccacaaaataaaaagctgtgaggttttgtttaatccttttgatgacatcattcccagggaaattaaaaggctgaaaaaagagaaaccagaggaggaagtaaagaaattgaaacccaaaggcacaaaaaattttagtttactttcatttggagaggaagctgaggaagaagaggaggaagtaaatcgagttagtcagagcatgaagggcaaaagcaaa

SEQ ID NO: 19871 - DNA, 711 bp, Homo Sapiens
gcacgagggtaaatggcgcctctgggcaaaggaggcttgtattttgcacattttataaaaacttgagagaatgagatttctgcttgtatatttctaaaaagaggaaggagcccaaaccatcctctccttaccactcccatccctgtgagccctaccttacccctctgcccctagccaaggagtgtgaatttatagatctaactttcataggcaaaacaaaagcttcgagctgttgcgtgtgtgagtctgttgtgtggatgtgcgtgtgtggtccccagccccagactggattggaaaagtgcatggtgggggcctcggggctgtccccacgctgtccctttgccacaagtctgtggggcaagaggctgcaatattccgtcctgggtgtctgggctgctaacctggcctgctcaggcttcccaccctgtgcggggcacacccccaggaagggaccctggacacggctcccacgtccaggcttaaggtggatgcacttcccgcacctccagtcttctgtgtagcagctttaacccacgtttgtctgtcacgtccagtcccgagacggctgagtgaccccaagaaaggcttccccgacacccagacagaggctgcagggctggggctgggtgagggtggcgggcctgcggggacattctactgtgctaaaaagccactgcagacatagcaataaaaacatgtcattttccaaaa

SEQ ID NO: 19872 - DNA, 1063 bp, Homo Sapiens
gcacgagggctcggtttgagggctcggggcggggtttcctgttccttcttctgcgcggctgcagctcgggacttcggcctgacccagcccccatggcttcagaagagctacagaaagatctagaagaggtaaaggtgttgctggaaaaggctactaggaaaagagtacgtgatgcccttacagctgaaaaatccaagattgagacagaaatcaagaacaagatgcaacagaaatcacagaagaaagcagaacttcttgataatgaaaaaccagctgctgtggttgctcccattacaacgggctatacggtgaaaatcagtaattatggatgggatcagtcagataagtttgtgaaaatctacattaccttaactggagttcatcaagttcccactgagaatgtgcaggtgcatttcacagagaggtcatttgatcttttggtaaagaatctaaatgggaagagttactccatgattgtgaacaatctcttgaaacccatctctgtggaaggcagttcaaaaaaagtcaagactgatacagttcttatattgtgtagaaagaaagtggaaaacacaaggtgggattacctgacccaggttgaaaaggagtgcaaagaaaaagagaagccctcctatgacactgaaacagatcctagtgagggattgatgaatgttctaaagaaaatttatgaagatggagacgatgatatgaagcgaaccattaataaagcctgggtggaatcaagagagaagcaagccaaaggagacacggaattttgagactttaaagtcgttttgggaactgtgatgtgatgtggaaatactgatgtttccagtaagggaatattggtgagctgcatatataaatttgacagatagctatttacatagccttctaagtaaaggcaatgaattctccatttcctactggaggatttatttaaataaaatatgcttattaaacactcctgcaaagatggttttattagtaccctggtcattttgttcaaggaagggttatattgcattctcacgtgaaatataaaaagcaagtcttgcccaat

SEQ ID NO: 19873 - DNA, 900 bp, Homo Sapiens
gcacgaggagcggccagcgctagtcggtctggtaagtgcctgatgccgagttccgtctctcgggtcttttcctggtcccaggcaaagcggagcggagatcctcaaacggcctagtgcttcgcgcttccggagaaaatcagcggtctaattaattcctctggtttgttgaagcagttaccaagaatcttcaaccctttcccacaaaagctaattgagtacacgttcctgttgagtacacgttcctgttgatttacaaaaggtgcaggtatgagcaggtctgaagactaacattttgtgaagttgtaaaacagaaaacctgttagaaatgtggtggtttcagcaaggcctcagtttccttccttcagcccttgtaatttggacatctgctgctttcatattttcatacattactgcagtaacactccaccatatagacccggctttaccttatatcagtgacactggtacagtagctccagaaaaatgcttatttggggcaatgctaaatattgcggcagttttatgcattgctaccatttatgttcgttataagcaagttcatgctctgagtcctgaagagaacgttatcatcaaattaaacaaggctggccttgtacttggaatactgagttgtttaggactttctattgtggcaaacttccagaaaacaaccctttttgctgcacatgtaagtggagctgtgcttacctttggtatgggctcattatatatgtttgttcagaccatcctttcctaccaaatgcagcccaaaatccatggcaaacaagtcttctggatcagactgttgttggttatctggtgtggagtaagtgcacttagcatgctgacttgctcatcagttttgcacagtggcaattttggggactgatttagaacaga

SEQ ID NO: 19874 - DNA, 671 bp, Homo Sapiens
  misc_feature (518)..(550): n is a, c, g, or t
gcacgagggccgcggcgccttgagtctccgggccgccttgccatggctgcccgtggtgtcatcgctccagttggcgagagtttgcgctacgctgagtacttgcagccctcggccaaacggccagacgccgacgtcgaccagcagggactggtaagaagtttgatagctgtaggactgggtgttgcagctcttgcatttgcaggtcgctacgcatttcggatctggaaacctctagaacaagttatcacagaaactgcaaagaagatttcaactcctagcttttcatcctactataaaggaggatttgaacagaaaatgagtaggcgagaagctggtcttattttaggtgtaagcccatctgctggcaaggctaagattagaacagctcataggagagtcatgattttgaatcacccagataaaggtggatctccttacgtagcagccaaaataaatgaagcaaaagacttgctagaaacaaccaccaaacattgatgcttaaggaccacactgaaggnnnnnnnnnnnnnnnnnnnnnnnnnnnnnnnnngccctgcaaaatattctaaaacatggtcttcttaattttctatatggattgaccacagtcttatcttccaccattaagctgtataacaataaaatgttaatagtcaaaaaaaacctcgtgc

SEQ ID NO: 19875 - DNA, 1222 bp, Homo Sapiens
gcacgaggggcatatgagcccccgccacctcctgcctaccgcacgggctccctgaagccaaatccagcctcgccgctcccagcgtctccctatgggggccccactccagcctcttacactaccgccagcaccccggctggcccagccttccccgtgcaagtgaaggtggcacagccagtgaggggctgcggcccacccaggcggggagcctctcaggcctctgggcccctcccgggcccccactttcctctcccaggccgaggtgaagtctgggggcctggctataggagccagagagagccagggccaggggccaaagaggaagctgctgggatctctggccctgcaggaagaggaagaggaggcgagcacgggccccaggtgcccctgagccagcctccagaggatgagctggataggctgacgaagaagctggttcacgacatgaaccacccgcccagcggggagtactttggccagtgtggtggctgcggagaagatgtggttggggatggggctggggttgtggcccttgatcgcgtctttcacgtgggctgctttgtatgttctacatgccgggcccagcttcgcggccagcatttctacgccgtggagaggagggcatattgcgagggctgctacgtggccaccctggagaaatgtgccacgtgctcccagcccatcctggaccggatcctgcgggctatggggaaggcctaccaccctggctgcttcacctgcgtggtgtgtcaccgcggcctcgacggcatccccttcacagtggatgctacgagccagatccactgcattgaggactttcacaggaagtttgccccaagatgctcagtgtgcggtggggccataatgcctgagccaggtcaggaggagactgtgagaattgttgctctggatcgaagttttcacattggctgttacaagtgcgaggagtgtgggctgctgctctcctctgagggcgagtgtcagggctgctacccgctggatgggcacatcttgtgcaaggcctgcagcgcctggcgcatccaggagctctcagccaccgtcaccactgactgctgagtcttcctagaagtacctgctgggttctcagttccagttcccatcctttgattgatcactctccctgacatccacctgtatgactttgtcaccaaatgctgtcttctctttctccaatcaagaaataataatccctcgagtttac

SEQ ID NO: 19876 - DNA, 1675 bp, Homo Sapiens
cccccgggctgcaggagcgtcaggaatttaaccataaggagcagctctttttcagacaccctggaagaatcgagccccattgcagccatctttgacacagaaaacctggagaaaatctccattacagaaggtatagagcggggcatcgttgacagcatcacgggtcagaggcttctggaggctcaggcctgcacaggtggcatcatccacccaaccacgggccagaagctgtcacttcaggacgcagtctcccagggtgtgattgaccaagacatggccaccaggctgaagcctgctcagaaagccttcataggcttcgagggtgtgaagggaaagaagaagatgtcagcagcagaggcagtgaaagaaaaatggctcccgtatgaggctggccagcgcttcctggagttccagtacctcacgggaggtcttgttgacccggaagtgcatgggaggataagcaccgaagaagccatccggaaggggttcatagatggccgcgccgcacagaggctgcaagacaccagcagctatgccaaaatcctgacctgccccaaaaccaaattaaaaatatcctataaggatgccataaatcgctccatggtagaagatatcactgggctgcgccttctggaagccgcctccgtgtcgtccaagggcttacccagcccttacaacatgtcttcggctccgggctcccgctccggctcccgctcgggatctcgctccggatctcgctccgggtcccgcagtgggtcccggagaggaagctttgacgccacagggaattcttcctactcttattcctactcatttagcagtagttctattgggcactagtagtcagttgggagtggttgctataccttgacttcatttatatgaatttccactttattaaataatagaaaagaaaatcccggtgcttgcagtagagtgataggacattctatgcttacagaaaatatagccatgattgaaatcaaatagtaaaggctgttctggctttttatcttcttagctcatcttaaataagcagtacacttggatgcagtgcgtctgaagtgctaatcagttgtaacaatagcacaaatcgaacttaggatttgtttcttctcttctgtgtttcgatttttgatcaattctttaattttggaagcctataatacagttttctattcttggagataaaaattaaatggatcactgatattttagtcattctgcttctcatctaaatatttccatattctgtattaggagaaaattaccctcccagcaccagcccccctctcaaacccccaacccaaaaccaagcattttggaatgagtctcctttagtttcagagtgtggattgtataacccatatactcttcgatgtacttgtttggtttggtattaatttgactgtgcatgacagcggcaatcttttctttggtcaaagttttctgtttattttgcttgtcatattcgatgtactttaaggtgtctttatgaagtttgctattctggcaataaacttttagacttttgaagtgtttgtgttttaatttaatatgtttataagcatgtataaacatttagcatatttttatcataggtctaaaaatatttgtttactaaatacctgtgaagaaataccattaaaaaactatttggttgtgaacctcgtgc

SEQ ID NO: 19877 - DNA, 1484 bp, Homo Sapiens
gcacgaggactacatgattttatttataaaattcagcacatcacttattattgcctatgtcaattgcaaacagtcctcagttacagctctcatttttcaaaataaaaatctttgaaaatgtcctcaaagtaaaatattactaaatatcttattaagttgatagcccatgggcactgacagttaacactatggaaaaagggttaatataaaacaatataaaactattacagacaatagcttatcaatattaccttcattccattactgggatttttcacgtagtaacttttattcgtgaaatgatttcatttacaaagctattattctttgctattacttcagcttttagctgttttaactttattgtgatgttttcttctgacatttcagtaaagggcatttgtttcaccttggacaggaactcctgaataattttttcaccttgctctctttccagatagcacttctttgctgctggttccatgatatcatatccttgcgattctccaatatactgaaactcctcaagttccagggctttctgtttagcacactctattacatgcttagggaaattagcaagctctgcaacatgaatcccaaaactttgatcacagacacctttcttcacctgataaagcatagttaaggtctcttcagtggtgagtgctgtgacatgtagattattaacagttggtatctgattggcccaggcagtaagttcatgaaaatgggttgcaaacatgcaaaaagcaccaatctttgttgcaatgtattctgatatagcccatgctaacccaaatccatcgtaggtagaagttcctcttcccattcatctatgattattaatgaatctttggttgcagacctgaggatagaagcagtttccacatttcagccatgaacgtggagactcctttcaattgactgtcaccagcccctactcgggctaagatgcagtccacaatggacacttctgctgactcacatggcacaaaacacccaatttgggccatgagtactatcaccccagtttgtcgaatatatgttgatttacctcccatattggggccagtaatgatgtggaacatctgtttatctttttcaaagtatacgtcattaggaataaatgcaatttcatcttgaacttcaacacaagcatgcctggatgcttttaatataattcttccttgtcctttctccaaaatggctggtcgtacatatggaacaggtgctccatttgacacgtgagcaaagctgacaacagcatctagctgagctaacacatcattgagtgtctgcattggttctacatagcctgaagaaatattgacaatttctttaacaatggcatcctgggcttcttcatattctgttttatttttggtatactcttcatttaaagaagtcaatttgctgttggtaaatttaacaccattcttctggatatctacagtactaaagtttttaaggttacctcgtgc

SEQ ID NO: 19878 - DNA, 1461 bp, Homo Sapiens
  misc_feature (1169)..(1178): n is a, c, g, or t
gcacgagggattaacaatttgtaagttttcaagatcggatggaatttaattttgctcctagaatttttgtcttcagaatatctagttaagataaattaggcctttgactattataggtattcataaatgctactttagccatgtaagttaaaaagttaaaatacttaaactttagtgtatttatttatctcgttactttttttctaattttatatgaaatgtgaaaggtctttattttggtttggtttactttgggctgctaaccaccagtgttaggaattaatgtagggcaccctcttattgggaatgtcactgtaattgcctacattttctttgctgtaatattacctgcttataggttgtcaacccattttatctgaatttgaaaatctatctaggtttccagattaaatttctacctttcatatagagagtttaattttaataaaatgtttaattagagcatccttcccttttattctactttgaacaaatagtaattttaccccaactacttttcatgaagagtgctttgaaaattaaaggaatttttattattatggtaaccttatgagtaaaaataagttactttaattgctttatttcgttagttgtcattttattttgtactatgctggtaaactaattgtggtttagaatagttttatgttcactcctgataactgagaaacagaactaaagttttccttacattgctaaatggataaacctcatattcaataaactagtaaatgtagccacttgactgattgcgtaaatcgtgttaaaacattctaaaatgttgtaactaatttaatgtgaatactgttaaacagaaaataattgcttataaaagtctaacttcacccagttaccaagtcttggccaaattttatcttctgcctatagtttttactagcctttttaaactataatagtgagtgatcattactttatattctcgtaagttagaaatacttgaatgccaaattaattttgttttaagaaagcttatttttaacataattttttagtgtggagggtttgtaaataatgtaaagtttgtaaacctgtatttaaaataccaaagtttttcttcttttataacattgtaagatactagaaaaatgggcttcaagttttttaatagctttcacagtttgtgtagnnnnnnnnnnctatttggttaagatgtgagttggaaatgtattatttgaaacatttaaactaatttttgtatttaacagcagtctcagacatttgtcttttaactcagttgagttgtagatatcaaatagaaatgtcccagttttgcctcttttaagtactgtccagttgaaacctcctgactcatgtactactacacaaactagaaaatgcccatttatttttgttgattcaacacttcagatacagattgataacctatatactaatcattttatttcatgtaaaagtttt

SEQ ID NO: 19879 - DNA, 2275 bp, Homo Sapiens
  misc_feature (151)..(171): n is a, c, g, or t
  misc_feature (826)..(844): n is a, c, g, or t
gcacgaggacacactcgagtctcaaaaattgatttttatcatcaatcctatcatttaataaagagaggtaaaaggttttgcttaaaggccaggttctccacttactgccacagaagagaggcacagtctgggaatgacaggcgttggttgnnnnnnnnnnnnnnnnnnnnnctgttgagatcaactaggggaaagtttgtcactgaggggtgtgtacatgttttatccttagctttttgcttttctgtatatggttttgcattcatttttcaaattcacttcaatattcatttattttcttcgttttgtatgtatgactcaattttgacattactatttttgtacaaacagcttttgaaatcctgtcatgcagtgtcccaaacgcaaggcgaaggagatgcagcagatggtgaaattggaagccgagatggaccgcagaccagcaacagtagtatgaaactccaaaatgcaaactgaagcagcaaacccacaaagcatcaaaagactcactcacaaacttctgaacacaaactccatggatgaaagctgtttattttgtttcctttatgtgtaaacaagatgatatctgaaaccagagagacttggaatgtctgactgacttctatttaacagcttgagtattgcatttccttggccaaacaaaaatagctacaaatccacaaaaatttactattccagtaaggcagagtccaaccattgataatacaacttaaacatgtttgctataaaataccatcacaagtaaatgagcttggtgtgaacaactctcctttgtgatgccttaggacatgtttgaactgcagcnnnnnnnnnnnnnnnnnnncagtgcattagcaatttcatagcaagtgcatgcactaggaaaagaaaactctgtctacaagtttattagcagaagtggtggtctgctagacaaataattttgcaaaatttttctacatctaagttacctcatcagtaagtgccatgtctctaccatgccatcagaggctaatttcctgtaaaagttgtggaaattgttagaacaatagaaaaatagagcagtgtatgtgtgccaaaactcatcattactcaaaggagaactgtgttaggcacatttaagaaagtttacatctgacattgctttataggaattgtttctgcagattccggatattataattcacaccataaagattgtgaagtggttattggcaaacgtttgtaaatgtgaccatgtataaagtatttatactctttaattcacactgttagagagcaaaatcatctaagtattgccacatgacaagattagtaaacaggaatactagaactatgtttgcatgatacacaagcaccaataaagactaatccatacacagttaacctaatgccaaataaatactggttaaataaatgtatggcacagaatataatttgactatcaagacttttagcataatgaaaaaccctctctctatatatatatgtgtatatgaattatgtgggcattcttgatacttcaagttctagtttgaaaaaaatacataactaatttaattttacacaaaaatatttatgcagattttcagaatttcatatcaggaaatgacctttttatgtctgttaaatatcaaaacaatttgctacagtgttaatctgcatggtctttaagcctgctgtagttgagttgcagacagtgcatgaaaaagtattccgctgggaattgagccatgccaccaaagccaagaggagcgcatggaaacccggtagtctagaactaatcagattactgattttagggcacagcaccagatgaattgttgtatatgcttgtaaaaattgattctgtgtgttcctctgaacaaagcggagaaaatgatgataccatcaatattgaaattaaacttccaacttctctaataaaaaattaaaacacgcataacactcgtcaagagtatttgctcccaagacacattctagcaaatgttttgcctttttcatatacatgatatcatcgttattttcaaagggggcttattaataccctcagcatgtttttcacccaaatgatgcaaaacatgcagattctagttgacttcagttgtaatagacttgtttttctcctatttatgatttgaagtggattctgtaaaatatctcttgttcttagtttccttatctgtaaaacagtggagttagactacatatcttttgggcactaacatctcatgaaaaattatggttaataaaatatcaccacatttggattgcc

SEQ ID NO: 19880 - DNA, 1322 bp, Homo Sapiens
cccccgggctgcaggtgactttggaagagagagaaaatcatcatcaggaagttctgattcaaaggagtctatgtctactgtgccggctgactttgagacagatgaaagtgtcctaatgaggagacagaagcagatcaactatgggaagaacacaattgcctatgatcgttatattaaagaagtcccaagacaccttcgacaacctggcattcatcccaagacccctaataaatttaagaagtatagtcgacgttcatgggaccagcaaatcaaactctggaaggtggctctgcatttttgggatcctccagcggaagaaggatgtgatttgcaagaaatacaccctgtagaccttgaatctgcagaaagcagctccgagccccagaccagctctcaggatgactttgatgtgtactctggcacacccaccaaggtgagacacatggacagtcaagtggaggatgagtttgatttggaagcttgtttaactgaacccttgagagacttctcagccatgagctaactgccccctggcggccaggaagagaaacagctcctccccgactaggtggaaggctggccaggcaccaagcatgtgtgtgcacttgtacctggtggtttctctgttagcagtccattagctcatgctgaattatttttgccttactttcttaagaaacattaattttatgtatagtgagtatattttgcatgttttaaattgtaaatggagctaagtccaagaaagtacttgaagctctcttccagcgagcttaattgcgtaatccctgttgtcctccagggtaagctgacacgtctacataactggttttccacaggcatcttcagttattgcttgtcaggtggactgttttggatttaaccatgtaatccatgggaccaattgagagtcagctacttttataggcatcaaagtattctcagacacctttaatatctttatggaaacttaatttttggccttttatcaatatgtcataacagcattctgaagtcagacattgttaaattgagctattaaactaatgagttttatgtaagttatatggtcttaatttggtacttgtaaatagcactagttagactctttagaatactccaagagttagggcagcagagtggagcgatttagaaagaacattttaaaacaatcagttaatttaccatgtaaaattgctgtaaatgataatgtgtacagattttctgttcaaatattcaattgtaaacttcttgttaagactgttacgtttctattgcttttgtatgggatattgcaaaaataaaaaggaaagaaccctctt

SEQ ID NO: 19881 - DNA, 1386 bp, Homo Sapiens
  misc_feature (1101)..(1121): n is a, c, g, or t
gcacgaggcggagtctcaaagcgcctggggctcgcggacccggcccagagggcggcggtggcggcagctacttttctggtcagggctcggacaccggcgcgtctctcaagctcgcctcttcggagctggaacgcctgattgtccccaacagcaacggcgtgatcacgacgacgcctacacccccgggacagtacttttacccccgcgggggtggcagcggtggaggtgcagggggcgcagggggcggcgtcaccgaggagcaggagggcttcgccgacggctttgtcaaagccctggacgatctgcacaagatgaaccacgtgacaccccccaacgtgtccctgggcgctaccggggggcccccggctgggcccgggggcgtctacgccggcccggagccacctcccgtttacaccaacctcagcagctactccccagcctctgcgtcctcgggaggcgccggggctgccgtcgggaccgggagctcgtacccgacgaccaccatcagctacctcccacacgcgccgcccttcgccggtggccacccggcgcagctgggcttgggccgcggcgcctccaccttcaaggaggaaccgcagaccgtgccggaggcgcgcagccgggacgccacgccgccggtgtcccccatcaacatggaagaccaagagcgcatcaaagtggagcgcaagcggctgcggaaccggctggcggccaccaagtgccggaagcggaagctggagcgcatcgcgcgcctggaggacaaggtgaagacgctcaaggccgagaacgcggggctgtcgagtaccgccggcctcctccgggagcaggtggcccagctcaaacagaaggtcatgacccacgtcagcaacggctgtcagctgctgcttggggtcaagggacacgccttctgaacgtcccctgcccctttacggacaccccctcgcttggacggctgggcacacgcctcccactggggtccagggagcaggcggtgggcacccaccctgggacctaggggcgccgcaaaccacactggactccggccctcctaccctgcgcccagtccttccacctcgacgtttacaagcccccccttccacnnnnnnnnnnnnnnnnnnnnnctgctggaaacagactcgattcatattgaatataatatatttgtgtatttaacagggaggggaagagggggcgatcgcggcggagctggccccgccgcctggtactcaagcccgcggggacattgggaaggggacccccgccccctgccctcccctctctgcaccgtactgtggaaaagaaacacgcacttagtctctaaagagtttattttaagacgtgtttgtgtttgtgtgtgtttgttctttttattgaatctatttaagt

SEQ ID NO: 19882 - DNA, 636 bp, Homo Sapiens
caaattcctctacagtttattgttatagcaaaagttgggggaaacgggagggcaccctccacacatactacaggggggtcaaagccccagggtagccctttccaccctatgccaagccccaagcagcccaccccaagcttacctccctccccagtcccactctaaatgcacactgagctaccaaagttagggcacccaaacggccccaggccccttcctgttgccccaccaccaatccttccccacactcgttcactgcccgccaactcccattccaacttcctttttacacgggatgtttctatcacatcctgaggaccactaacccaccagcaagtctccccctgacacacattcacgtaggtccatacccttcaaagtcctaaagggttaatgaaaacccacctcacctttggtgaatggagccccacccccaaatcccctccccttgcaaatatgggacaagtagggaaagtctgatggaggcaccaggacaactacaacaacctcttacccctcagctataaacacctaaatcaggacagaggatgcatatgccctctccaccttaacaccaaaatgggggaggaggagaatttaggggtctgggtccctaagagattataagacatctct

SEQ ID NO: 19883 - DNA, 727 bp, Homo Sapiens
ggatttacattttattccaaggataaatacaaaattaagaaagagttcaaattcaaagtaaatatgcttgatatttcaaaacaattctacatacaaagtacaataggaaaaaaccaaaagcccccataaattaaagtggctagacacattcaagtctagcagaaagaaacttgaaatttaatgcaacgttatttctcttgcctagaagctaaagccttaattgtctcaaatatcttccatctccttatgggcattacttgaagataacaatggagcaagctttttaatgaacttgccatagtgaaaaaccaatgacagatgccacactggaaagaggacaacaatgtaacctaaaagggagctactggcagaaataaaaactagtgatactgataacatctagacctttgcagacgtttagagtactgtacaatcttaaattattgtttatcaacctttgggtctcacagattaagaatgtactagttaagaaccaaggagttatacccagttcacaatactgtttccttcacttgccctttagatataatggatctggaattctcaatgagtgttacatggtttgggaattctggcaattttccttccaagacctccctatacttatctccatttcaaaatatacaaagctgagtgacagaggcaaaaattaattcctaaagatccaaagggtatacaatacctgtcaaatttgatatcctcgtgc

SEQ ID NO: 19884 - DNA, 844 bp, Homo Sapiens
gcacgaggcacaaatgagagtgcagccagcaccggacagccagacaatgacgtgactgagggacagagagcaggagagcccaacagcccagatgcagaagaggccaacagtccagacgtgacagcaggctgtgaccaggcgggggtccatccaccccggtgagcaggcccaaggcagcgggggcccacacccctcacacgcaaaactggcttcttctggtcactggtgtctgaaaccaaatccagagcagcctgtggcctgtaaagcatatatttctaatgactgcagactggtgggatcataggagccttctgaatgaccaggactgctttctttggagctgatgaaaatgtactcttttagcgtgttagaaatcacttgttttattttgtttctttggccaagctgggtctagtgtttcttttgctgggaatagactttcaaaagttgtacttctatcaagaaacaaaactgcccttgcagaaatttcaggtcttttgttaagcctgtattggtcttaaggtgcagtattttttaaattattatttatagaaagaatctataaattcttggggaagtgtgttataagctttaataattacattgagctgcacctcagtggtgtgtcattaacatgcaatgggggttaatatctgaggcctcagatgactttgtgccttttggaataaagggtaaaataaactctccagagtaagagctgtatcgtgaattgtcatactaattattgaaggggacttatgtgcttttattgaatggagtgctttacatttttatttttaaatggggttgggatccttggaatatttcattaaatttgataaat

SEQ ID NO: 19885 - DNA, 1434 bp, Homo Sapiens
gcacgaggcttcacactcagtgccaactttttgttacagattgatttttccctaaaaccattttttgaaccaatcagtaattttaaggttttgtttgttctagacgtaagagttcagactcacattctattaaaatttagccctaaaatgacaagccttcttaaagccttatttttcaaaagcgccccccccattcttattcagattaagagttgccaaaataccttctgaactacactgcattgttgtgccgagaacaccgagcactgaactttgcaaagaccttcgtctttgagaagacggtagcttctgcagttaggaggtgcagacacttgctctcctatgtagttctcagatgcgtaaagcagaacagcctcccgaatgaagcgttgccattgaactcaccagtgagttagcagcacgtgttcccgacataacattgtactgtaatggagtgagcgtagcagctcagctctttggatcagtctttgtgatttcatagcgagttttctgaccagcttttgcggagattttgaacagaactgctatttcctctaatgaagaattctgtttagctgtgggtgtgccgggtggggtgtgtgtgatcaaaggacaaagacagtattttgacaaaatacgaagtggagatttacactacattgtacaaggaatgaaagtgtcacgggtaaaaactctaaaaggttaatttctgtcaaatgcagtagatgatgaaagaaaggttggtattatcaggaaatgttttcttaagcttttcctttctcttacacctgccatgcctccccaaattgggcatttaattcatctttaaactggttgttctgttagtcgctaacttagtaagtgcttttcttatagaaccccttctgactgagcaatatgcctccttgtattataaaatctttctgataatgcattagaaggtttttttgtcgattagtaaaagtgctttccatgttactttattcagagctaataagtgctttccttagttttctagtaactaggtgtaaaaatcatgtgttgcagctttatagtttttaaaatattttagataattcttaaactatgaaccttcttaacatcactgtcttgccagattaccgacactgtcacttgaccaatactgaccctctttacctcgcccacgcggacacacgcctcctgtagtcgctttgcctattgatgttcctttgggtctgtgaggttctgtaaactgtgctagtgctgacgatgttctgtacaacttaactcactggcgagaatacagcgtgggacccttcagccactacaacagaattttttaaattgacagttgcagaattgtggagtgtttttacattgatcttttgctaatgcaattagcattatgttttgcatgtatgacttaataaatccttgaatcatacgactggt

SEQ ID NO: 19886 - DNA, 894 bp, Homo Sapiens
gcacgaggccgtacgctgggacgtgtggtttcagctcgtgcgcctccccgtgggtttgcgacgtttagcgactattgcgcctgcgccagcgccggctgcgagactggggccgtggctgctggtcccgggtgatgctaggcggctccctgggctccaggctgttgcggggtgtaggtgggagtcacggacggttcggggcccgaggtgtccgcgaaggtggcgcagccatggcggcaggggagagcatggctcagcggatggtctgggtggacctggagatgacaggattggacattgagaaggaccagattattgagatggcctgtctgataactgactctgatctcaacattttggctgaaggtcctaacctgattataaaacaaccagatgagttgctggacagcatgtcagattggtgtaaggagcatcacgggaagtctggccttaccaaggcagtgaaggagagtacaattacattgcagcaggcagagtatgaatttctgtcctttgtacgacagcagactcctccagggctctgtccacttgcaggaaattcagttcatgaagataagaagtttcttgacaaatacatgccccagttcatgaaacatcttcattatagaataattgatgtgagcactgttaaagaactgtgcagacgctggtatccagaagaatatgaatttgcaccaaagaaggctgcttctcatagggcacttgatgacattagtgaaagcatcaaagagcttcagttttaccgaaataacatcttcaagaaaaaaatagatgaaaagagaggaaaatatacaaaatggggaaatgagaagaccgtgagttgatgccgttatcatgctgccactacatcgttatctggaggcaacttctgggtgg

SEQ ID NO: 19887 - DNA, 1118 bp, Homo Sapiens
  misc_feature (170)..(190): n is a, c, g, or t
gtaagaaagaaaaggactcccttagaatgggaaagaaaaatcataaaatattgagctgatgcctgtatatagaaattaagcgtttctcgaaagctgttctatgttttgctgttattttagtctttattctcttcctttaggtggagaaacaaagtaccaatttgaagggnnnnnnnnnnnnnnnnnnnnnggtttctgtcagtagaaataaccatatgtgctaaccaaatttctgtgaagaatgttttcatggttatcattatatctaactataacctcccccatatttatgaagagtaacctgaaatgccactattgtggaaataggataattgtaattgtgaaaaaataattttaaggaaatcttacaagtattacattaaaaagatactatgactgccacctgccatttaccttctaataaccctgccatgtggtttgcagaaagagatggatatagtagcctcagaagaaatattttatgtgggttttttgtttttcgttactagatttcatggatgaggggatatggttgaccttttactttttaatggagcagccagtttttgttaattactcacttgtaaattgtgagattctgaattccttacctgctattcttgtacttgtctcaggccaaatctatgctgtggttcttatgagacttgtatgaagatgccctgatttgtacagattgaccacgggaatactactgccatgtaatctgtatagttccagataatttgtcatgaacattgacagaatgacaattttttgtatttgctttttctccctttaagagcacattcttctgtaaggagaaaggcagcattctggctaaaatgtgtagaaggtaatttactacacttataaaatagtgtgacttttgtgaaaattttgaattagctttcatatgaagtgccttaagtagactcttcatttacttttctggtaatggtttaaatatcatttgttatgcatttttaagatacagttcagaatgacacattgtagtggcaaagataaccaaatgtctggctgtttgctttttgaccatatcaataaacttttacaatctaaagaagcaagatcgaagaactaaaaaaacaacctcgtgc

SEQ ID NO: 19888 - DNA, 627 bp, Homo Sapiens
gcacgaggagtttaaaagcatgaaccatttaacaaaaagtggaataattaaagataaagcacttcttcccaaagggaattatcacctagtgaaaaattatgcatttcatctactcagttaccgactgcaagtctctcctcgctctagctctcaagctttgggtgaatattcctgtgaaatatatcttcaacttgaaagttcatactccaatcaaaaactccttttactgagtttgcagtactgtatttgcactgtttgtattcctctgggcccttattgctacttttgctttcctttgttacacagattttgtgttgcactttttctccagaggggtgttgtagagccttggttgtatgaataataccagtggtagtgtccacggctctaatgtaagcccatttggcatcactcctctcctctctcttgagaggatttcttgtgcacagagtatgaagcagttgtggagcgctgtgcctttgtcaagataccatcttgtttgatgacttctttctttgctgttttttcttcaaaatgttagtaagctctgtcatgcttctagcaaattgtaagactaattatttgtttccacctcataacctgttgcaataaatattacttctcata

SEQ ID NO: 19889 - DNA, 1029 bp, Homo Sapiens
gcacgaggggctgcgggcgcggccggacgggagttccccggagaaggatcctgcagcccgagtcccgtcctcaggcttccccaatccaggggactcggcgccgggacgctgctatggacgacattttcactcagtgccgggagggcaacgcagtcgccgttcgcctgtggctggacaacacggagaacgacctcaaccagggggacgatcatggcttctcccccttgcactgggcctgccgagagggccgctctgctgtggttgagatgttgatcatgcggggggcacggatcaatgtaatgaaccgtggggatgacacccccctgcatctggcagccagtcatggacaccgtgatattgtacagaagctattgcagtacaaggcagacatcaatgcagtgaatgaacacgggaatgtgcccctgcactatgcctgtttttggggccaagatcaagtggcagaggacctggtggcaaatggggcccttgtcagcatctgtaacaagtatggagagatgcctgtggacaaagccaaggcacccctgagagagcttctccgagagcgggcagagaagatgggccagaatctcaaccgtattccatacaaggacacattctggaaggggaccacccgcactcggccccgaaatggaaccctgaacaaacactctggcattgacttcaaacagcttaacttcctgacgaagctcaacgagaatcactctggagagctatggaagggccgctggcagggcaatgacattgtcgtgaaggtgctgaaggttcgagactggagtacaaggaagagcagggacttcaatgaagagtgtccccggctcaggattttctcgcatccaaatgtgctcccagtgctaggtgcctgccagtctccacctgctcctcatcctactctcatcacacactggatgccgtatggatccctctacaatgtactacatgaaggcaccaatttcgtcgtggaccagagccaggctgtgaagtttgctttggacatggcaaggggcatgg

SEQ ID NO: 19890 - DNA, 919 bp, Homo Sapiens
gcacgaggtttatttattacatgtggggtaatgttagacaaatagctataatacagagattgtacaatttaaaaactgtaataaatatggtccattaatagcagactccaaaattcttgtccttcttgaaaaaaaaggttcagtgatttacgataatccactaagaaacatcttcagaatttcacagggagcagtgtctggaggcacaggtttcccgcagtgctttgaatattcagttatcaagactgaagcttcatctaaacttaagtcatttgccaaatagttcactagctcagtgatattgttggtattcatcgcatgcatcttcaacatttgaaagtatttggtctttgccaaaatcccaaactccttcttattgatgatattattcaaaatcagacttctaatttgatgtgaaaatcctgctagctggcccgtgttcatatgctcttccaattgctttaaaataacctgagggtcacaggaacccagaaaattcttaatttgctggtgtcttttctctgagtggggcatgagcatcagacaagctaatgcaaaagccggaagttctaactggatatactgcctggcgactccgatcaggtcaagatcacctgagactggacattcgaggacagcgatgagactctcagaacaatctgacagctgatcaggacttaaaggacaagaggctgaaagcagtggtatctgtatcacacgctgccacgctttgctgaagtagggaacctgccataaagaatggatactggagatggcttttaaaactttccttagataaagaatcatattgaagcccaaaagcttttgcagagtccattccaagctgcaggtcataattttgtattctaaacacactcatcaccatcttactgccatggactcgtggctgtggttttcc

SEQ ID NO: 19891 - DNA, 1201 bp, Homo Sapiens
gcacgaggggctggagagtgttttatgtggaaatattttcaagataatgttccttaggaagaaaataacattcttgggttgagggaaggaatgccatacactactgtctcttcagatctgaaatactccagtttagagccaggaaatttcacaggtcacaccgatttttagcattaaaaactaaggaatatacttagcacttacttaatcttttcagttttccagtttacgtctcaggaatgaagtgtagtctatggttgacaatggagttttgtgatcctgcttattgtaactgacaactgttttcaactccaagagctaaactattggcagttcatgttaagttagagtgagggtgtaggtagtgtcagtgagtggctcttgtgcctgctgtagacattaggcctgcactagggccatgtgctgtcaagattcaggaacatggctttaacaagcagatcttgtatcaaggcagaggtgatgccatgccatacttttaggaagtctgagatgataaatatttcaaggtcagtgaagtctatcaatcattctccccttcctcatcagcaatggtagatagaaatgtcctaaacttttctaaatcctagtgatgaggatgtgctgatattcaacatagtccttaaagtgaaaactgagttgttgctgacctccacaaaagaatatggaaaaaagccttgctgtacacctagttgtacagccactctggccaattccattccctgtccctctgtggttctgactggagaccccagtgtgggggaggtcttaccatttaatatagaaatgatatcaataactaatgctatgtacttggaaaatccaaataaggaagttttaggttggtgcataactttgtttctcaaattttcgttgtcagaacaaatggaaggagaatattatttagactaatccagatttgctttctatgaaaatctaatgtctggattatcttccttttctcatggcctaagaaataaggatcaataaggaatgatttgaatgtaattttgtgaatgtgtggaaaatataaagcagggatttagccttaataaaggtaaccttctgacatctgttgttaatccccctttgtactcttttcctgtatctgcactgttattttgagatgtcatactgtacactgtattgtaaaaataaaaagtaaaattatatttcaaatttt

SEQ ID NO: 19892 - DNA, 565 bp, Homo Sapiens
ccacgcgtccgggagaaagaggccagtttaaataggctttcaagagtctagggtcagaaaagcaatagtcactaagctaggtgacctgaaagctttaattttcatgacctggatatgtggtctattgtatatctttttctgaaatggtttgtattcatttaggttagatcaatcagcagatattgggtccggtataccaggtattattttggggtaagctaacaagtacaactcatgtttgcagccttcgaagatgtaacaatctcgttggaaacataagacatacatcacattatacacaaaagtgtatgatatgtacaactgagtggtacagatatgacatggaagatctgggggaggaagttcaaggaaggcaccacaccagaaatgggacctaaattaaggcttaaagaatgagcatggccacactgtcagtgagtgttctttaggtggtaggactatggttgatatttttcttcttcctatcttcctgcctttttcagattttcaatattaaacttgttattcttacattggaaaaaaataaattgtttttaaaaagatc

SEQ ID NO: 19893 - DNA, 924 bp, Homo Sapiens
gcacgaggggaaacatggcggcggcgggtgttgtgagcgggaagattatatatgaacaagaaggagtatatattcactcatcttgtggaaagaccaatgaccaagacggcttgatttcaggaatattacgtgttttagaaaaggatgccgaagtaatagtggactggagaccattggatgatgcattagattcctctagtattctctatgctagaaaggactccagttcagttgtagaatggactcaggccccaaaagaaagaggtcatcgaggatcagaacatctgaacagttacgaagcagaatgggacatggttaatacagtttcatttaaaaggaaaccacataccaatggagatgctccaagtcatagaaatgggaaaagcaaatggtcattcctgttcagtttgacagacctgaaatcaatcaagcaaaacaaagagggtatgggctggtcctatttggtattctgtctaaaggatgacgtcgttctccctgctctacactttcatcaaggagatagcaaactactgattggatctcttgaaaaatatgtggtattgtgtgaatctccacaggataaaagaacacttcttgtgaattgtcagaataagagtctttcacagtcttttgaaaatcttcttgatgagccagcatatggtttaatacaaaaaattaaaaaggacccttatacggcaactatgataggattttccaaagtcacaaactacatttttgacagtttgagaggcagcgatccctctacacatcaacgaccaccttcagaaatggcagattttcttagtgatgctattccaggtctaaagataaatcacagaagaaccaggatttgagtcatcaatgcagtctaatgtgtagataatatttcaaccataataagtggattggccagtatatttttta

SEQ ID NO: 19894 - DNA, 1357 bp, Homo Sapiens
ctccgctgtgcgcaggatcgcccaggaagtgcagcgctttgcccaggagaaaggtcatgacgccagtcagatcacactagccttgggcacagctgcctcctaccccagggcctgccaggctctcggggccatgctgtccaaaggagccctgaaccctgctgacatcaccgtcctgttcaagatgttcacaagcatggaccctcctccggttgaacttatccgcgttccagccttcctggacctgttcatgcagtcactctttaaaccaggggctcggatcaaccaggaccacaagcacaaatacatccacatcttggcgtacgcagcaagcgtggttgagacctggaagaagaacaagcgagtgagcatcaataaagatgagctgaagtcaacgtcaaaagctgtcgaaaccgttcacaatttgtgttgcaacgagaacaaaggggcctctgaactagtggcagaattgagcacactttatcagtgtattaggtttccagtggtagcaatgggtgtgctgaagtgggtggattggactgtatcagaaccaaggtactttcagctgcagactgaccatacccctgtccacctggcgttgctggatgagatcagcacctgccaccagctcctgcacccccaggtcctgcagctgcttgttaagctttttgagactgagcactcccagctggacgtgatggagcagcttgagttgaagaagacactgctggacaggatggttcacctgctgagtcgaggttatgtacttcctgttgtcagttacatccgaaagtgtctggagaagctggacactgacatttcactcattcgctattttgtcactgaggtgctggacgtcattgctcctccttatacctctgacttcgtgcaacttttcctccccatcctggagaatgacagcatcgcaggtaccatcaaaacggaaggcgagcatgaccctgtgacggagtttatagctcactgcaaatctaacttcatcatggtgaactaatttagagcatcctccagagctgaagcagaacattccagaacccgttgtggaaaaaccctttcaagaagctgttttaagaggctcgggcagcgtcttgaaaatgggcaccgctgggaggaggtggatgacttctttacaaaggaaatggtagcagcttcagtgagaaactgccctacaaacagtcccttctctgctgtcaatccaatactgctcccaatcctgttttcagtgttcatttccctcaagcaggcgctgggctcccacgacccctcaggacagatctggccgtcacccgcgggccgctggactccactcggggactccttttccaagctgacctcagttttc

SEQ ID NO: 19895 - DNA, 870 bp, Homo Sapiens
gcacgagggctggcactgctggaggcacggaaactgcagtatcagcgggcagccctgcaggccaagcgcagccaggacctggagcaggccaaagcctatctgcgggtagccaaatggcttgaggctcagatcatccaggcccgatctggcagacctgttgatctgtccaaggtgccttcgcccttgacggatgaggagggtgacttcatcctcatccaccatgaggacctgcgactctcccagaaggcggaggaggtgtatgcccagctgcaaaaaatgcttctggagcaacaagagaagtgcctgctgttctccaagcagttcatgcaccagggcaacgtggctgagaccacccgatttgagaagcttgctcaggaccgcaagaaacagctggagatcctgcagctggcccaggctcagggcctcgaccctcccacccaccactttgagttgaagacattccagactgtgaggatcttctcagaactcaacagcacagaaatgcatctgatcattgtccggggaatgaacctcccagcccctccaggggtgactcccgatgacctggatgcttttgtgcggtttgagtttcactaccctaactcggaccaggctcaaaaaagcaaaacagctgtggtgaagaacacaaactctccagaatttgatcaactcttcaaactaaacatcaaccgaaaccaccggggcttcaagagggtgatccagagcaaaggcatcaagtttgagatcttccacaaagggtccttcttcagaagcgacaagctggttggcacagcacacctgaaactggagcggctggagaatgagtgtgagatcagagaaattgtggaggtcctggatggaggaagaaac

SEQ ID NO: 19896 - DNA, 835 bp, Homo Sapiens
  misc_feature (752)..(763): n is a, c, g, or t
gcacgagggctaccgagccatccactccctcggggccggagagtggccctacaccagccagcgctgagcagaatgagtagctaggtaggggcaggtgggtgatctctaagctgcaaaaactgtgctgtccttgtgaggtcactgcctggacctggtgccctggctgccttcctgtgcccagaaaggaaggggctattgcctcctcccagccacgttccctttcctcctctccctcctgtggattctcccatcagccatctggttctcctcttaaggccagttgaagatggtcccttacagcttcccaagttaggttagtgatgtgaaatgctcctgtccctggccctacctccttccctgtccccacccctgcataaggcagttgttggttttcttccccaattcttttccaagtaggttttgtttaccctactccccaaatccctgagccagaagtggggtgcttatactcccaaaccttgagtgtccagccttcccctgttgtttttagtctcttgtgctgtgcctagtggcacctgggctggggaggacactgccccgtctaggtttttataaatgtcttactcaagttcaaacctccagcctgtgaatcaactgtgtctcttttttgacttggtaagcaagtattaggctttggggtggggggaggtctgtaatgtgaaacaacttcttgtctttttttctcccactgttgtaaataacttttaatggccaaaccccagatttgtacnnnnnnnnnnnnctaactgctaaaaccattctcttccacctggttttactgtaacatttggaaaaggaataaatgtcgtccctt

SEQ ID NO: 19897 - DNA, 947 bp, Homo Sapiens
gcacgagggcagttgaagctcggcgctcgggttacccctgcagcgacgccccctgggcccacagataccactgctgctcccgccctttcgctcctcggccgcgcaatgggcacccgcgacgacgagtacgactacctctttaaagttgtccttattggagattctggtgttggaaagagtaatctcctgtctcgatttactcgaaatgagtttaatctggaaagcaagagcaccattggagtagagtttgcaacaagaagcatccaggttgatggaaaaacaataaaggcacagatatgggacacagcagggcaagagcgatatcgagctataacatcagcatattatcgtggagctgtaggtgccttattggtttatgacattgctaaacatctcacatatgaaaatgtagagcgatggctgaaagaactgagagatcatgctgatagtaacattgttatcatgcttgtgggcaataagagtgatctacgtcatctcagggcagttcctacagatgaagcaagagcttttgcagaaaagaatggtttgtcattcattgaaacttcggccctagactctacaaatgtagaagctgcttttcagacaattttaacagagatttaccgcattgtttctcagaagcaaatgtcagacagacgcgaaaatgacatgtctccaagcaacaatgtggttcctattcatgttccaccaaccactgaaaacaagccaaaggtgcagtgctgtcagaacatctaaggcatttctcttctcccctagaaggctgtgtatagtccatttcccaggtctgagatttaaatatatttgtaattcttgtgtcacttttgtgttttattacttcatacttatgaatttttccatgtcctaagtcttttgattttagctttataaaatcatccacttgtcccgaatgactgcagctttttttc

SEQ ID NO: 19898 - DNA, 741 bp, Homo Sapiens
gacaatgacaagaagtttatttcagctttacttaaaattttagtttcaaatgaaatgaaatgtgacactgaagcataagaacacaactgaagactgcaaacaacctaattcattttccgagtttgctcaagcctccaggcaccagtcaaatatcgaagtcgtataaaaagtaggtctttacccatttgtagccagctccagaatggaactaatttagaaccttcaatttctgtccagttgacagcaatttctgctattggaattttaaagaactgtgctatgtacagtagttctacatcaaatgcccatcgttcaacgtgtagagatgaaaacgtccgtgaagctgcttctcgagtaaataatttgaacccacactgtgtgtccctgattcctttgacacaaaggaaccacaccagaaagtggaacccatacatgagaagagtacggaagtaagaacgctgagcaattgattctttttctaaatgagctcgagatccacatgctatagccatttgattaggccaaggctgtagatcatttagccccttttctaatttctcaacatctggaaactttgtggctccatcagcatctgccataaggatcttttctcctcgagaactgaatatacccattctaatcgctccacctttttcacgattcttcaccagggttatcacacgtactttgtcactttcatatttctggcaatttttaaaagctacctttgaggtctgatct

SEQ ID NO: 19899 - DNA, 763 bp, Homo Sapiens
actgctaatttgggacgttttatttattggaaaggttctttcaagggaacttttctgcaagaccaagcaatgtatgtatttttctttggtaaattacaatttacattggcacaaaaaacacatggtgactaatgtactttgctctaggacaattaaagaaaatgtattttatcctcacaaatccagtgaagccttcattttatttctaaaagtttaaggaaggtctagtctaccagttataaaaatgaaaaccagttcaactctaatataaacattatttacatttgtttataaaaatagatttgagtttaggaaaagttgaacaactagttatttttacttcagttattaggtacaatgaattccttgatttttcaaggctgaccctgtttccttggttaacaatttcaatttaggccttataggaaaaaacgtaagggatcctttatctgcctccaactaggtaagttatttgataccactgacagcttaaaaagtaatgtcctaacctttctgaagattctggttgccataaccatgctactacagtctgttgttagtttgctctattaaaactaattggtctggagaaaacctacctgcagttgtacgaggctgttactggagtagcagatgttagctgatctaacatacttggaaccaactgatgatcccataaaaaatgccaaaaatccaatagaatcaaagcaactcaatgacatttaagaaaataaaaactttctaaagggggtgttcctcgtgc

SEQ ID NO: 19900 - DNA, 986 bp, Homo Sapiens
gcacgaggcattgcttcacctcctattgaagatggagttaatctttccttggagcatttacagccttactgggaggaattagaaaacttagttcagagcaaaaagattgttgccataggtacctctgatctagacaaaacacagttggaacagctgtatcagtgggcacaggtaaaaccaaatagtaaccaagttaatcttgcctcctgctgtgtgatgccaccagatttgactgcatttgctaaacaatttgacatacagctgttgactcacaatgatccaaaagaactgctttctgaagcaagtttccaagaagctcttcaggaaagcattcctgacattcaagcgcacgagtgggtgccgctgtggctactgcggtattcggtcattgtgaaaagtagaggaattatcaaatcaaaaggctacattttacaagctaaaagaaggggttcttaactgacttaggagcataacttacctgtaatttccttcaatatgagagaaaattgagatgtgtaaaaatctagttactgcctgtaaatggtgtcattgaggcagatattctttcgtcatatttgacagtatgttgtctgtcaagttttaaatacttatcttgcctccatatcaatccattctcatgaacctctgtattgctttccttaaactattgttttctaattgaaattgtctataaagaaaatacttgcaatatatttttcctttatttttatgactaatataaatcaagaaaatttgttgttagatatattttggcctaggtatcagggtaatgtatatacatattttttatttccaaaaaaaattcattaaatgcttcttactcttatatacccaggcaatttaattacaattgttaaaactgaattactggaagaagaaatttttcttgtcattgaatgaaatatatcaaagtaactgggagtagctgggatttactagtagtggaaataaaattcacttcttca

SEQ ID NO: 19901 - DNA, 1363 bp, Homo Sapiens
gcacgaggctgcagcgcagccacggggaccgctcccgcggaaagaggttcagccagagcttccgagaggtggccggcaggttcctggcgttggaggccagcacacacctgctggtgttcggcatggagcagcggctgccgcccaacagcgagctggtgcaggccgtgctgcggctcttccaggagccggtccccaaggccgcgctgcacaggcacgggcggctgtccccgcgcagcgcccgggcccgggtgaccgtcgagtggctgcgcgtccgcgacgacggctccaaccgcacctccctcatcgactccaggctggtgtccgtccacgagagcggctggaaggccttcgacgtgaccgaggccgtgaacttctggcagcagctgagccggccccggcagccgctgctgctacaggtgtcggtgcagagggagcatctgggcccgctggcgtccggcgcccacaagctggtccgctttgcctcgcagggggcgccagccgggcttggggagccccagctggagctgcacaccctggaccttggggactatggagctcagggcgactgtgaccctgaagcaccaatgaccgagggcacccgctgctgccgccaggagatgtacattgacctgcaggggatgaagtgggccgagaactgggtgctggagcccccgggcttcctggcttatgagtgtgtgggcacctgccggcagcccccggaggccctggccttcaagtggccgtttctggggcctcgacagtgcatcgcctcggagactgactcgctgcccatgatcgtcagcatcaaggagggaggcaggaccaggccccaggtggtcagcctgcccaacatgagggtgcagaagtgcagctgtgcctcggatggtgcgctcgtgccaaggaggctccagccataggcgcctagtgtagccatcgagggacttgacttgtgtgtgtttctgaagtgttcgagggtaccaggagagctggcgatgactgaactgctgatggacaaatgctctgtgctctctagtgagccctgaatttgcttcctctgacaagttacctcacctaatttttgcttctcaggaatgagaatctttggccactggagagcccttgctcagttttctctattcttattattcactgcactatattctaagcacttacatgtggagatactgtaacctgagggcagaaagcccaatgtgtcattgtttacttgtcctgtcactggatctgggctaaagtcctccaccaccactctggacctaagacctggggttaagtgtgggttgtgcatccccaatccagataataaagactttgtaaaacatgaataaaacacattttattctat

SEQ ID NO: 19902 - DNA, 877 bp, Homo Sapiens
  misc_feature (809)..(818): n is a, c, g, or t
ccacgcgtccgcatcctctcatccatgggtcagagttgaattcttatgtctatagacttccaatcagaagtctcactggtggggctgggggtgggggcaggcaggaggcatggatgggaacctgagtaggtagtgtggccaagagatcagcacaacctttgcaggctgacttgctaagtctgacagtgacaaacttgtgagcttactgcagtcagtcacagaggctgttctttttcacacaccccttcatgcctggctttccccatatccacatgcagagggcgagctcataaaactacagggaagcgtgaaatgatggctttggtagctgtttactgggtaaccccactgtgacactgtccttttcatgtgatgtggaaacctacttctgtcctccaaaccatgaaatgtgtcatctagactgcagagtacttgagtgctttgcctcccgatatgccagagcttgtggtccaaagcccattcctgtgtgtccgtcctgccatttagccacagaaggctgcggagtgaggcggcagctagcctggccagtggctgtcccgtggaccgacacctgcgcccccttctgcaagcaggattttctggtgccaacactcattcatcattcccgatcaactaggatgaatttaagactgtgctaccatgtgttctcaagtggtagtttaaaaagtggatttttaaagtgcctttcaattgtctgtgaacgtctaaaggactgatttgtctcattttgactgttgagtctttaatgggtgccatttaaaaaacaaaatgctattttttaattgtcnnnnnnnnnnaactatcagtgtatctttaaaagtcacccttacggtgattaaattgcactaacattccc

SEQ ID NO: 19903 - DNA, 1189 bp, Homo Sapiens
gcacgaggggagcgagcaacacacgtctaacagcctagacaatctcgtcagatgctcatactggaccatcagcctccccattttagctgactttcccagggtcgttggcaaattttttgttctgtcttttccttgactaattgtagaactttgtgtgaggacttttggttatccaaaatcacagaaatgaaccgttttgcagctgcgcagtctaaagggcaggccagtgtctggaagcagggcccacgtggcggtccgctggcaggctggtcctggggagcattctgcggacccggtcacgggcttggttagtcatgtgtcacgtttcccggactctgcccctacatctcagctgaatctccagggaggctgcagagcatcgtggagaccactttctgcctcggcctttaaatgctgactcacctcctctcggaggaggcgtcctgtcttcacgggggggtcccggtggcctccagacgtagccatttcctgacatcaagatgttgaatgtaatctggtctgagctgggcctgtgggaggggccgcctgaggcctgtgcgctgttgtcctcgcagatgtacttatttttgttcatgatacgggcgttccgttccttaaagatgtatatattttcttactgtacataaagatgttccttaagtcgtacagaaggtggcgcggcaaagggcctcgtgcagtgtgttcagattgcccctggggatcttctgtgtcttcagcgcccagccctgcgtgttcctggtgaagcagtttcacatcagtctctccagatagcactacgatgtattccgcttctgaacaggatcccatgccagtgtggaacaccttcccaatcttagttcagaagtggcttgtatgacctgttcaggggtcacatgaggtctcgccagtttcctgggtcctcttcagaggccagaaagttctaagttctgagtccccggccagggtcccttaacacctcggcacagaggctgttggcaagtgtagaggctgcctctgtgtgtggtttaagtaaactggaaatgagacattgacgtgctgctcctccagaggtctgcacactccacttcacatgccgttgactctcacagtctaagacttcagggccgggacctttgtccagcctgcacagtaaagtgaggctgcctctcccgccaggcattgggatccc

SEQ ID NO: 19904 - DNA, 953 bp, Homo Sapiens
  misc_feature (103)..(111): n is a, c, g, or t
gcacgaggccccagtgcactttctaatgtttctgggtcctgaagaattaagatacaaattaattttactccataaacagactgttaattataggagccttaannnnnnnnncatagagatttgtctaattgcatctcaaaattattctgccctccttaatttgggaaggtttgtgttttctctggaatggtacatgtcttccatgtatcttttgaactggcaattgtctatttatcttttatttttttaagtcagtatggtctaacactggcatgttcaaagccacattatttctagtccaaaattacaagtaatcaagggtcattatgggttaggcattaatgtttctatctgattttgtgcaaaagcttcaaattaaaacagctgcattagaaaaagaggcgcttctcccctcccctacacctaaaggtgtatttaaactatcttgtgtgattaacttatttagagatgctgtaacttaaaataggggatatttaaggtagcttcagctagcttttaggaaaatcactttgtctaactcagaattatttttaaaaagaaatctggtcttgttagaaaacaaaattttattttgtgctcatttaagtttcaaacttactattttgacagttattttgataacaatgacactagaaaacttgactccatttcatcattgtttctgcatgaatatcatacaaatcagttagtttttaggtcaagggcttactatttctgggtcttttgctactaagttcacattagaattagtgccagaattttaggaacttcagagatcgtgtattgagatttcttaaataatgcttcagatattattgctttattgcttttttgtattggttaaaactgtacatttaaaattgctatgttactattttctacaattaatagtttgtctattttaaaataaattagttgttaagagtcttaat

SEQ ID NO: 19905 - DNA, 665 bp, Homo Sapiens
gcatcccaagcatcctaattaatatcagtatcttcctcaaaggacatgaagggatgatctacaggcagaactaagtaaacagtttttccaaaatcaagaaagacacaggaaaaatcttaaggaacttataacttttatgggatccagtcctaaagtagattaaaccgatgtaaaattctgtctggagacgttctccccttcaattcaatgggaaggctcttttctggcatgaactctctgatgtctaatgagctctgagcaccatccataagctttcccacattctttacatataaaaggtttctctccactgggaattctccgatgctgacttaaatatgagctttgactaaaggccttcccacactcattacactcatagggcttctctcctgagtgaatcctctgatgctgaacaaaatgagcaccccatctgaaggccttcccacattcattacattcgaagggtttctctcctgtatgaattctctgatgctgaccgaggtttgagctctgtttgaaagttttcccacagtcactacacttatagggtttctctccagaatgaactctctggtggacaacaagatgtgagttataaatgaaggttttaccacattcactacattcatggtctttcttccctgtgggaatttccttatgga

SEQ ID NO: 19906 - DNA, 1587 bp, Homo Sapiens
  misc_feature (956)..(972): n is a, c, g, or t
gcacgaggcttctctccagaaggcttgtaccttgccacggtggcagatgacagactcctcaggatctgggccctggaactgaaaactcccattgcatttgctcctatgaccaatgggctttgctgcacattttttccacatggtggagtcattgccacagggacaagagatggccacgtccagttctggacagctcctagggtcctgtcctcactgaagcacttatgccggaaagcccttcgaagtttcctaacaacttaccaagtcctagcactgccaatccccaagaaaatgaaagagttcctcacatacaggactttttaagcaacaccacatcttgtgcttctttgtagcagggtaaatcgtcctgtcaaagggagttgctggaataatgggccaaacatctggtcttgcattgaaatagcatttctttgggattgtgaatagaatgtagcaaaaccagattccagtgtactagtcatggatctttctctccctggcatgtgaaagtcagtcttagaggaagagattccacttgcacggcaacagagccttacgttaaattttcagtccagttatgaacagcaagtgttgaactctttctgcttgttttgattcaaagtgcagttactgatgttgttttgattatgcaactaagtaggcctccagagcctctctagtggcagagcagctcacactccctccgctgggaacgatggcttctgcctagtacctatccttgtgtttctgatgcagtggtagcattggttcaagttctctcctgctgtggtcagagttgcttcgatgttggccaagtgcttttcttcttgggctcccttctgacctgcaggacagttttcctggagccatttggtatgaggtattaatttagcttaactaaattacaggggactcagaggccgtgctcctgaccgatccagacactattactggcnnnnnnnnnnnnnnnnnaacaatggtgtgcatgtgcaggaaatgacaaatttgtatgtcaaattatacaaggatgtattcttaaaccgcatgactattcagatggctactgagttatcagtggccatttattagcatcatatttatttgtattttctcaacagatgttaaggtacaactgtgtttttctcgattatctaaaaaccatagtacttaaattgaacagttgcaaagatgtcttaattgtgtaaagaattggtgtagtcatgactttagctgatactcttatgtacgagatctgtctctgctgtttaacttcattggattaatcagctggtttcaactctactgcgaaacaaaaatagctccttaaaagtactgttctccttcagtggcatgtagttatctaatcaagacacctcattcaaacaaaacctgccttaggaaaatttaatatattttaaattattttaaaagaaatacaacatcttattctttagctttcttaatcggtgctttatggaggccagtgtaacgttacatgactcgttgagaaagttgaggaatttcctctaccacctttgttgcttgaagaaaaacatgtcttttcaaaatgagaggctttcattgaag

SEQ ID NO: 19907 - DNA, 1558 bp, Homo Sapiens
ccacgcgtccgagctggagacggcctgggtgctggcgaagcggaggccggagtaagaagactgttagaatgccctcggtaacacagaggctgagagatcctgacataaatccttgtttgtcggaatctgatgcttccaccagatgtctggatgaaaataactatgacagggaaaggtgttccacttacttcttgaggtacaaaaactgccggagattctggaattctatcgtgatgcagagaagaaagaacggagtgaagccatttatgcctacggcagcagaaagagatgaaatcttgagagcagtgggaaatatgccctattgaatgtttgcattaaaagtgtttatataacttagaagcagatgaatatttctaataaatgattgctgtaatatttaagactgtacacccctcacccagacagaccttaagttcttcaagtggagacagtgaagtcaccccgtgtcctttttgcttgctctcagtgccatgccgatggtatgttgctgttggctgtgttgtggcatgagtttgcatgactttctggaggcatggagttaggtaaggctacatgagaaattgagcttttccactgggttttgaaagaagagtatgatgtgaacaagtaaagactgaatggggctgagatgaaggcaatgtttccaaggaaaggaaatgttatgagcaagagtgtgaggcaagagaagctggaaccacattcagagagtatcctgtagattgctccacctagaatctcaggtgggtggagcagtggtgggagaagactggaaaggtaagttgaaggtaaggaatgtgtggtgggcctcagatcccaggctcattcctcaaatcacttcttacttccctcacttatctttgtttaaataaggttagtacattcactaggggcaaatgggtttttctaaataaatgacataaaaaagaactggttgtctttctttaaagaaagtcttagttacaggattctgtgattaaaatccttaaatattgggttgccttctgcagctgtagtatcagtttttgaaccacagtaatgggaagaaagacaaatggattcccttagaagtaagatttctatttgcaggatgagttgggcagggaaaagggtcagggttcatcaggtgaactcaacactgggatgagactagaacttcactttatgatataaacacaatacgattattcaatgtggtgactggggtagactgtgaagcagccctccttatgcccactgccttttagaatcgtttgttttattcatggtagttttatgaagacatactattattgaatgaaatttaatgtgtacttgaaaacattgcttttgtcccttctcttcatctggtcttgggtcaagaacattgttttaatggctgccgacaatgaactgtctgtctgagtctaaaaccaagctcagtttctaagccacatgaccttgattgttaaatgtagttatatttgaataaaaaatgaatcatttccaaaattcttttgatttgtatgactgctataaaatgatggattaaaatagacca

SEQ ID NO: 19908 - DNA, 992 bp, Homo Sapiens
gcacgagggagagcattgctacgtctgacataccacgtaccccggtgctgggctgctgcatcagccgagccctggagccctcggctgtccaggaagagtttatgaccagccgtgtgaattgggtggtacagagctctgctgttgactacttacacctcatgcttgtggccatgaagtggctgtttgaagagtttgccatagatgggcgcttctgcatcagcatccatgacgaggttcgctacctggtgcgggaggaggaccgctaccgcgctgccctggccttgcagatcaccaacctcttgaccaggtgcatgtttgcctacaagctgggtctgaatgacttgccccagtcagtcgcctttttcagtgcagtcgatattgaccggtgcctcaggaaggaagtgaccatggattgtaaaaccccttccaacccaactgggatggaaaggagatacgggattccccagggtgaagcgctggatatttaccagataattgaactcaccaaaggctccttggaaaaacgaagccagcctggaccatagcactgcctggaggctctgtatttgctcccgtggagcttcatcggggtggtgcaggctcccaaactcaggctttcagctgtgctttttgcaaaagggcttgcctaagggccagccatttttcagtagcaggacctgccaagaagattccttctaactgaaggtgcagttgaattcaggtgggttcagaaccaagatgccaacatcggtgtggactacaggacaaggggcattgttgcttgttgggtaaaaatgaagcagaagccccaaagttcacattaactcaggcatttcatttattttttccttttcttcttggctggttctttgttctgtcccccatgctctgatgcagtgccctagaaggggaaagaattaatgctctaacgtgataaacctgctccaaggcagtggaaataaaaagaaggaaaaaaaagactctatcttctc

SEQ ID NO: 19909 - DNA, 1161 bp, Homo Sapiens
gcacgagggctcattgtagcacaatcctattactcttcctctaacatttttgaggaagttttgtctaattatcaatattgaggatcagggctcctaggctcagtggtagctctggcttagacaccacctggagtgatcacctcttggggaccctgcctatcccacttcacaggtgaggcatggcaattctggaagctgattaaaacacacataaaccaaaaccaaacaacaggcccttgggtgaaaggtgctatataattgtgaagtattaagcctaccgtatttcagccatgataagaacagagtgcctgcattcccaggaaaatacgaaaatcccatgagataaataaaaatataggtgatgggcagatcttttctttaaaataaaaaagcaaaaactcttgtggtacctagtcagatggtagacgagctgtctgctgccgcaggagcacctctatacaggacttagaagtagtatgttattcctggttaagcaggcattgctttgccctggagcagctattttaagccatctcagattctgtctaaaggggttttttgggaagacgttttctttatcgccctgagaagatctaccccagggagaatctgagacatcttgcctacttttctttattagctttctcctcattcatttcttttatacctttcctttttggggagttgttatgccatgatttttggtatttatgtaaaaggattattactaattctatttctctatgtttattctagttaaggaaatgttgagggcaagccaccaaattacctaggctgaggttagagagattggccagcaaaaactgtgggaagatgaactttgtcattatgatttcattatcacatgattatagaaggctgtcttagtgcaaaaaacatacttacatttcagacatatccaaagggaatactcacattttgttaagaagttgaactatgactggagtaaaccatgtattcccttatcttttactttttttctgtgacatttatgtctcatgtaatttgcattactctggtggattgttctagtactgtattgggcttcttcgttaatagattatttcatatactataattgtaaatattttgatacaatgtttataactctagggatataaaacagattctgattccctt

SEQ ID NO: 19910 - DNA, 674 bp, Homo Sapiens
gcacgaggcatccccccaacctcctcatattgcctctgaacccagatggcaatccatcccggttctctctgagggccacgggcttgggtagtggaaagggtgtttgggaaattgttaaatcagttacccgtagtagagctatttcttgtacttctaagttttctagaagtggaaggattgtagtcatcctgaaaatgggtttacttcaaaatccctcagccttgttcttcacgactgtctatactgagagtgtcatgtttccacaaagggctgacacctgagcctggattttcactcatccctgagaagccctttccagtagggtgggcaattcccaacttccttgccacaagcttcccaggctttctcccctggaaaactccagcttgagtcccagatacactcatgggctgccctgggcagccagcattcattgtaagttccccctttgaaaactggtgtgtgggtgttcagttctgtgtctggtgggtatggacagacagtaatctcctgtgatctgtgctagctgtgaggcagctctggaacgtgaagagctgtttggtttgaaccgtgaacaaaactgtgttttgagtttagctgacattaaagaaaaaagttcatcacgtgactgttaatgtaaacctggttattaaaataactatgaaattaaaaaa

SEQ ID NO: 19911 - DNA, 1521 bp, Homo Sapiens
  misc_feature (55)..(90): n is a, c, g, or t
  misc_feature (609)..(650): n is a, c, g, or t
  misc_feature (810)..(853): n is a, c, g, or t
  misc_feature (1030)..(1045): n is a, c, g, or t
gcacgaggcttttattgaaattgttgaatactttatattacagtaaagttgattnnnnnnnnnnnnnnnnnnnnnnnnnnnnnnnnnnnntacactcatgttgaaatcaaacaagccagccaaaccggtacaggctgagggatgctgcagggcggtttgcttctcagcaatagaacaccagagtctatatacaattctacaatgcgagaaaagtcattcactaaacatggcaggaaaggcgctgccgccagaataagaacaccagcagcgcctccctcctcctccatgctgtgaccgcccggcctccctcctcctccacgccatgcccgcctggcctccctcctcctccgcgctgtacccgcccagcctccctccagcatgaggccaagtgcaatgctatggccgaggctctggcccatgatttttcatgcagtttctgtaagtcacacactgtgcaaattaaggcttcttataggtcgaatggttgatcaacacttttttcttaaaaaaataagcacagtaaaggtggtatcatgagaacctgaagagatgagacctataccccaaatctggaaaaaattcattttctctgacacctcaactccactnnnnnnnnnnnnnnnnnnnnnnnnnnnnnnnnnnnnnnnnnnaatcaatctttgggcaggttgaattcaccagccggcaaaaatactgacaaatgtgctctgtacgcccaggcttgaagatatcatgcaaaaaggtgcagccattcctgactaaaggcatagaacaggcaaactctccaaaacctaggcactcggggacccnnnnnnnnnnnnnnnnnnnnnnnnnnnnnnnnnnnnnnnnnnnnccttaagaaacagaaagcaaaagagaaaagagacagaatgagctccaactcaggggacacattaatgaccagttcaacatcccgccggaagctgccccatacactgacagcctcaccatctcaagatggacaaactggtacatcacacccctgctggcaggaagaaacggtggctgnnnnnnnnnnnnnnnnctcaaacctgagtaattgtcaaagtcaataaatagggggagagaattaaaatgctaaaatatatcggggtcaaataccctatcgggactaaagcagcaagggtttcttcgaatgcagccctctgttttgagatgcgtccggccttatgcttttaaatgaggacttggggcaaaaccctgggcacaaggtaccgccctgtggccgatctgagccatgccttattccaatgactgtaaacaatcaggaaggagtggggcctgacctccttcaccctctcccccatcacaaaaactcttcccttttgaaagtttctgttaaaggcaaaattatagaagcatcatcgagtggaagtcttatttggttggaggtgcttggctgtcccgcggctccgtgctcccctgcaggcactgcggagtcagatgtgtaagaggtcctcgtcgctgtcgtcatggaaggacaccagcttggcctcgtgc

SEQ ID NO: 19912 - DNA, 811 bp, Homo Sapiens
gtttcatttggtagttcatctgccttttaacccattcaccaaaatttaccttgttaacaagcatcaccaatgaacatttcagaacaatctgcatatttaacagacctaaaataaatcctattaggcaagtcagttgaaaatgctcgtgctgctaatggaattagagtgcgttcattttacaggctagtattttaaaagtagaaatcaaaatctggcaccgaagcatgctaattgtttactgtaccttgtgaggttttcactcataaatttaaaccgtgtatttttttaaaactggtttgtgtatatatatagtgattatggatactaattcaatgtaatttataattttctatgtcaatacaaaaatacatcacagccttctcaaacagctcaagcaatatattgtatattgccatatcgtctggtgaaagggttaaattacttcacctcttgcacttttagatgcaaatcagtttttcatttctgtaatagaaaattattcacgtatttttacatcatttgttttttcctgaccagtatttaaaaccaaaaaggatattctgaaaaatggccaacaatttttttagaagtagcatcccaagcagcgtgcctaaacattacattgcatatggaaataaaagaatcaaacgtctaatgccttattatttctgatttcctttttcattttaagtggggtggagatccagctcctctcgacattgagtcaacatttaagcctgggaaggtggaaagggtgggtcccttggactttcacaccctctctcagaaccccctttcccgggtgaacccc

SEQ ID NO: 19913 - DNA, 901 bp, Homo Sapiens
ctttattttaaataactttcttaaccctgcccattaagatcacagtaaacatacaataatttttattatggaaattaatctttacatacaaaatcagctacgtaattttacttacaaaacaataaaaactgttctttactgtggcaacaaaagaagcattttgacaaatgaaaaaaattaatgcaaacaaattaaaacaatgcttttctttttacttgcttcactgtctcttctatttattttctatgatcatttgacacaaacatggattactttgatatctactgaaacataaatgataaggttcttaaaggttgaattaaaagtctgggtgttcaatattttagaagctgaataaacaaaacgaaattggggtttgtgattacagaggatttatcattttttccctttgcccatatgaaaatatataatagaaaattacccacgggaaaacatttttaaatttaatgttgcgttcctatcaagtttaataataatgccaagttggcaatttaattaattactttcactaaggattaatactttgtctagaatggagtagaggtagactgatcttttcgtattcaaatattttaaaatataaagtttaaaatgtcataaggaattatataaaatagtatttttaaatatttgaaatttaatttataattatattcaaaataattaaatccctttttgataaatagtaagtaagttgttgcttgaaattcatttggttgaaatgattactctaacgaactcttttagttatttttaactaataatctttagaaaaaatgtctattttttaataagggtttctagttttggaaaaaacttctaatgatttaaatgcacttacagatgctcctacccctggaaaaaggcagggggggcccgg

SEQ ID NO: 19914 - DNA, 2676 bp, Homo Sapiens
gcacgagggaaccccccaatcgcgtcatctttctggaagatgatgatgttgcagcagtagtggatggacgtctttctatccatcgaattaaacgaactgcaggagatcaccccggacgagctgtgcaaacactccagatggaactccagcagatcatgaagggcaacttcagttcatttatgcagaaggaaatatttgagcagccagagtctgtcgtgaacacaatgagaggaagagtcaactttgatgactatactgtgaatttgggtggtttgaaggatcacataaaggagatccagagatgccggcgtttgattcttattgcttgtggaacaagttaccatgctggtgtagcaacacgtcaagttcttgaggagctgactgagttgcctgtgatggtggaactagcaagtgacttcctggacagaaacacaccagtctttcgagatgatgtttgctttttccttagtcaatcaggtgagacagcagatactttgatgggtcttcgttactgtaaggagagaggagctttaactgtggggatcacaaacacagttggcagttccatatcacgggagacagattgtggagttcatattaatgctggtcctgagattggtgtggccagtacaaaggcttataccagccagtttgtatcccttgtgatgtttgcccttatgatgtgtgatgatcggatctccatgcaagaaagacgcaaagagatcatgcttggattgaaacggctgcctgatttgattaaggaagtactgagcatggatgacgaaattcagaaactagcaacagaactttatcatcagaagtcagttctgataatgggacgaggctatcattatgctacttgtcttgaaggggcactgaaaatcaaagaaattacttatatgcactctgaaggcatccttgctggtgaattgaaacatggccctctggctttggtggataaattgatgcctgtgatcatgatcatcatgagagatcacacttatgccaagtgtcagaatgctcttcagcaagtggttgctcggcaggggcggcctgtggtaatttgtgataaggaggatactgagaccattaagaacacaaaaagaacgatcaaggtgccccactcagtggactgcttgcagggcattctcagcgtgatccctttacagttgctggctttccaccttgctgtgctgagaggctatgatgttgatttcccacggaatcttgccaaatctgtgactgtagagtgaggaatatctatacaaaatgtacgaaactgtatgattaagcaacacaagacaccttttgtatttaaaaccttgatttaaaatatcaccccttgaagcctttttttagtaaatccttatttatatatcagttataattattccactcaatatgtgatttttgtgaagttacctcttacattttcccagtaatttgtggaggactttgaataatggaatctatattggaatctgtatcagaaagattctagctattattttctttaaagaatgctgggtgttgcatttctggaccctccacttcaatctgagaagacaatatgtttctaaaaattggtacttgtttcaccatacttcattcagaccagtgaaagagtagtgcatttaattggagtatctaaagccagtggcagtgtatgctcatacttggacagttagggaagggtttgccaagttttaagagaagatgtgatttattttgaaatttgtttctgttttgtttttaaatcaaactgtaaaacttaaaactgaaaaattttattggtaggatttatatctaagtttggttagccttagtttctcagacttgttgtctattatctgtaggtggaagaaatttaggaagcgaaatattacagtagtgcattggtgggtctcaatccttaacatatttgcacaattttatagcacaaactttaaattcaagctgctttggacaactgacaatatgattttaaatttgaagatgggatgtgtacatgttgggtatcctactactttgtgttttcatctcctaaaagtgttttttatttccttgtatctgtagtcttttattttttaaatgactgctgaatgacatattttatcttgttctttaaaatcacaacacagagctgctattaaattaatattgatatattcagtattctcttcaactttgtcacgaggaagaatttcctgtagttaattttaactttccttcattacattgttgcataaaactagtcccttagtgccagtttggaagttacttgcaattgtttggaagatttgcaggtcgctgacctcatcatttcactctaagtatatgtggtaggctaagctcagaaaaaggtatgtatgctttacactgataggcaccaaatttagtattgtatcctaagtatttttcctcttctgtattttctgtgctctacccctgaaatatatttaggaataaagaagatataaataaagtgatattggggtatgttcagcttgtaaagtgtcagaaatggaagttgacattttggattaaatatttaaagtagaatggtattattttgatacccccaaaattggtgagtaataattcttaatggagctttttctgggcagatcttcaaggctataagagagtggtttgttttggggaagtccttctttt

SEQ ID NO: 19915 - DNA, 630 bp, Homo Sapiens
gcacgaggctgggatcagccactgcagctccctgagcactctctacagagacgcggaccccagacatgaggaggctcctcctggtcaccagcctggtggttgtgctgctgtgggaggcaggtgcagtcccagcacccaaggtccctatcaagatgcaagtcaaacactggccctcagagcaggacccagagaaggcctggggcgcccgtgtggtggagcctccggagaaggacgaccagctggtggtgctgttccctgtccagaagccgaaactcttgaccaccgaggagaagccacgaggtcagggcaggggccccatccttccaggcaccaaggcctggatggagaccgaggacaccctgggccgtgtcctgagtcccgagcccgaccatgacagcctgtaccaccctccgcctgaggaggaccagggcgaggagaggccccggttgtgggtgatgccaaatcaccaggtgctcctgggaccggaggaagaccaagaccacatctaccacccccagtagggctccaggggccatcactgcccccgccctgtcccaaggcccaggctgttgggactgggaccctccctaccctgccccagctagacaaataaaccccagcaggccggga

SEQ ID NO: 19916 - DNA, 1505 bp, Homo Sapiens
  misc_feature (1303)..(1346): n is a, c, g, or t
gcacgaggcccggggctgctgggtgcgggcggtgggctgcgcgttgtccgctggactgggtcccggtcacgccccgccaagccccgcccctcaggccggggcgcgaccgcggatccgcagttcccgggccagcctggggcggccggccaggaaccacccgttaaggtgtcttctctttagggatggtgaggttggaaaaaggctcctgtaaccctcctccaggatgaaccacctgccagaagacatggagaacgctctcaccgggagccagagctcccatgcttctctgcgcaatatccattccatcaaccccacacaactcatggccaggattgagtcctatgaaggaagggaaaagaaaggcatatctgatgtcaggaggactttctgtttgtttgtcacctttgacctcttattcgtaacattactgtggataatagagttaaatgtgaatggaggcattgagaacacattagagaaggaggtgatgcagtatgactactattcttcatattttgatatatttcttctggcagtttttcgatttaaagtgttaatacttgcatatgctgtgtgcagactgcgccattggtgggcaatagcgttgacaacggcagtgaccagtgcctttttactagcaaaagtgatcctttcgaagcttttctctcaaggggcttttggctatgtgctgcccatcatttcattcatccttgcctggattgagacgtggttcctggatttcaaagtgttacctcaagaagcagaagaagaaaacagactcctgatagttcaggatgcttcagagagggcagcacttatacctggtggtctttctgatggtcagttttattcccctcctgaatccgaagcaggatctgaagaagctgaagaaaaacaggacagtgagaaaccacttttagaactatgagtactacttttgttaaatgtgaaaaaccctcacagaaagtcatcgaggcaaaaagaggcaggcagtggagtctccctgtcgacagtaaagttgaaatggtgacgtccactgctggctttattgaacagctaataaagatttatttattgtaatacctcacagacgttgtaccatatccatgcacatttagttgcctgcctgtggctggtaaggtaatgtcatgattcatcctctcttcagtgagactgagcctgatgtgttaacaaataggtgaagaaagtcttgtgctgtattcctaatcaaaagacttaatatattgaagtaacactttttttagtaagcagatacctttttatttcaattcacagaatggannnnnnnnnnnnnnnnnnnnnnnnnnnnnnnnnnnnnnnnnnnnaacactctacatttcccttgttttttaactcatgcacatgtgctctttgtacagtttaaaaagtgtaataaatctgacatgtcaatgtggctagttttatttttcttgtttgcattatgtgtatggcctgaagtgttggacttgcaaaggggaggaaag

SEQ ID NO: 19917 - DNA, 1257 bp, Homo Sapiens
  misc_feature (1130)..(1139): n is a, c, g, or t
atgttgagattcagttttatttatgctaccagctaggtaaaaagcatacatattgtgtctgtggtacagtcaatacatctgcaacttttctacttaaattctctatacaaagtcactgccaattgatatgatcattgatggcaaagggcttagaataaccaaaagatataaaaaagtttgcagtcttgccccaagatacaaaaactgaattttaaacaatatcataacatacatgatttaaacattataccaaaaaaagtcacatcaaatcaagtacaaaaatatccaaactacctattatgaactgtaatgtttccattattctgcacagtatttaacatagaatttagcagtttccaaaatattcagtttattcattatttagtttaagcattgccacctttgcagaacagtgagacattaggtagagtgacgctgcttttagtgttttaaaaaatacaaaacctttccctatgaatgaaggaaaagaaattcctcttataggcttcttagcaaccaaccttgtgcctagaaatacagaagaatacaactactgtttaacaggggaaaagtatacttcatcaacagtcatccactaggaataacaaacgtaattttaaatttttttgtctggtaattttaagggattctcaatatacacacagattaagagttttttgccttggcaaaaataaaactgaagttgcaagacaatctgaattgaaaccatcttcactaatataacttgcaaaaaatattttggatgaaagattacaatacattattaacttactttttaaacacagagtaaagttactcttggtaaaattaactcacccacatggcacattatttttgaagtatgttcaacaataacaacttgtacacaaaataacataggtgaattaactttgagaacttctctgcctttaaaatcagcaatactggattattctgtagaatgatatacatatcgatgttctgcagataaaaggctctaagacgttttaaagggctaaattttctagcactggaatgattccttcatacataacaggtgaagaattaataagaatgtgtttctcctaatcttcaagctctgagccatgcctgacaagttctgaagaggnnnnnnnnnnttgttttaatccagtttctgtctgctaggagcaaggcagcaaacacattttcaaccctttatgaaaagataaagcagaacaaaagtgaaatatatcttcagattataaaccctcgtgc

SEQ ID NO: 19918 - DNA, 1121 bp, Homo Sapiens
ctccggagaccgatgcaccccacagtcagggtgattttatttctagaaaaggtgacaggtgctgcacgtgggcaggagcaggtcacagtgaggcagggccaggggcatccccctctcaacacaacctaggcgccagcagcctaccggccaggtaaagcaagggctggcccatgtagtgagcccagcatggggagacgctgagggcccatggggcgccaaagccagggggcagcagcctccaaacaccgacagcgccacgtcccctgggcaggaaggtggatgccccagggcactctgtcctcctgctggagggcctggcaggctggtctcaagacaccagcccgagggaggcctggcaggtggccagggatagaggcaggggatgggctgagcagggacgcagcccccacctgcctgcaggctccagacacaacagcccaggccccatctgagccctggcgctgcgctggcatgggtgggggctggggaggggcgtgggcatggctggcctcagaagcccttgtccatgctcagggtgcggcgggtcacgtgctccagctcccctgacacgtaggcggccatactgatgcggtattgtgccagcatcttcagcatgagccgcaggctcagccaccactgctcccgtggcatgcggtgctcgaaatcagtgtctttcttgagctcagtgacggggctgaaggccaccgccttcttcttcaggccgatcacgcaggccgagtctggggcattggcgaacacccgtcccttgcggtaaacctcgcgcagcttctccgacaaccacagcatggccttcacccccagcttggtcccatagttccggtcaaagggggttggagcgccaccctgctgcaggtggcccaggacattggtcctgcagtcgaagacgcccttgccctctgatgagtacaggttgtacaggaactccgtggtgtagtagtcatggcacttctcgttcctgagaggggcagcagggcctgagtcggcgggaacgagttcaggtctccccccgatcctgagtccccgctgggccaggcctgggagagggagtggcagctcccaggaaagccgccctggcccaccctctccaaggaccctcgtgc

SEQ ID NO: 19919 - DNA, 1477 bp, Homo Sapiens
gcgtccgagaatttaggggaatctgcaacattaagaagcttattgctcaatccacacctcaggcagttgatggtcaacctcgatcagggagaagacaaagatgatgatgactctatagctgattttctcaatagtgatgaggaagaagacagagtttctttgcagaatttaaagaatttaggggaatctgcaacattaagaagcttattgctcaatccacacctcaggcagttgatggtcaacctcgatcagggagaagacaaagcaaagctcatgagagcttacatgcaagagcctttgtttgtggagtttgcagactgctgtttaggaattgtggagccatcccagaatgaggagtcttaagatggattattgtgctgcttgctcaagcgtgtgcttgactcctggaacctgcctgctccctctcccagaccagctagtttggggctggggagctcaggcaaaagaggtttccaggatgcagattaggtcatgcaggcctttaccggcattgatgtggctcatgtttcaggcagacttggggtccttaaggtggcaagtcctttatggagagaaaacttgacattcagatgattgtttttaaatgttttacttttggtacagttgatagacatcataaacgatatcaagcttacacttcatatggagttaaacttggtcagtgttaataaaatcaaaacgtgattctactgtacattgcattattcataatttaattgtttgaaattacattaaataaatcaactaattaaatactaaagttttgttcctttttaaaggaaataaccacaagatttttcccagcccaaattccagcgccaattttaggccaactttggctgttttcttccaaaagtgcttatgtggaattgggatccccagtgtagtgacagacagtcatgactgctgctgagtttgatctgtgaaggtagtgaaatgtggccctgatgtttcttaaccctgatttggtaactaccagccctgacaccatcagtgcttgatgtagctggaatgtagtggggcgtggtgctgtgtaggacctgcagaagctgctccagtgaggccttgaacttggacaccacggtcaacacaggggccctgctctggccagggggttcctcctgggtcttctctttggggttagtaggaaacagccccatgagcagggggtcctgggattgctgcaggagcctggtcagctcaggtgggatagggtccttgttcttctccaccaggcctgctgtgtggtaccgcacaggccccgcataatgcaccacaatgaagctgggctcccggctgagcttattgtggcccaggcaggggctgcctgccagggcagtctcaatgcgtgtctggagctgggctgcgctgctgggtcgattgaggcggcattcctcatttatgagggagcagatgctgatggggcttccctcaatgagatccaaacaggggctgg

SEQ ID NO: 19920 - DNA, 898 bp, Homo Sapiens
  misc_feature (126)..(164): n is a, c, g, or t
gcacgaggtacccggagcccgctgcggcccagcgcacggccctcaccccgcatcgcgaccccgcgccccgccggccgagcatgggcgcgcgcgcctcaggcgggcccctggcccgggccgggctcnnnnnnnnnnnnnnnnnnnnnnnnnnnnnnnnnnnnnnngccccgggcgcgcagggggcgcggggccgcggcggcgcggagaagaacagctaccgccgcacggtcaacaccttctcccagagcgtcagcagcctgttcggcgaggacaacgtgcgcgccgctcagaagttcttggccaggctgactgagagatttgtgctgggagtggatatgttcgtggagacactgtggaaagtctggaccgagctcttggatgttcttggacttgacgtctccaacctgtcccagtatttcagcccagcctcggtgtccagcagcccggcccgcgcgctcctgctggtcggcgtcgtcctcctggcctactggttcttgtccctgaccctgggcttcactttcagcgtcctgcacgtggtgttcggccgcttcttctggatcgtgcgggtcgtcctgttttccatgtcctgcgtgtacatcctgcacaagtacgagggcgagccggagaacgcggtgctgccgctgtgcttcgtggtggccgtctacttcatgaccgggcccatgggcttctactggcgaagcagtcccagcggccccagcaaccccagcaaccccagcgtggaggagaagctggagcacctggagaagcaggtcagactgctcacatccgtctcaaccgggtgctcgagagcctggaccgctccaaggacaagagaaggtcagccggccgggcgggtccacagttaccagcacgctgtctcagaaaacgaaaacggagg

SEQ ID NO: 19921 - DNA, 1102 bp, Homo Sapiens
gcacgaggagttaggcaacaggcagctgacttgatttctcgaactgctgttgtcatgaagacttgtcaagaggaaaaattgatgggacacttgggtgttgtattgtatgagtatttgggggaagagtaccctgaagtattgggcagcattcttggagcactgaaggccattgtaaatgtcataggtatgcataagatgactccaccaattaaagatctgctgcctagactcacccccatcttaaagaacagacatgaaaaagtacaagagaattgtattgatcttgttggtcgtattgctgacaggggagctgaatatgtatctgcaagagagtggatgaggatttgctttgagcttttagagctcttaaaagcccacaaaaaggctattcgtagagccacagtcaacacatttggttatattgcaaaggccattggccctcatgatgtattggctacacttctgaacaacctcaaagttcaagaaaggcagaacagagtttgtaccactgtagcaatagctattgttgcagaaacatgttcaccctttacagtactccctgccttaatgaatgaatacagagttcctgaactgaatgttcaaaatggagtgttaaaatcgctttccttcttgtttgaatatattggtgaaatgggaaaagactacatttatgccgtaacaccgttacttgaagatgctttaatggatagagaccttgtacacagacagacggctagtgcagtggtacagcacatgtcacttggggtttatggatttggttgtgaagattcgctgaatcacttgttgaactatgtatggcccaatgtgtttgagacatctcctcatgtaattcaggcagttatgggagccctagagggcctgagagttgctattggaccatgtagaatgttgcaatattgtttacagggtctgtttcacccagcccggaaagtcagagatgtatattggaaaatttacaactccatctacattggttcccaggacgctctcatagcacattacccaagaatctacaacgatgataaaacacctatattcgttatgaacttgactatatcttataattttattgtttattttg

SEQ ID NO: 19922 - DNA, 1050 bp, Homo Sapiens
gcacgaggccgcggcggccacgctccgggagacttccggcagggcgggcgcggggtcttggcgaacggtcttcggaagcggcggcggcgcgatgaccacgctacgggcctttacctgcgacgacctgttccgcttcaacaacattaacttggatccacttacagaaacttatgggattcctttctacctacaatacctcgcccactggccagagtatttcattgttgcagaggcacctggtggagaattaatgggttatattatgggtaaagcagaaggctcagtagctagggaagaatggcacgggcacgtcacagctctgtctgttgccccagaatttcgacgccttggtttggctgctaaacttatggagttactagaggagatttcagaaagaaagggtggattttttgtggatctctttgtaagagtatctaaccaagttgcagttaacatgtacaagcagttgggctacagtgtatataggacggtcatagagtactattcggccagcaacggggagcctgatgaggacgcttatgatatgaggaaagcactttccagggatactgagaagaaatccatcataccattacctcatcctgtgaggcctgaagacattgaataaccctgggcagtggttcttaggcagatactctagatgctttatggacaatattattttcattggatgattctggagctctattaggagaaaagtaatcattttaggtcttaaagacttcaagaaaatacaggttatcaatttattttaaatctcattgtttccagttagcaatatcatacctattaaagctgttcattgtaacaaaattcaatcaaaaaggcagctaggtcagaaggaaacataccactctcatggttcatagtattcactgtatgtatgctagggaaaagacttgctccagtctcctcctcagttctgtgcctgagaaccactgctgcatatatttgtttttaaattttgtattgaactgttaattgaagctttaaaagcatatatgaaatgtataaatctaagcctcgtgc

SEQ ID NO: 19923 - DNA, 2590 bp, Homo Sapiens
gcacgaggcagtactcatttatttagcctctcagtgcttaataagacttttctttattttttagttagccgttaggttttgtgaggttagattcctggaagcagtgaatttatacactgttatattaatagagctccgttctttgagtcatgattccaagctaaaggaaattaaaaatgtaatttaataatttcctatttttagggttgttaatttttttctacaaaaaaaccttgaaattttagatatcccaatgtgaatctaatttccatatatacagaaattagacaaataataagtctttagttcaacttaagcatatctcaaatgacttctctaaatttaaagttgatcatgataggatcataaaagacagaaaagacttaagtaatcttgtaatgacaattatttccatttttgctgaactaaaaatatttaacttcataaatatgttactacagcttccagatttaaagaaaaaaagtttcccccactctcaattaaaagttagaaccctccacttttaaaattatacaaatatttcttttttacattacacagaagccttctgtaccattttacgaatttctgtcttcataatataagtgaaaatactgtcatttcaattttctgctttaaattgtttttaataagcattccaaagtgatacagacttaagcttttaatcaatcagtcattcagttgatagacaaagttagcgatgctttatgctaggaaacttgttgacagtaacctgtgcgactttatgcagaagacaaatgctagtaattattatgcacagaggaaaaatcattttaagtatgtggtaaagcagcttcatctttcaaaattgatttgctctggtttttctttatccattagattccaaaatgtccttttactgggatttagttatgtattaagataacctgttttcagttctttttgaaaagaagacattatttatattgaaccaccttattttaaaatttttaacttttatataccacttgtgtgatttccagtgtcatgtcttgggtttgatgtcgttggacagaaaagtgtatcaattatttaaatgaatttttccccatgtttgaggcttagtctgtaaatgtgttgctgtaacagaaaatacttgggtatgcattacttgaatacttgaaaactgaaattaataagatgtattacataatgaattagatttctctgaacagtttttacactgaaaatcttcatttctggattgcagtttgaaatggaatgaagacctgaattatttgggtagaaaaaattatgatagtgcttataagaactgtaaactgttttaaactattttgtgtttgacgcatcaaacttcaagttttttgtaagtttctctcctgaaattttctttctcttctatactttatgcacttactatactactgatgtaataaaagagcagggttaaaaatattgtatctgtattcattgtgaatcctgtagcttttctagttaacaaaaaatcgctttctaaaatactcttaatcccattgttttggttaacatcttacccatttgttgtatttcaaatgccattaatcattttagtacaacacctatgtttataaaaatttgaaaacattacatattgtatttaaaactaattagtgaagagtaagaaaaaaactagccaacagaattgtaggtgatgcattagttaaatttcaaaactcataataaaggaactttcagagattggttgaaacccagtggtatccctgtaaattagctcctgtgactggaaaagaccccaaaaaggcagtagaggagattagtgtttacttgctgtggttgtggtgtgctgctacttaattataggtagtgacacactgaaattcttatttgtccaataatctgaagtagtttcctatatttatctgtactaaattgactataaattgagtctgcaaagaggaaactttttgactgtactgtatttaggagcctttgtacagcttggtcaaatttccatgatatgaagtatttgagttttaaaatatactgttattaaaaggaaaaagacatggccattattccatgtgcttaaatgataatttccttattcagtttcagaagaaaaagaatgaaattgggtaactgtcattgcgttagctttatgttgaattgggaaattgtggcataaagcttaaattcgtgtttatcaaatgtgaaccatagtagtataatgctgctttgtatataatgtaagtgctacaaatagtctcagcactgaaaatgtattgatacctcttaaatgaatgcaacttttgatgtaggtgttttgctatgcctcagaaaatatctgtctgagaatttgttaatctgtttgataatgaagatacttcctgttttcttgtttcatattttcatgttcaaaatttaagttttacatttttactactgttaatttaaataaaatttgttctgtggataaaatgaggtttggcagtgaagaaaattaaaaaagccctcattcatgtaactggttaagtaaaatacattttcactatgtgttcataaacttttaatgaagctgtttgtcttt

SEQ ID NO: 19924 - DNA, 807 bp, Homo Sapiens
gcacgaggataaaattcattctttattgagtgcatggtggcccaggtgctattccatgtatgtcataggtgtgaaaccttaaatctttccaacagccactgccttatggagactgtatcatccttatcttcatcttacaggtgagaaatctgcagtgaagaaaggtacatcccaaggggacaccgacagtaagcagcggagctgggattccagacacgtggctgggcctctgcaggaagaaatcaaacgtgtggaagggttggggagaggagatgcctagaagggattttcctgtattctcttagtggtgggggtaagaccgaggacccaagtcctcactcatcacgtcctccccagtgatgcaaggatggagctggggtaaaaccagggagaatcaggaccctcacgtcgctgcgtttattaagcatcagggtcagagctgggcaggagaggaggggaggcaaggtctaggtgagagacgttctggaaccagccagtggggtggtaggtcgggaggtagatgtcacatgtcagggtcacttggcctgaatggttttttggatccagttcgtgtatctgcagacgttggtgtagactcctggcttctcctttgatccacagggggatgttaccccatgacacaaggcctcggaggtggtctccacataccagcggacccccagaatcaccctggcaggaatccttcccgtacttctcatccccagcacacaacatgttctgggtgatctgggccagggtaggcatgctcacactcctcacggggggggcccggtaccccatttcccc

SEQ ID NO: 19925 - DNA, 871 bp, Homo Sapiens
atcccccgggctgcaggaattcggcacgagggtacttttgtgcaatgtttattacctttgattaaattgtaatgtgaagcttttactaggtgaatagttcattatgtagtggaggcttcgtggttgtccattgaattgtcacagcaaaatctataagtttcttcaattctacaagatagatccatatacctttgatcacttggagactctttttttgctggtttctagataactcaggtaaatcagacctttacagagtacagggctaggtgaaagaattactgaaaaatcaccttgaaaatccgaagggctgatataccctttatgttcctgactgatgcgcagaacctgggggaaatctacagcaatatacaggttgcaatgctgataacacaacagcaatcctctcctctacgtggacttactgttgtttttttaattattattggaatgggattttagaaaatagaagttacctttgtgtgtgttttagggaaggtagagaagaatctgctctttctctgaatactgttttgaccccaggcaggaccttggaaaggccaaaacattaacagtagtacttctgttcactgaagagttatgttacatgaagataaaatggttttgtcgtgtttattattgtattttgtgttgatataaataaacatggtaatttaaacaatgaaacccgtcaggctttcgccaaggtcttcaacacaacccctgatgacttggacctacatgtgatctatgatgtttctcacaacattgccaaagtggagcagcatgtggtggacggaaaggaacggacactgttagtacacggagggatccacccgcgctttccctcctcaccatcccctcattgctg

SEQ ID NO: 19926 - DNA, 1097 bp, Homo Sapiens
gcacgaggaaaagcataagttgctgagtacttacatgctttatgctcagattaaattggatgtttttgtttttaccataggattgcctacagcgctcctttaaggcacaggttttctcctgccctgcttgccggcatgatcttggccagaattacatcatgattcccaatgagattctgcagactctacttgaccttttcttccctggctacagcaaaggacgatgatctgcctgctttcactgtgttgttcatggtggctttttggacaataaagaatctaaaatgggtggggagggtggaagaaatggtggactgtatctctcacgttctgaagcagctaatcctctttcccacatagccatcatcttgtgtgtgtagtaagaggcccatttctcaactgtcttttaaatatctaaaggtagttcctgtaacaactagttttaatgagtaaaaagtcaaagcctcagctctagttgatatccaagttatgatttattttgcaactacctcaggacagaaaagatttatggggattttaaaaatcattgaataactagttaaatgaaattttagctacacactgcctcccaaatattagttgtgcctggttcttgtaatttgattttacagaaaaggaaatgacacttgagatccttggaatgaacacagcttctaaagtgtgcatatacttttttaacgtctcttcttccattacaatgtgtgttttgcaaggacaggttcattttttttagcccactttgtgaactccattgtgcttttttctggtgttttatgcaagttgactactaatgactaatgagaacaataatgaatgcattgttgctgcattagtgtaatgtggtgtggttttgcacttaaaagaggtattcatatgctctagttgtaaatgttcatgaaaatccacttctctactagtcgaactgcttttagtgtctcaccagtggttttacatctgcagagttttgagggctgtgctgacctttgagaggatttgaaattgcttcatattgtgatcctaaattttatattcactatattccctaaagtataccttaataaatattttatgatcag

SEQ ID NO: 19927 - DNA, 888 bp, Homo Sapiens
  misc_feature (742)..(755): n is a, c, g, or t
gcacgagggctgacccaaggggccttcgaggtgccttaggccgcttgccttgctctcagaatcgctgccgccatggctagtcagtctcaggggattcagcagctgctgcaggccgagaagcgggcagccgagaaggtgtccgaggcccgcaaaagaaagaaccggaggctgaagcaggccaaagaagaagctcaggctgaaattgaacagtaccgcctgcagagggagaaagaattcaaggccaaggaagctgcggcattgggatcccgtggcagttgcagcactgaagtggagaaggagacccaggagaagatgaccatcctccagacatacttccggcagaacagggatgaagtcttggacaacctcttggcttttgtctgtgacattcggccagaaatccatgaaaactaccgcataaatggatagaagagagaagcacctgtgctgtggagtggcattttagatgccctcacgaatatgaagcttagcacagctctagttacattcttatgatatggcattaaattatttccatatattatataataggtccttccactttttggagagtagcaaatctagcttttttgtacagacttagaaattatctaaagatttcatctttttacctcatatttcttaggaatttaatggttatatgttgtctttttttcctatgtcttttggctcaagcaacatgtatatcagtgttgactttttctttcttagatctagtttnnnnnnnnnnnnnnccacataacaattctttgaagaaaggaagggattaaataattttttttccctaacacttttcttgaaggtcaggggctttattctatgaaaaagtagtaatagttctttgtaacctgtgtgaagcagcagccc

SEQ ID NO: 19928 - DNA, 1047 bp, Homo Sapiens
gcacgaggctcaaggggatctaatgtttgggctccaaactaaccatctcggagctgggctcctcatttactgccaaaccctcagcttatgtagctagaaagggccctggagtgagaaagcctggattttcaaattgatgctcccctactgactagctgtgccactctgggcaaatgctcttccttgagcctgtttccacacctgtaaagtggggatgatgatcctatctcactgcttttgtgaggattacaggaaagcacctgtcctggctctgtacctggcacgtagtaggtgctctgtgctcacacctcggctgcatgcaccctgctgtcttattgggagacaacaactgtcctccttggaacacccaagaaaccatgcaaagcagtggacaacacagaacacgccctcctcctcgctgcctgcagctccaatctgattctgcttgggaatgggcggagcacgtgggctgcttaactgctgtataggacaagccccttacccctctctgggcccatgaattcctggcttggtttatgttctgatttgacacactgattttaatcttcgaatcatgacactgagtgcagaggaggtggcattccgacagcaggacatacatgttggtgtgaagactgggacgacactgggtagaatctagtttttaattattattaatataaaggatcaaattaatttaaatatgattctgaagtctacagaacttttagttctgtgctgtctatgtggacactttggtaaaatgcaaattatgatatggacgttatcattggtctggtgagatgtttcatatttgtgacagttaatttaaaaattatgagttaatgctgcctgtgtctatggggttctgtcttctttgatagccatctattcatctggatcatgggaacctctctaatccttccaccaatcaaataagctattgctattggtttggagttgagatatcagtctcggaaacttctgaaaatgctaatattacccaagattatgtcaaatttaaaataatgtgttgtgtgtttcttt

SEQ ID NO: 19929 - DNA, 1364 bp, Homo Sapiens
  misc_feature (1125)..(1139): n is a, c, g, or t
gttcaggcttcgggggccagccgccgccatgatcctgctggaggtgaacaaccgcatcatcgaggagacgctcgcgctcaagttcgagaacgcggccgccggaaacaaaccggaagcagtagaagtaacatttgcagatttcgatggggtcctctatcatatttcaaatcctaatggagacaaaacaaaagtgatggtcagtatttctttgaaattctacaaggaacttcaggcacatggtgctgatgagttattaaagagggtgtacgggagtttcttggtaaatccagaatcaggatacaatgtctctttgctatatgaccttgaaaatcttccggcatccaaggattccattgtgcatcaagctggcatgttgaagcgaaattgttttgcctctgtctttgaaaaatacttccaattccaagaagagggcaaggaaggagagaacagggcagttatccattatagggatgatgagaccatgtatgttgagtctaaaaaggacagagtcacagtagtcttcagcacagtgtttaaggatgacgacgatgtggtcattggaaaggtgttcatgcaggagttcaaagaaggacgcagagccagccacacagccccacaggtcctctttagccacagggaacctcctctggagctgaaagacacagacgccgctgtgggtgacaacattggctacattacctttgtgctgttccctcgtcacaccaatgccagtgctcgagacaacaccatcaacctgatccacacgttccgggactacctgcactaccacatcaagtgctctaaggcctatattcacacacgtatgcgggcgaaaacgtctgacttcctcaaggtgctgaaccgcgcacgcccagatgccgagaaaaaagaaatgaaaacaatcacggggaagacgttttcatcccgctaatcttgggaataagaggaggaagcggctggcaactgaaggctggaacacttgctactggataatcgtagcttttaatgttgcgcctcttcaggttcttaagggattctccgttttggttccattttgtacacgtttggaaaataatctgcagaaacgagctgtgcttgcaaagacttcatagttcccaagaattnnnnnnnnnnnnnnngaattccacttgatcaacttaattccttttctttatcttccctccctcacttcccttttctcccaccctcttttccaagctgtttcgctttgcaatatattactggtaatgagttgcaggataatgcagtcataacttgttttctcctaagtatttgagttcaaaactcctgtatctaaagaaatacggttggggtcattaataaagaaaatctttccctcgtgc

SEQ ID NO: 19930 - DNA, 1688 bp, Homo Sapiens
ggtcacgccgagccagcgcctgggcctggaaccgggccgtagcccccccagtttcgcccaccacctccctaccatggacccccgcaaagtgaacgagcttcgggcctttgtgaaaatgtgtaagcaggatccgagcgttctgcacaccgaggaaatgcgcttcctgagggagtgggtggagagcatgggtggtaaagtaccacctgctactcagaaagctaaatcagaagaaaataccaaggaagaaaaacctgatagtaagaaggtggaggaagacttaaaggcagacgaaccatcaagtgaggaaagtgatctagaaattgataaagaaggtgtgattgaaccagacactgatgctcctcaagaaatgggagatgaaaatgcggagataacggaggagatgatggatcaggcaaatgataaaaaagtggctgctattgaagccctaaatgatggtgaactccagaaagccattgacttattcacagatgccatcaagctgaatcctcgcttggccattttgtatgccaagagggccagtgtcttcgtcaaattacagaagccaaatgctgccatccgagactgtgacagagccattgaaataaatcctgattcagctcagccttacaagtggcgggggaaagcacacagacttctaggccactgggaagaagcagcccatgatcttgcccttgcctgtaaattggattatgatgaagatgctagtgcaatgctgaaagaagttcaacctagggcacagaaaattgcagaacatcggagaaagtatgagcgaaaacgtgaagagcgagagatcaaagaaagaatagaacgagttaagaaggctcgagaagagcatgagagagcccagagggaggaagaagccagacgacagtcaggagctcagtatggctcttttccaggtggctttcctgggggaatgcctggtaattttcccggaggaatgcctggaatgggagggggcatgcctggaatggctggaatgcctggactcaatgaaattcttagtgatccagaggttcttgcagccatgcaggatccagaagttatggtggctttccaggatgtggctcagaacccagcaaatatgtcaaaataccagagcaacccaaaggttatgaatctcatcagtaaattgtcagccaaatttggaggtcaagcgtaatgtccttctgataaataaagcccttgctgaaggaaaagcaacctagatcaccttatggatgtcgcaataatacaaaccagtgtacctctgaccttctcatcaagagagctggggtgctttgaagataatccctacccctctcccccaaatgcagctgaagcattttacagtggtttgccattagggtattcattcagataatgttttcctactaggaattacaaactttaaacactttttaaatcttcaaaatatttaaaacaaatttaaagggcctgttaattcttatatttttctttactaatcattttggatttttttctttgaattattggcagggaatatacttatgtatggaagattactgctctgagtgaaataaaagttattagtgcgaggcaaacataactcatttgaggataaagtttgtgttgggatatgtggttcctgatgcattttgacttgtcttttaaatgctttatcttttttctttaaagatttattt

SEQ ID NO: 19931 - DNA, 1160 bp, Homo Sapiens
cgtccgcccctccccccgagcgccgctccggctgcaccgcgctcgctccgagtttcaggctcgtgctaagctagcgccgtcgtcgtctcccttcagtcgccatcatgattatctaccgggacctcatcagccacgatgagatgttctccgacatctacaagatccgggagatcgcggacgggttgtgcctggaggtggaggggaagatggtcagtaggacagaaggtaacattgatgactcgctcattggtggaaatgcctccgctgaaggccccgagggcgaaggtaccgaaagcacagtaatcactggtgtcgatattgtcatgaaccatcacctgcaggaaacaagtttcacaaaagaagcctacaagaagtacatcaaagattacatgaaatcaatcaaagggaaacttgaagaacagagaccagaaagagtaaaaccttttatgacaggggctgcagaacaaatcaagcacatccttgctaatttcaaaaactaccagttctttattggtgaaaacatgaatccagatggcatggttgctctattggactaccgtgaggatggtgtgaccccatatatgattttctttaaggatggtttagaaatggaaaaatgttaacaaatgtggcaattattttggatctatcacctgtcatcataactggcttctgcttgtcatccacacaacaccaggacttaagacaaatgggactgatgtcatcttgagctcttcatttattttgactgtgatttatttggagtggaggcattgtttttaagaaaaacatgtcatgtaggttgtctaaaaataaaatgcatttaaactcatttgagagaatgccttttagtttaatgcatatttaaactaaattgatcctgtagtgttcctggagaagctagagcctgattgtaggctactactcatcaattaacttctacagtggagactacttctgggactggaatataaaaaagaatcaaaggttctgattttgagttgcaataaagggaaagaccatgctcatagcagtgccaacatctgaagtgtggagccttacccatttcatcacctacaacggaagtagttaactggaagagattaccaagagaataaaaagagactcattcagtggaaccaacctcgtgcagcccgggg

SEQ ID NO: 19932 - DNA, 1138 bp, Homo Sapiens
  misc_feature (102)..(154): n is a, c, g, or t
gcacgaggctgagtctcacctgcagtctatcagcaatttgaatgagaaccaggcctcagaggaggaggatgagctgggggagcttcgggagctgggttatcnnnnnnnnnnnnnnnnnnnnnnnnnnnnnnnnnnnnnnnnnnnnnnnnnnnnngaggacagccaggctgaagtcctgaaggtcatcaggcagtctgctgggcaaaagacaacctgtggccagggtctggaagggccctgggagcgcccaccccctctggatgagtccgagagagatggaggctctgaggaccaagtggaagacccagcactaagtgagcctggggaggaacctcagcgcccttccccctctgagcctggcacataggcacccagcctgcatctcccaggaggaagtggaggggacatcgctgttccccagaaacccactctatcctcaccctgttttgtgctcttcccctcgcctgctagggctgcggcttctgacttctagaagactaaggctggtctgtgtttgcttgtttgcccacctttggctgatacccagagaacctgggcacttgctgcctgatgcccacccctgccagtcattcctccattcacccagcgggaggtgggatgtgagacagcccacattggaaaatccagaaaaccgggaacagggatttgcccttcacaattctactccccagatcctctcccctggacacaggagacccacagggcaggaccctaagatctggggaaaggaggtcctgagaaccttgaggtacccttagatccttttctacccactttcctatggaggattccaagtcaccacttctctcaccggcttctaccagggtccaggactaaggcgtttttctccatagcctcaacattttgggaatcttcccttaatcacccttgctcctcctgggtgcctggaagatggactggcagagacctctttgttgcgttttgtgctttgatgccaggaatgccgcctagtttatgtccccggtggggcacacagcggggggcgccaggttttccttgtcccccagctgctctgcccctttccccttcttccctgactccaggcctgaacccctcccgtgctgtaataaatctttgtaaataaaaaacctcgtgc

SEQ ID NO: 19933 - DNA, 844 bp, Homo Sapiens
gcacgaggcaggaaaaaactaggtgttgttttgttttgttattttggacaacataaaattcaggaatgttttatttagccttggtttctagaaggaagggaaataatatttcttgagcatttactagggtgttgcgtgctgtgctaagtaaattttaagtctttcagttttatagatacggaaaacaagggtgactctttaccacaggatgaataaagaactaagtaatatgggaaatgcagcaatttctggactagctgagccgattccttcctgtgagcacactgtaagctttcaagttctctgggcaggaattacagcacctgtcccctgcaatggccctgctgtgtgatgctcatcgcttcccttcgtgctggagcagtcccccaggtgtccatctcctatctttttgttccaatcttctgtgagttccagctagcaggctttacatctggggaaaggaaaaccaggggttttagctctgttctctgctcccatccttcgctcaccagctgagtgagaacatgaactttttgcaccatgtacccatggcttacactacttagaaaatcaccttttcagataaaacagtttatgagttcatagagaacaccagcactctttgacaaaactgtgagtgaccctttttaaacaatgctgagcaggccctgagctataatcaacggtgagctttaatgtctatgctgacagttaggttttgctctcttttgtaacaggttacgtagaccagcagtgtttaaatctaaatacgttgtgagtctgttatctgtcctatcgcgttttttaatgactttttattctttatcatagctaagtaaatacc

SEQ ID NO: 19934 - DNA, 1649 bp, Homo Sapiens
  misc_feature (1347)..(1373): n is a, c, g, or t
  misc_feature (1432)..(1441): n is a, c, g, or t
  misc_feature (1501)..(1512): n is a, c, g, or t
cgtccggttatatttgaaatcagtccaacagaagaagttggagacttcgaagtgaaagccaaattcatgggagttcaaatggagacttttatgttacattatcaggacctgctgcagctacagtatgaaggagttgcagtcatgaaattatttgatagagctaaagtaaatgtcaacctcctgatcttccttctcaacaaaaagttctacgggaagtaattgatcgtttgctgccagcccagaaggatgaaggaaagaagcacctcacagctcctttctaggtccttctttcctcattggaagcaaagacctagccaacaacagcacctcaatctgatacactcccgatgccacatttttaactcctctcgctctgatgggacatttgttacccttttttcatagtgaaattgtgtttcaggcttagtctgacctttctggtttcttcattttcttccattacttaggaaagagtggaaactccactaaaatttctctgtgttgttacagtcttagaggttgcagtactatattgtaagctttggtgtttgtttaattagcaatagggatggtaggattcaaatgtgtgtcatttagaaagtggaagctattagcaccaatgacataaatacatacaagacacacaactaaaatgtcatgttattaacagttattaattgtcatttaaaataaagttcctttatatttctgtcccatcaggaaaactgaaggatatggggaatcattggttatcttccattgtgtttttctttatggacaggagctaatggaagtgacagtcatgttcaaaggaagcatttctagaaaaaaggagataatgtttttaaatttcattatcaaacttgggcaattctgtttgtgtaactccccgactagtggatgggagagtcccattgctaaaattcagctactcagataaattcagaatgggtcaaggcacctgcctgtttttgttggtgcacagagattgacttgattcagagagacaattcactccatccctatggcagaggaatgggttagccctaatgtagaatgtcattgtttttaaaactgttttatatcttaagagtgccttattaaagtatagatgtatgtcttaaaatgtgggtgataggaattttaaagatttatataatgcatcaaaagccttagaataagaaaagctttttttaaattgctttatctgtatatctgaactcttgaaacttatagctaaaacactaggatttatctgcagtgttgcagggagataattctgccttaaattgtctaaaacaaaaacaaaaccagccaacctatgttacacgtgagattaaaaccaannnnnnnnnnnnnnnnnnnnnnnnnnnctcttgctgcccacattgtgcctttattttatgagccccagttttctgggcttagtttnnnnnnnnnntcaagtctaaacattgcatttagaaagcttttgttcttggataaaaagtcatacactttnnnnnnnnnnnnctttttccaggaacatatattgaaatcatgctgctgagcctctattttctttctttgatgttttgattcagtattcttttatcataaattttagcatttaaaattcactgatgtacattaagccaataaactgcttt

SEQ ID NO: 19935 - DNA, 939 bp, Homo Sapiens
  misc_feature (839)..(857): n is a, c, g, or t
acaaaagtgggtggctcactggtccggaggttatgtcttcggtgtctcagccctaaaagtccagttcccccgtgcggccagcttttccacataaggtgtttttgatttgattaccggaaaggactcttgattcttctcttttaaactgaatcccataggggaaatgaattttaaaatattgcccccggaggggttttccgtggctggattcctgcgagttgctttcagtcattcagggaaacagaaagacgttttccaacatgtagaactgctttttaactggaggaaaaatacttcaggaggcttagcatattgcttggattctacgtgcagcgggttctctgcctccgtgaagacaagctgggctggggaggacggtgtctaggagggatgaccccactcagctccaggcagtgttctgccgagaccccaagaactcggggtgtcagagggcaaaggaactacctgcctttcacggctgctgacttctcagggctgcaagcagcacagaatgttatccttacgtcctgagccggtttaagtctgtggaaaaggaagcacgggagaaatccacgtaacctttgctttctttttaagggaagcggttcccccgtgaacttggaaccctcagctccgggtgttctcggcagaagggcagctggaagggacccagtggggcaggctttggggttgctccctgttttgccccgaggccggggacgcagggcagcccacccctccgtgggctccattttgtagcattcccagcgtttttttcacgtttttaacaatcctttgcttttcctcactcacggggaaatgtgaactgtcccggttcnnnnnnnnnnnnnnnnnnnaacccttcgttcccctcctgaacggttgccccttatttaatgctgaaaagtgggactgttgttcaataacccggaccaatgc

SEQ ID NO: 19936 - DNA, 1452 bp, Homo Sapiens
gcacgaggcgggagcccgccggcggtggcgcggcggagacccggctgggccaaggagctactgcaaatgtctttcgtggaagacataagaaaactggtgatttatttgctatcaaagtatttaataacataagcttccttcgtccagtggatgttcaaatgagagaatttgaagtgttgaaaaaactcaatcacaaaaatattgtcaaattatttgctattgaagaggagacaacaacaagacataaagtacttattatggaattttgtccatgtgggagtttatacactgttttagaagaaccttctaatgcctatggactaccagaatctgaattcttaattgttttgcgagatgtggtgggtggaatgaatcatctacgagagaatggtatagtgcaccgtgatatcaagccaggaaatatcatgcgtgttataggggaagatggacagtctgtgtacaaactcacagattttggtgcagctagagaattagaagatgatgagcagtttgtttctctgtatggcacagaagaatatttgcactctgatatgtatgagagagcagtgctaagaaaagatcatcagaagaaatatggagcaacagttgatctttggagcattggggtaacattttactatgcagctactggatcactgccatttagaccctttgaagggcctcgtaggaataaagaagtgatgtataaaataattacaggaaagccttctggtgcaatatctggagtacagaaagcagaaaatggaccaattgactggagtggagacatgcctgtttcttgcagtctttctcggggtcttcaggttctacttacccctgttcttgcaaacatccttgaagcagatcaggaaaagtgttggggttttgaccagttttttgcagaaactagtgatatacttcaccgaatggtaattcatgttttttcgctacaacaaatgacagctcataagatttatatacatagctataatactgctactatatttcatgaactggtatataaacaaaccaaaattatttcttcaaatcaagaacttatctacgaagggcgacgcttagtcttagaacctggaaggctggcacaacatttccctaaaactactgaggaaaaccctatatttgtagtaagccgggaacctctgaataccataggattaatatatgaaaaaatttccctccctaaagtacatccacgttatgatttagacggggatgctagcatggctaaggcaataacaggggttgtgtgttatgcctgcagaattgccagtaccttactgctttatcaggaattaatgcgaaaggggatacgatggctgattgaattaattaaagatgattacaatgaaactgttcacaaaagacagaagttgtgatcacttggatttctgtatcagaaacattgaaaaaaactgtgaaagtatatgaaaa

SEQ ID NO: 19937 - DNA, 1378 bp, Homo Sapiens
  misc_feature (1234)..(1242): n is a, c, g, or t
gcacgaggccctatccagagtttttggagctgtacaggaaaacgctgccgcggtccacagtgtcgattctggatgaccacattagccactatccacagctagaggatcccatgggcttcttgaatgcatatatgggcttcatcaactccttctgagctggaaagagtagcttccctgtattacctcccctactcccttatctgttgtgtattccacttaggaagaaatgcccaaaagaggtcctggccatcaaacataattctctcacaaagtccactttactcaaattggtgaacagtgtataggaagaagccagcaggagctctgactaaggttgacataatagtccacctcccattactttgatatctgatcaaatgtatagacttggctttgttttttgtgctattaggaaattctgatgagcattactattcactgatgcagaaagacgttcttttgcataaaagactttttttaacactttggacttctctgaaatatttagaagtgctaatttctggcccacccccaacaggaattctatagtaaggaggaggagaaggggggctccttccctctcctcgaatgacgttatgggcacatgccttttaaaagttctttaagcaacacagagctgagtcctctttgtcatacctttggatttagtgtttcatcagctgtttttagttataaacattttgttaaaatagatattggtttaaatgatacagtattttaggtatgatttaagactatgatttacctatacattatatatattttataaagatactaaaccagcatacccttactctgccagagtagtgaagctaattaaacacgtttggtttctgaataaattgaactaaatccaaactatttcctaaaatcacaggacattaaggaccaatagcatctgtgccagagatgtactgttattagctgggaagaccaattctaacagcaaataacagtctgagactcctcatacctcagtggttagaagcatgtctctcttgagctacagtagaggggaagggattgttgtgtagtcaagtcaccatgctgaatgtacactgattcctttatgatgactgcttaactccccactgcctgtcccagagaggctttccaatgtagctcagtaattcctgttactttacagacaggaaagttccagaaactttaagaacaaactctgaaagactatgagcaaatggtgctgaatacnnnnnnnnnaaagccacatttcattgtcttagtcaagcagattattaagtgattatttaaattccgttttttaaattagcaacttcagtatacaactttgaaactggaataagtgtttattttctattaataaaaatgaattgtg

SEQ ID NO: 19938 - DNA, 665 bp, Homo Sapiens
gcggccgctctaccccttttttaggatcccccgggctgcaggaattcggcacgaggccagattaggatgctgtggatccttggccgactacctgacctctgcaaaattccttctctaccttggtcattctctctctacttggggagatcggatgtggcactttgcggtgtctgtgtttctggtagagctctatggaaacagcctccttttgacagcagtctacgggctggtggtggcagggtctgttctggtcctgggagccatcatcggtgactgggtggacaagaatgctagacttaaagtggcccagacctcgctggtggtacagaatgtttcagtcatcctgtgtggaatcatcctgatgatggttttcttacataaacatgagcttctgaccatgtaccatggatgggttctcacttcctgctatatcctgatcatcactattgcaaatattgcaaatttggccagtactgctactgcaatcacaatccaaagggattggattgttgttgttgcaggagaagacagaagcaaactagcaaatatgaatgccacaatacgaaggattgaccagttaaccaacatcttagcccccatggctgttggccagattatgacatttggctccccagtcatcggctgtggctttatttcgggatgga

SEQ ID NO: 19939 - DNA, 1581 bp, Homo Sapiens
  misc_feature (1522)..(1535): n is a, c, g, or t
gcacgaggcttaattcagtctcagctgctgaaatttggaaaggaccaaattgctttacagtttttttctttgtgtagtatcttgaaatcctggaaaattctatggaatagttctgtatatagggcacaagtaaaggcattgtccaaagtttatttatttatttattaccctaagaatgctttgccataaccacatttaatgggaaaaacggcagtatcacagatgtaaattaactcaccagatttactgggcctgaactcattctcttcttgctatatgatttagcaagttctagaaggtctccaagacaataattacattggcacaatgtatacttcagtgctcacccgtaggcaaatctctttttaaaaaactctttggtgcacaagtaacacatttggccacaaaacaccaaagaattgtaggcagtggcccctattgagaagttttccggtagagttggaaatcagttgtgaatacattctttgctagttggagtgcttgtttactaagcatgtgccgtcgtaggtattagtgctagtctcaaataggtgcttcccctgaggtgcaggggaagaccaaagtttgcaactcgaactgctttcgtccatgtttctcacattgctgtattttagaaaataggggttaagactgataacaaccttttacattgtgactgtgtttgcattgtctaatgacagataaatccttaacatttctctccaccttagtactttagactaattgtgtttgtccgtccatgccatgaatgagtgggctgtagttgggcctaaataaatgagctgttggaagaaaagaatcacagtactttccagcagtcagtccctggttcctagatgtgttctaagcaatgcaaatgtctaattgtcccccagtgggcatagtcagtgtcgtttatattgtagcagttacagctctgtagtttatgatgcaaatctgccaagagagatgtatgtgtcactgcatggcttctgaaagcaggatgaattttctgcagctgtttcaaagttggggtctgttcttgaatcctctattaattactgtgtgtgagccagagggagctgtggtaagggttgggcccccagcctgtagggaactttctggactcccactctttgaatcgatataggcatttggtctcactacttgaccattctcaccctgtgaaacgtcccacactttgaagcaaatacaattcacagcacagtacacacaaaaaccttggcataagacagagaaggttcttcttattttgtgggctggttgctgtagaaacacataacaaagggcagccctccacttctggtataattgtgtagccccttttctttgggcttgacacctgtcttgaataagagtgattagagctgcataatgtccctctcttggctattgaccatgtggttcacgtacaaaactctgtataagttgaaggaaaatgttcatgttcatatgtacttgtttgctatgactacattttgaggttttgtaaaactgttannnnnnnnnnnnnncacaatgtgaaactgaaggtcaataaattattagagattttctctt

SEQ ID NO: 19940 - DNA, 1463 bp, Homo Sapiens
  misc_feature (586)..(608): n is a, c, g, or t
gcacgaggcatcctatttacaaagagcccataatctctgtcagtctgctgtttgcaggcgtcattgctgctagaatcggtctttggtcctttgatttaactgtgacacagttgctgcaagaaaatgtaattgaatctgaaagaggcattataaatggtgtacagaactccatgaactatcttcttgatcttctgcatttcatcatggtcatcctggctccaaatcctgaagcttttggcttgctcgtattgatttcagtctcctttgtggcaatgggccacattatgtatttccgatttgcccaaaatactctgggaaacaagctctttgcttgcggtcctgatgcaaaagaagttaggaaggaaaatcaagcaaatacatctgttgtttgagacagtttaactgttgctatcctgttactagattatatagagcacatgtgcttattttgtactgcagaattccaataaatggctgggtgttttgctctgtttttaccacagctgtgccttgagaactaaaagctgtttaggaaacctaagtcagcagaaattaactgattaatttcccttatgttgaggcatgnnnnnnnnnnnnnnnnnnnnnnnctcagtttaaatacggagactataatgataacactgaattcccctatttctcatgagtagatacaatcttacgtaaaagagtggttagtcacgtgaattcagttatcatttgacagattcttatctgtactagaattcagatatgtcagttttctgcaaaactcactcttgttcaagactagctaatttatttttttgcatcttagttatttttaaaaacaaattcttcaagtatgaagactaaattttgataactaatattatccttattgatcctattgatcttaaggtatttacatgtatgtggaaaaacaaaacacttaactagaattctctaataaggtttatggtttagcttaaagagcacctttgtatttttattatcagatggggcaacatattgtatgaagcatatgtagcacttcacagcatggttatcatgtaagctgcaggtagaagcaaagctgtaaagtagatttatcacacaatgactgcatacagacttcaaatatgtcaatagtttggtcatagaacctagaagccaaaagccacacagaagggcaagaatcccaatttaactcatgttatcatcattagtgatctgtgttgtagaacatgagggtgtaagccttcagcctggcaagttacatgtagaaagcccacacttgtgaaggttttgttttacaaatcacttgatttaacacactcaggtagaatatttttatttttactgttttatacccagaagttatttctacattgttctacagcaagaatattcataaaagtatccctttcaaatgcctttgagaagaatagaagaaaaaaagtttgtatatattttaaaaattgttt

SEQ ID NO: 19941 - DNA, 1344 bp, Homo Sapiens
gcacgaggctcactccgagttcctaaaagcagccagcaacttgagggataactaccgatttgcacatacgaatgttgagtctctggtgaacgagtatgatgataatggagagggtatcatcttatttcgtccttcacatctcactaacaagtttgaggacaagactgtggcatatacagagcaaaaaatgaccagtggcaaaattaaaaagtttatccaggaaaacatttttggtatctgccctcacatgacagaagacaataaagatttgatacagggcaaggacttacttattgcttactatgatgtggactatgaaaagaacgctaaaggttccaactactggagaaacagggtaatgatggtggcaaagaaattcctggatgctgggcacaaactcaactttgctgtagctagccgcaaaacctttagccatgaactttctgattttggcttggagagcactgctggagagattcctgttgttgctatcagaactgctaaaggagagaagtttgtcatgcaggaggagttctcgcgtgatgggaaggctctggagaggttcctgcaggattactttgatggcaatctgaagagatacctgaagtctgaacctatcccagagagcaatgatgggcctgtgaaggtagtggtagcagagaattttgatgaaatagtgaataatgaaaataaagatgtgctgattgaattttatgccccttggtgtggtcattgtaagaacctggagcccaagtataaagaacttggcgagaagctcagcaaagacccgaatatcgtcatagccaagatggatgccacagccaatgatgtgccttctccatatgaagtcagaggttttcctaccatatacttctctccagccaacaagaagctaaatccaaagaaatatgaaggtggccgtgaattaagtgattttattagctatctacaaagagaagctacaaacccccctgtaattcaagaagaaaaacccagaagaagaagaaggcacaggaggatctctaaagcagtagccaaacaccactttgtaaaaggactcttccatcagagatgggaaaaccattggggaggactaggacccatatgggaattattacctctcgggccgagaggacagaatggatataatctgaatcctgttaaattttctctaaactgtttcttagctgcactgtttatggaaataccaggaccagtttatgtttgtggttttgggaaaaattatttgtgttgggggaaatgttgtgggggtggggttgagttgggggtattttctaattttttttgtacatttggaacagtgacaataaatgagaccccttt

SEQ ID NO: 19942 - DNA, 1006 bp, Homo Sapiens
  misc_feature (912)..(942): n is a, c, g, or t
gcacgagggaaacctcttggtgaatcaaaacctgtgctgcaaggtgtctgactttggcctgactcgcctcctggatgactttgatggcacatacgaaacccagggaggaaagatccctatccgttggacagcccctgaagccattgcccatcggatcttcaccacagccagcgatgtgtggagctttgggattgtgatgtgggaggtgctgagctttggggacaagccttatggggagatgagcaatcaggaggttatgaagagcattgaggatgggtaccggttgccccctcctgtggactgccctgcccctctgtatgagctcatgaagaactgctgggcatatgaccgtgcccgccggccacacttccagaagcttcaggcacatctggagcaactgcttgccaacccccactccctgcggaccattgccaactttgaccccaggatgactcttcgcctgcccagcctgagtggctcagatgggatcccatatcgaaccgtctctgagtggctcgagtccatacgcatgaaacgctacatcctgcacttccactcggctgggctggacaccatggagtgtgtgctggagctgaccgctgaggacctgacgcagatgggaatcacactgcccgggcaccagaagcgcattctttgcagtattcagggattcaaggactgatccctcctctcaccccatgcccaatcagggtgcaaggagcaaggacggggccaaggtcgctcatggtcactccctgcgccccttcccacaacctgccagactaggctatcggtgctgcttctgcccactttcaggagaaccctgctctgcaccccagaaaacctctttgttttaaaagggaggtgggggtagaagtaaaaggatgatcatgggagggagctgaggggttnnnnnnnnnnnnnnnnnnnnnnnnnnnnnnnttttgtaaataaacaggaactgattttctgcctccatcccacccatgagggctgcaggcactac

SEQ ID NO: 19943 - DNA, 1176 bp, Homo Sapiens
  misc_feature (871)..(904): n is a, c, g, or t
gcacgaggcacactttcatctaatttggggtatcactgagctgaagacaaagagaagggggagaaaacctagcagaccaccatgtgctatgggaagtgtgcacgatgcatcggacattctctggtggggctcgccctcctgtgcatcgcggctaatattttgctttactttcccaatggggaaacaaagtatgcctccgaaaaccacctcagccgcttcgtgtggttcttttctggcatcgtaggaggtggcctgctgatgctcctgccagcatttgtcttcattgggctggaacaggatgactgctgtggctgctgtggccatgaaaactgtggcaaacgatgtgcgatgctttcttctgtattggctgctctcattggaattgcaggatctggctactgtgtcattgtggcagcccttggcttagcagaaggaccactatgtcttgattccctcggccagtggaactacacctttgccagcaccgagggccagtaccttctggatacctccacatggtccgagtgcactgaacccaagcacattgtggaatggaatgtatctctgttttctatcctcttggctcttggtggaattgaattcatcttgtgtcttattcaagtaataaatggagtgcttggaggcatatgtggcttttgctgctctcaccaacagcaatatgactgctaaaagaaccaacccaggacagagccacaatcttcctctatttcattgtaatttatatatttcacttgtattcatttgtaaaactttgtattagtgtaacatactccccacagtctacttttacaaacgcctgtaaagactggcatcttcacaggatgtcagtgtttaaatttagtaaacttcnnnnnnnnnnnnnnnnnnnnnnnnnnnnnnnnnnaaggaatgaggaaacaaaccactctctgggggtagtttacagactgagtgacagtactcagtatatctgagataaactctataatgttttggataaaaataacattccaatcactattgtatatatgtgcatgtattttttaattaaagatgtctagttgctttttataagaccaagaagggagaaatccgacaccctgtaagatttttgttttcactgcttgtatgatgtttcccattcatacacctataatctctaacaagaggcccttt

SEQ ID NO: 19944 - DNA, 1272 bp, Homo Sapiens
  misc_feature (1103)..(1123): n is a, c, g, or t
tgaagaagtagtcaggaaaaagcgtcttggtcgcaggccggggaacatcttaaaagcaaacttctagcctgctgactcttggcaatgagtgttggatcctggctaaagtgccttgaatgcagcatgaggccaatccatgaatccaacttctcatggagaaatgttaatattttttcagtttgaatcaatcagggtgaaactaccatgctattggtttgcttactttttattatttcatgtaaaatctaagacaaaatacattaaatgcttattgacatatgtatttattcttcaccaggctgataatatctgcctaattttaaactttcttccattttgtaggtttcaacttattctattgtaagatactgttaaatctaatagaggcattgtcacttttacgtataattttattttatttcatatatttcctattggctttttacatttaaattatggagcacttcatcatataaaaaacttcaattatatttaaacagtaagtctttggatttttttgccttgtaatttccatattacataataatgagataaacattaatgttttcagggtactttaaattttagataattactcattgtattcatgtgaaatttgtttttactgcatgtgtgggttggaggactgttttcacttctgattcatctttactcttatctcatcagagctcatacctcttgtagttgggggattgcagtttataattccaataaatggggcaaattcaataataacataatacaaatgagtttgaatgcaggacaggtcttcaaagcatacacaacatgggcctacatatgtacaacaataataatttataagttactgtttggatggaaagtaaaagtacagaaaatttgttaaaggaaattaaaatggagatcatgtctcaataatctctgagcagacaaaattagttaggtctcataagtgatctcaacctcgcttgatttgcaaatacaaacaaaacttacattatttcttgtagctgcatattgaaaaaagagaaatgaagctcaaccagtcagaagtagccaacaaccttatataaatagaaactgtccaacaaggtaaacagacnnnnnnnnnnnnnnnnnnnnngttgtgctaccaccaaatgatttctttgtttctacatttttcaaataaatacttgcttcttacactgtccatgaagcactcaatatctttccgtctgatattttataatttatcaattgctcttactcaaataaacactttgaaatttc

SEQ ID NO: 19945 - DNA, 1180 bp, Homo Sapiens
cgcctggagtccgacgtggaagttgctggctgactgggcttgcgaggaaaccgcctcggagctgcagccgaaggccaaggaatcactgaagatcggcgagggaggacagggggttcatcatgggtggctttttctcaagtatattttccagtctgtttggaactcgggaaatgagaattttaattttgggattagatggagcaggaaaaaccacaattttgtacagattacaagtgggagaagttgttactactatacctaccattggatttaatgtagagacggtgacgtacaaaaaccttaaattccaagtctgggatttaggaggacagacaagtatcaggccatactggagatgttactattcaaacacagatgcagtcatttatgtagtagacagttgtgaccgagaccgaattggcatttccaaatcagagttagttgccatgttggaggaagaagagctgagaaaagccattttagtggtgtttgcaaataaacaggacatggaacaggccatgacttcctcagagatggcaaattcacttgggttacctgccttgaaggaccgaaaatggcagatattcaaaacgtcagcaaccaaaggcaccggccttgatgaggcaatggaatggttagttgaaacattaaaaagcagacagtaattcagtccattcttctcccctgaaatgaagactacatcacctctctccctttggaaacagtcaagtgtacttcacactactagatgttaaaactatatgattattggcatatactgactgactgcaatatttgtagtaaatagggaaaataagtatttagttggagggataatttgatcgaatcacctgaatgttctatgtaatgtaaaatattcttttcttgctttcttgtgttaaggtatatattctatttgtatggaattcttattcaaatacagttctattaaagagtatactcctattggatgaaaaaaacctatttttgaatagtagttgcagcttgtttgtataaatactaaaaaatatcttaacagatttttttccccttaaaatgaattatctttccaaagattagactcagtatgagagtaggtgaggaacatagttgtgtaatataatctttatttgcttacctgaccacttttattaagctgttttgttaaaagcttttggtt

SEQ ID NO: 19946 - DNA, 891 bp, Homo Sapiens
  misc_feature (548)..(557): n is a, c, g, or t
tcccccgggctgcaggctttcatctgaccatccatatccaatgttctcatttaaacattacccagcatcattgtttataatcagaaactctggtccttctgtctggtggcacttagagtcttttgtgccataatgcagcagtatggagggaggattttatggagaaatggggatagtcttcatgaccacaaataaataaaggaaaactaagctgcattgtgggttttgaaaaggttattatacttcttaacaattctttttttcagggacttttctagctgtatgactgttacttgaccttctttgaaaagcattcccaaaatgctctattttagatagattaacattaaccaacataattttttttagatcgagtcagcataaatttctaagtcagcctctagtcgtggttcatctctttcacctgcattttatttggtgtttgtctgaagaaaggaaagaggaaagcaaatacgaattgtactatttgtaccaaatctttgggattcattggcaaataatttcagtgtggtgtattattaaatagnnnnnnnnnnttttgtttcctaggttgaaggtctaattgatacgtttgacttatgatgaccatttatgcactttcaaatgaatttgctttcaaaataaatgaagagcagctgtccttctttcctcttttaagtgttcagctgtggcatgctcagaggttcctgctggattccagctggagcggtgtgatacccttctttttcagctgttcgtgcctgcctttcttgtatccaccaaagtggagacaaatacatgatctcaaagatacacagtacctacttaattccagctgatgggagaccaaagaatttgcaagtgatggtttggtatcactgttaataaaaa

SEQ ID NO: 19947 - DNA, 919 bp, Homo Sapiens
gcacgaggataaaataacaaaaatttatgaatagatctgtttattgtactgtgaaaagggtcttggtacatgaaacattatatactttgaggacagcattcagaactgttaagacaaaagacaaactataattttaaactcaatcttgatttaagggaaaggctataaattattggctgaaaagtattcagcatgaactcagattctatataagcatgaaagagtacaaaagatgttggagtccagtaagcccatacctaaattaactgtaaagcttcaaggactttttgtttatttttatatactagttttcttctgtgacaagttgattttatctccaagacttaaggccattccctggctctttgcacgaattcttatatggccggtaacagcagcatctggtccctggtgaattggcttctcaatgctgacatttgcaagtgcatcttcaccaaatatggaacgagcataaaggttggctgccataaagccacagtaaccagaaagggccttttctggagtcaggcatttcatattggttgactttaatatgtgctgtaagtagtcatttaaatcaaccatgttggtgttaactgtcactttgttttcccattcaaattcggcccacatctgacggaattctgcatcagtgcaagttgcaggctggatatagtccatgatgtcgatgtgaatatcactgagaaccacacaatttctgtcacttgctgctccagagacatcataaactatattaccaaaaattattccattttctgttgatgctactttgacgttagctttaatatttgcgaagtcatgaggagcaagagtcaaaggagacggcttttccacaagtttcagatcccctagtgtagctagttctaatgtgcattctgcaaagtatcactggtttggt

SEQ ID NO: 19948 - DNA, 320 bp, Homo Sapiens
gcacgaggatttgactgtaatgtgctatgtacggtaaatggctttatgtactatgtactgttaagggtgggtaggtttgttggtatcctagtgggtgaggggtggctttggagttgcagttgatgtgtgatagttgagggttgattgctgtacttgcttgtaagcatggggagggggttttgatgtggattgggtttttatgtactacaggtggtcaagtatttatggtaccgtacaatattcatggtggctggcagtaatgtacgaaatacatagcggttgttgatgggtgagtcaatacttgggtggtacccaaatct

SEQ ID NO: 19949 - DNA, 1767 bp, Homo Sapiens
  misc_feature (1716)..(1727): n is a, c, g, or t
cccacgcgtccgcgctccttctaggatctccgcctggttcggcccgcctgcctccactcctgcctctaccatgtccatcagggtgacccagaagtcctacaaggtgtccacctctggcccccgggccttcagcagccgctcctacacgagtgggcccggttcccgcatcagctcctcgagcttctcccgagtgggcagcagcaactttcgcggtggcctgggcggcggctatggtggggccagcggcatgggaggcatcaccgcagttacggtcaaccagagcctgctgagcccccttgtcctggaggtggaccccaacatccaggccgtgcgcacccaggagaaggagcagatcaagaccctcaacaacaagtttgcctccttcatagacaaggtacggttcctggagcagcagaacaagatgctggagaccaagtggagcctcctgcagcagcagaagacggctcgaagcaacatggacaacatgttcgagagctacatcaacaaccttaggcggcagctggagactctgggccaggagaagctgaagctggaggcggagcttggcaacatgcaggggctggtggaggacttcaagaacaagtatgaggatgagatcaataagcgtacagagatggagaacgaatttgtcctcatcaagaaggatgtggatgaagcttacatgaacaaggtagagctggagtctcgcctggaagggctgaccgacgagatcaacttcctcaggcagctgtatgaagaggagatccgggagctgcagtcccagatctcggacacatctgtggtgctgtccatggacaacagccgctccctggacatggacagcatcattgctgaggtcaaggcacagtacgaggatattgccaaccgcagccgggctgaggctgagagcatgtaccagatcaagtatgaggagctgcagagcctggctgggaagcacggggatgacctgcggcgcacaaagactgagatctctgagatgaaccggaacatcagccggctccaggctgagattgagggcctcaaaggccagagggcttccctggaggccgccattgcagatgccgagcagcgtggagagctggccattaaggatgccaacgccaagttgtccgagctggaggccgccctgcagcgggccaagcaggacatggcgcggcagctgcgtgagtaccaggagctgatgaacgtcaagctggccctggacatcgagatcgccacctacaggaagctgctggagggcgaggagagccggctggagtctgggatgcagaacatgagtattcatacgaagaccaccagcggctatgcaggtggtctgagctcggcctatgggggcctcacaagccccggcctcagctacagcctgggctccagctttggctctggcgcgggctccagctccttcagccgcaccagctcctccagggccgtggttgtgaagaagatcgagacacgtgatgggaagctggtgtctgagtcctctgacgtcctgcccaagtgaacagctgcggcagcccctcccagcctacccctcctgcgctgccccagagcctgggaaggaggccgctatgcagggtagcactgggaacaggagacccacctgaggctcagccctagccctcagcccacctggggagtttactacctggggaccccccttgcccatgcctccagctacaaaacaattcaattgcnnnnnnnnnnnnggtccaaaataaaacctcagctaaagtctgcccctcgtgc

SEQ ID NO: 19950 - DNA, 840 bp, Homo Sapiens
  misc_feature (483)..(531): n is a, c, g, or t
gagctctagcacatttattgggagagtaagcctgggaaagactaagggagtggtggcagggagaaaggctgtggggaatcagagcgggtgctcagttgggtcttgaaggagaagaggaggagggtgggaggtgggttgccgaggatatctggttgaagacttgggggtcaagacaaagggacttagggggatggggtctggttagagttggggagggggcctaggacatccgtgcagagtctggggaggttggggtgggagagtctgtacagtttggtgttgggtgttctagttggcctggtgtccaagagttggggcagtcgaaaaagggttccagagtctggtgtggctggctggggtttcacggcagaaaatgggctggagggggcagttgtagactgtctggttgcaggggaaggatcgggtcttgggaaccaggcctggatggtctggagtgggaggtctgtgcagtccaggacgttnnnnnnnnnnnnnnnnnnnnnnnnnnnnnnnnnnnnnnnnnnnnnnnnngtctacaccataatttggtgtcaaaatagggaagggatggaaatgtagtacccggatgtctttgtagaggactcagaaggaagtagaggaggggtcttaagtggggctatatgccaagaaagtgggtcggtggggctgagactgtcggctgagggttagggtagtgctggtagggtctggaagccggggagttgtcggtgtggggtcggaaagctggagggggtgtgagagcgagggtgtcagtggaagggtctatgttatcaaggcagtgtccaggatggaggtcagggcagaatccaggcctcgtgc

SEQ ID NO: 19951 - DNA, 1238 bp, Homo Sapiens
  misc_feature (533)..(542): n is a, c, g, or t
  misc_feature (859)..(875): n is a, c, g, or t
gcacgaggccacagcttcccccagagcgaagaggctgtagtcatgtccccatcccccactggattccctacaaggagaggccttgggcccagatgagccagtacagactccagacagaggggcccttggggccctccaacctcaggtgatgagctgagaaagatgttcacgtctaagcgtccagtgtgcacccagcgctccatagacgcctttgtgaactgaaaagagactggcagagtcccgagaagatggggccctggctttccagggagtgcagcaagcagccggcctgcagacccagcctgaccaacgatgagcatttcttaggctcagctcttgatacggaaacgagtgtcttcactccagccagcatcatggtcttcggtgcttcccgggcccggggtctgtcgggagggaagagaactgggcctgacctacctgaactgactggccctccgaggtgggtctgggacatcctagaggccctacatttgtccttggataggggaccggggggggcttggaatgttgcnnnnnnnnnngttacccaagggatgtcagttttttatccctctgcatgggttggattttccaaaatcataatttgcagaaggaaggccagcatttacgatgcaatatgtaattatatatagggtggccacactagggcggggtccttcccccctcacagctttggcccctttcagagattagaaactgggttagaggattgcagaagacgagtggggggagggcagggaagatgcctgtcgggtttttagcacagttcatttcactgggattttgaagcatttctgtctgaacacaaagcctgttctagtcctggcggaacacactnnnnnnnnnnnnnnnnnaagatgcggtaatgaaaccggttagtcaattttgtcttaatattgttgacaattctgtaaagttcctttttatgaatatttctgtttaagctatttcacctttcttttgaaatccttcccttttaaggagaaaatgtgacacttgtgaaaaagcttgtaagaaagcccctcccttttttctttaaacctttaaatgacaaatctaggattaaggttgtgaatttttatttttgctttgtttttaatgaacatttgtctttcagaataggattgtgtgataatgtttaaatggcaaaaacaaaacatgattttgtgcaattaacaaagctactgcaagaaaaataaaacacttcttggtaacac

SEQ ID NO: 19952 - DNA, 789 bp, Homo Sapiens
gtaggtcaattcgtaacagtttattttggacacaccctgaagcttttgttttgaattaagaaatgagtttcaggaattgacaaaccatttgttaaccagctgtcctgggctattgaagaagatttcattttccgcgcatccacttgttgcagtccaagtcctctagtgcaacgccatagcaaatataaagatttactatgcacgtgatacattttatggagtgcctcaagccaagatagtgaatttatatgaagggtgtgaaatgtatttctttactactatagtagtttagttataactttgcatctataattgagctttctcatctgtcaaatgctatggttttcttaaaatgttacaattctagatctatccaccttgtttttttattgtctacaaaccattaaatgtaaatattgtttttagagtcagtcattggctttgtcatttaccctttgagagttccacaagtggtagtagagtggtttaacgtctttcctctagtactaccagtattcataaatgtataccccttactgtaatttgttcctcttagaagtcagatcatctgatttatagaggattatgaaaaccagagtttttgaaaaggcttattttatacatacgtattatatagagaaacaaatgtttttattaaatgtttcattgacccaagtaatttaaaagtaatatgttacctatgtctttcaggaaaaataattatagcagctgatctgtaaatgactttaaaagctattttagtaatttaaataaatttactttcttggt

SEQ ID NO: 19953 - DNA, 2032 bp, Homo Sapiens
  misc_feature (830)..(884): n is a, c, g, or t
  misc_feature (910)..(918): n is a, c, g, or t
gcacgaggaacagacattgcaagtcaaaattgttgtcaaatttacatatggtaaatgatgaactttaaaaatgtgtccaggtgttagatgagttcattagactcttttaatgctaatggctagtacgtttaaacaaaacagcagttctctgctgcaatattcccattgaccacttaaatgaccataagtggtcatttaagaacatgttagggttagccctgatctgaatataaaagtgagaaaagggctacagtgcatttcttggtaacttaaactgagtcttgaagttataatgatccattcgagttctgtgatccttattgttcttaattgtgtttctctacgtattgttacagatgagccatacgtttctttgtatcaatgtagacatgacttcagatacctctgaggacctacccagcagtctaggaccctgggccaagtgctgggactatggtactaaatccagtagatgggctgtgtagcaactctcccagggaacacactagggtacttagggaggtgctttgtggagcatgttgaagctttgagatctgagcaggaggcagtgatgtccctggtctattcagggaaagatttcagtgtgaaatggtaaacatccaattgacaggatttagattttgcttagtttttctgctttttaatgtttctatcccccatctcagtgttttctttatccatcccagtgatgccttatttgaaactgggcttaaactgcaaaaagaatgaagttggatttaggaagctgttagatcattgagtggtgttgagagtgaagtttcactagcagggaagtttccttgagcctnnnnnnnnnnnnnnnnnnnnnnnnnnnnnnnnnnnnnnnnnnnnnnnnnnnnnnngctgttaggctcctaattcgtggggnnnnnnnnngtaaaaacagtttagataatcctgaatgcaatcattaacttggttgctaattacaagaatgaaaattataatggaaaaggacaaaataatataccagctggtttgttattatagtccgtgtattaaaatactattgaaatacgttaaaggtaaatttttaaggtttaaaaaaaatttagtaacttacagggatggagaatttagatgtcagaggtggggagatttatttttataaggtaatttttatcctgataaggacttaaaaaaaagttttgcaactgaaattttaaagtaaacatgttaagtacagttaaaaagtaagcattgtagtaaatagtggattctctggtgtgtattttttatctcagtgttgaaaattggaaaagaatggactgaagtctaaaaactggaataatgaaggacactaaatgcctttattgtagatactatgtttgtaagtctatagctaagcaacttaagccaaaaaggtctttcaactgaagctttaatcaacttattttggagatgttctcttcccttatctcatgcgtcatccctaaaataataagatacatgggatcaaatagcccttgccttttcaacacaaatcagttggaaaattatggtttgagtcctgttgctgccatggcttctgtttctcagaaatgagtgtgtatgaacataccaatctatgtaataggctacctttttttgtcttctttggaactttgtacacaaaccaagacaatatcagggtgacaggtgaatgaacttaaattctcagtcttgtctattcaccaaaaaagtatactgcctgttttttctttaattattcaaggttgatgacttttaggaacatgttttatactgtattttttaattaaagcaagtgccttgatgtaattccatgtaaatcattgcttaaccctcttatgggatgaggatgagttattaatgtattgcagcctactggaaaggagggggagttggttaatagcagatacttttcttctagaagcttatgttttatgctgtttattatgtaagatcctgtatgtgtgttgagatttagaggtttcatttgttttgtctgctaataaattgttactctaat

SEQ ID NO: 19954 - DNA, 1139 bp, Homo Sapiens
gcacgaggcgtcaacgtggtcaccacgctcgtgctcatctcctactgtcccacggccaccgaagaggcaccatactggacataccttttatgtgcactgggactttttatttaccagtcactggatgctattgatgggaaacaagccagaagaacaaactcttgttcccctttaggggagctctttgaccatggctgtgactctctttccacagtatttatggcagtgggagcttcaattgccgctcgcttaggaacttatcctgactggttttttttctgctcttttattgggatgtttgtgttttattgcgctcattggcagacttatgtttcaggcatgttgagatttggaaaagtggatgtaactgaaattcagatagctttagtgattgtctttgtgttgtctgcatttggaggagcaacaatgtgggactatacgattcctattctagaaataaaattgaagatccttccagttcttggatttctaggtggagtaatattttcctgttcaaattatttccatgttatcctccatggtggtgttggcaagaatggatccactatagcaggcaccagtgtcttgtcacctggactccacataggactaattattatactggcaataatgatctataaaaagtcagcaactgatgtgtttgaaaagcatccttgtctttatatcctaatgtttggatgtgtctttgctaaagtctcacaaaaattagtggtagctcacatgaccaaaagtgaactatatcttcagacactgtctttttggggccaggtcttttgtttttagaccagtactttaataacttatagacgaatatgttgttctatggatggcaatggtgatttcttcatttgatatggtgatatactttagtgctttgtgcctgcaaatttcaagacaccttcatctaaatatattcaagactgcatgtcatcaagcacctgaacaggttcaagttctttcttcaaagagtcatcagaataacatggattgaagagacttccgaacacttgctatctcttgctgctgctgtttcatggaaggagatattaaacatttgtttaatttttatttaagtgttatacctatttcagcaaataaaatatttcattgcttatatt

SEQ ID NO: 19955 - DNA, 1013 bp, Homo Sapiens
  misc_feature (576)..(584): n is a, c, g, or t
gcacgaggcttaactcgatgtttggaaatggatgtggaaaaaaggggttcagccaaagaattattacagcatcctttcctgaaactggccaaaccgttatctagcttgacaccactgatcatggcagctaaagaagcaatgaagagtaaccgttaacatcactgctgtggcctcatactcttttttccattttctacaagaagccttttagtatatgaaaattattactctttttggggtttaaagaaatggtctgcataacctgaatgaaagaagcaaatgactattctctgaagacaacgaagagaaaattgcaaaaagacaagtatgacttttatatgaaccccttctttagggtccagaaggaattgtggactgaatcactagccttaggtctttcagcaaacagcctatcagggccatttatcatgtgtgagatttgcattttactttgctgactttgttgtaatagatcccattcattgtcccctttggggtatttccaatacttgaatggcagattggagtttttcagagtatgtgtttcatctgctagtctttctctccttcatagcnnnnnnnnncctggacttgctccttttgagttgcttttgcgtttctcatgcctaggcaagtgtaatagaaattatgtagctccttatgttggcaaaggagctctatatagtttcactttgtataaaagttaggaccagctgttgttacatgtaatattttagttcagaacttgacctgaaggaagggaagaaaagtatgtgatttttaccttttttaacaaatgtgaaaaagtcagttttagaaatttcgtggtagtaagttcggcatttgttacatgtatagagagaagacttataatctctattataactaaatcattgagatagaaaaagattcccattgactgtagacttcttcccagatcctgttccgttctgcctgtttcccccattcaatttggaaataaatttctgtatatggtgcaaaaaacctcgtgc

SEQ ID NO: 19956 - DNA, 1587 bp, Homo Sapiens
gcacgagggctcattcgactaactaggagggtgagttggccctgtctcttcttttttctggacctcagtttcctcagtgagctggtaagaatgcactaaccttttgatttgataagttataaattctgtggttctgatcattggtccagaggggagataggttcctgtgatttttccttcttctctatagaataaatgaaatcttgttactagaacaagaaatgtcagatggccaaaaacaagatgaccagatttgatctcagcctgatgaccctacaggtcgtgctatgatatggagtcctcatgggtaaagcaggaagagagtgggaaagagaaccaccccactctgtcttcatatttgcatttcatgtttaacctccggctggaaatagaaagcattcccttagagatgaggataaaagaaagtttcagattcaacagggggaagaaaatggagatttaatcctaaaactgtgacttggggaggtcagtcatttacagttagtcctgtgtctttcgacttctgtgattattaaccccactcactaccctgtttcagatgcatttggaataccaaagattaaagccttgacataagatctcatttgcagaaagcagattaaagaccatcagaaggaaattatttaggttgtaatgcacaggcaactgtgagaaactgttgtgccaaaaatagaattccttctagtttttcttgttctcatttgaaaggagaaaattccactttgtttagcatttcaagcttttatgtatccatcccatctaaaaactcttcaaactccacttgttcagtctgaaatgcagctccctgtccaagtgccttggagaactcacagcagcacgccttaatcaaaggttttaccagcccttggacactatgggaggagggcaagagtacaccaatttgttaaaagcaagaaaccacagtgtctcttcactagtcatttagaacatggttatcatccaagactactctaccctgcaacattgaactcccaagagcaaatccacattcctcttgagttctgcagcttctgtgtaaatagggcagctgtcgtctatgccgtagaatcacatgatctgaggaccattcatggaagctgctaaatagcctagtctggggagtcttccataaagttttgcatggagcaaacaaacaggattaaactaggtttggttccttcagccctctaaaagcatagggcttagcctgcaggcttccttgggctttctctgtgtgagtagttttgtaaacactatagcatttgttaagatccagtgtccatggaaacattcccacatgccgtgactttggactatatcagtttttggaaagcagggttcctctgcctgctaacaagcccacgtggaccagtttgaatgtctttcctttacacctatgtttttaagtagtcaaacttcaagaaacaatctaaacaagtttttgttgcatatgtgtttgtgaacttgtatttgtatttagtaggcttttatattgcatttaacttgtttttgtaactcctgatttttccttttcggataatattgatgaataaagaaattaaagtg

SEQ ID NO: 19957 - DNA, 1458 bp, Homo Sapiens
gcacgaggaggaacacaaaacaaagattagagccaataagattacgatctacttccaatagtcgaagccgttcaccaattcagagacagagtggaactgtttatcataattcccaaagggaaagtagaccagtacagcaaaccactagaagatctgttaggaggagaggtagaactcgagtctttttagagcaagatagagaacgagaacgcagaggtactgcatataccccattctctaattcaaggcttgtgtcaagaataacagtagaagaaggagaagaatccagcagatcctcaactgctgtacgacgacatccaacaatcacactggaccttcaagtgagaaggatccgtcctggagaaaatagagatcgggatagtattgcaaatagaactcgatccagagtagggctagcagaaaatacagtcactattgaaagcaatagtgggggctttcgccgaaccatttctcgtttagagcggtcaggtattcgaacctatgttagtaccataacagttcctcttcgtaggatttctgagaatgagcttgttgagccatcatcagtggctcttcggtcaattttaaggcagatcatgactgggtttggagaactgagttctctaatggaggccgattctgagtcagaacttcaaagaaatggccagcatttaccagacatgcactcagaactgagtaacttaggtacagataacaacaggagccagcacagggaaggttcctctcaagacaggcaggaccaaggagacagcactgaaatgcatggtgaaaacgagaccacccagcctcatactcgaaacagtgacagtaggggtggcaggcagttgcgaaatccaaacaatttagttgaaactggaacactacccattcttcgccttgctcacttttttttactaaatgaaagtgatgatgatgatcgaatacgtggtttaaccaaagagcagattgacaatctttccaccaggcactatgagcataacagtattgatagtgaactaggtaaaatctgtagtgtttgtattagtgactatgtaactggaaacaagctcaggcaattaccttgcatgcatgaatttcacattcattgtattgaccgatggctctcagagaattgcacttgtccgatctgtcggcagcctgttttagggtctaacatagcaaacaatgggtaaggtgatgggatctactcaaatactgttttttagtagaactgaatgttcaagcattgttttgctgagttatttgtgattagctaaccaggatgaaaaataacagattatatatagtttgaactatttttcgtgtgcttttttaaacttgttaaaaagaatttatataaaatttaaaataccaaatgttaaattatccagaaatacagaataggttaatattgctagaaccaaatatctctaaaatgtttttattttggtaattttg

SEQ ID NO: 19958 - DNA, 1474 bp, Homo Sapiens
gcacgaggcttgagcttagatattcatgaaaatcatagttttgcacttctagggaagaagaaatcaagcaatttgacattaccacccaaatataaccagccattctttgttacttccttacctgatgataaaatacctaaaggggcaggacctggatgctatcttgcaggatccttaacattgtcaaagactgaactaggaaagaaagctgatgtaatccctgttcattactacttaatacctccaccaacaaagactaagaatggcagcaaagataaggaaaaagattcagaaaaagagaaagatttaaaagaagagtttactgaagcattacgagatcttaaaattcagtggatgacaaagctggattctagtgacatttataacgaattgaaagaaacatatcctaattatcttcctctgtacgttgcacgacttcatcaattggatgctgaaaaggaacgaatgaaaagacttaatgaaattgttgatgcggcaaatgctgttatttctcatatagatcaaacagccctagcagtttatattgcaatgaagactgatcccaggcctgatgcagctactataaaaaatgacatggacaaacaaaaatccaccctcgtagatgccctttgtaggaaaggttgtgccctggcagaccatcttcttcacacccaggctcaagacggagccatttccactgatgcagaaggaaaggaggaggaaggagaaagtcctttggattctctggcagaaacattttgggaaactactaaatggactgatctctttgacaataaggttttgacatttgcatataaacatgcattagtaaataaaatgtatgggagaggccttaaatttgcaactaaacttgtggaagaaaaaccaacaaaagaaaactggaaaaattgtattcaactgatgaagttacttggatggacccattgtgcatcttttactgaaaactggctccccatcatgtatcctcccgattattgcgtattctaaaataggaaacaagactttaaattttaaaaaaggaagttttatagtgaatggatataaaaacaaatttgtggcatttttagtctaatgcatgttttcatccactatccagtactgattattaaaatgacatgtatttatcagagaattcactgacgtgtggcttaatacatgtaaatctagacctctgacatcatggtgttttcttaatgcctcacattgctggcacggggatgtgccctgcctgccagcacctaggacttcgagttgggttgcagcttatgacatgcatgataggttttggaaggtaacttttaactgcaaacctataaagtactattttttattttataatgaacagggttttaacgtgctcaactttatttttttccattgtatgaggccttaaaaagctacttaagcgtagctaaattattattggactaaaactacagacttcattccgaaa

SEQ ID NO: 19959 - DNA, 1016 bp, Homo Sapiens
aggaattcggcacgaggccaaaccggcgggtatggcctggagtatcagcagccatttttcgaggatccgacaggggctggtgacctcctggatgaggaggaggatgaggacaccggatggagtggggcctacctgccgtccgccatcgagcagactcaccccgagagggtccctgccggcacgtcgccctgcagcacatacctttcctttttctccaccccgtcggagctggcagggcctgagtctctgccctcgtgggcgttgagtgacactgattctcgcgtgtctccggcctctccggcagggagtcctagcgcagactttgcggttcatggagagtctctgggagacaggcacctgcggacgctgcagataagttacgacgcactgaaagatgaaaattctaagctgagaagaaagctgaatgaggttcagagcttctctgaagctcaaacagaaatggtgaggacgcttgagcggaagttagaagcaaaaatgatcaaggaggaaagcgactaccacgacctggagtcggtggttcagcaggtggagcagaacctggagctgatgaccaaacgggctgtaaaggcagaaaaccacgtcgtgaaactaaaacaggaaatcagtttgctccaggcgcaggtctccaacttccagcgagagaatgaagctctgcggtgcggccagggtgccagcctgaccgtgggtgaagcagaacgccgacgtggccctgcagaacctccgggtggtcatgaacagtgcacaggcttcctcaagcaactggtttccggagctgagacactgaatcttgttgccgaaatccttaaatctatagacagaatttctgaggttaagacgaagaggaagactcttggaggactcctgggtggttctcagcatgaagcctctgtatacctggaggtcacccacgcttcatctaaatgtggccagttgggtccttaaataagcagccctcacccgaagtacaggggtttgatccgcagaaaaaggggggg

SEQ ID NO: 19960 - DNA, 878 bp, Homo Sapiens
  misc_feature (467)..(480): n is a, c, g, or t
  misc_feature (525)..(581): n is a, c, g, or t
  misc_feature (663)..(687): n is a, c, g, or t
gcacgaggtaacagtagggcacagtcattctgtgaatccttttacttatcaaaatttggtagctattctaaggcttttgcagaaaaataagtgttcaatgtttgtagttcttcaaaagcatgttgcagtagccagccatactatgtgtattcccagtatcatgtacgcactaaaaaaaatgtgtgcttgctgctgctgtgagtgaaccattgcttaagataaaaaacttaactagatctgtaaatgtacagaatagcatcagatgtttctgagagattagaaaatgttttgaatttataaaattaatgtttttctttgtaacatttatatatattttttaacattttaagtttaacagattgtattcctttcaagtttctatacttgcttaagcaatcttgatttgagtaagggtcttgatttgtgctattatgttctgttagttttggcatgaatatactaaagcnnnnnnnnnnnnnnctagcatgtgttttctcctctttggttctctttgtatttactacnnnnnnnnnnnnnnnnnnnnnnnnnnnnnnnnnnnnnnnnnnnnnnnnnnnnnnnnntcctgtcttcattgtttcaggtatttctttacccctctggattccccacgggctggatcgagatggtccagttatgcccagnnnnnnnnnnnnnnnnnnnnnnnnntggtagagcactcttgcgatgctgacactgccaacctccagtatcctcaccctcgcagacgatatctctctcggcctcttaatcccttacctgaaattgaagggatttaaaacactgatttaacattgaaaggcttattcaagtgcttgtaaatgcttccattcgggctgctttttgtttttcatttcctt

SEQ ID NO: 19961 - DNA, 901 bp, Homo Sapiens
  misc_feature (444)..(453): n is a, c, g, or t
cttgtaaattttttctttatttaaacttcaataaaaatatagatttgtaactcaatagaaagacagcagtgataataactcacacatgagcagctcgcaaatttcaaagtctttggtcttcaagtcctatgtcacagcttcttcagtctgattccctccttctctgtaaaattccgagaactagtttggttcacttaatcatctcaatggagatggccctttcctgccattcactcaaatctagaactcccaatatgtggctcacaaatacttcagtcatctacaaaagcatctggaaattaaataattttagccagagtcagggacataaaacttctttaaagggatgcagtcaatcctggtattcaccacaaagaaaatcctcatgtataaaaatgtggaatctgtgctgcttttaataatagaacctttaaggttcaaagnnnnnnnnnntgctttcctgaactacatcatttccagacacatcagccacacaaggagctgacaagacctgctgtttctattatagagaacgtgagactttaaaaccacatcaaaagaaaatggtgggagcttttctgctatgcagagaattccgcatagcactcctttgcccagactgggagacaaacatacccctccctcctgaactggatccccaccacctttccaaaggccactggacatgtctcttaaacgctgcatttcagctcttgatcattctgccctggggatcccttctctttaggttctttgttatggtctggggaaacactctggactttctatggtgttgacagcatctgagtccaatcttcttcttttcttcagttgggttcaagtgggatttggaattttatgttgcgctgataagacaaaatcaaacaaacaaaccaaaaaa

SEQ ID NO: 19962 - DNA, 948 bp, Homo Sapiens
gcacgaggtgtcaatgttgtgttgtccctcaaacttgttggaatccagatccaaaccctgatgcaaaagatgatccaacaaatcaaatacaatgtgaaaagcagattgtcagatgtaagctcgggagagcttgccttgattatactggctttgggagtatgtcgtaacgctgaggaaaacttaatatatgattaccacctgatcgacaagctagaaaataaattccaagcagaaattgaaaatatggaagcacacaatggcactcccctgactaactactaccagctcagcctggacgttttggccttgtgtctgttcaatgggaactactcaaccgccgaagttgtcaaccacttcactcctgaaaataaaaactattattttggtagccagttctcagtagatactggtgcaatggctgtcctggctctgacctgtgtgaagaagagtctaataaatgggcagatcaaagcagatgaaggcagtttaaagaacatcagtatttatacaaagtcactggtagaaaagattctgtctgagaaaaaagaaaatggtctcattggaaacacatttagcacaggagaagccatgcaggccctctttgtatcatcagactattataatgaaaatgactggaattgccaacaaactctgaatacagtgctcacggaaatttctcaaggagcattcagcaatccaaacgctgcagcccaggtcttacctgccctgatggggaaagaccttcttggatattaacaaagactcttcttgcgtctctgcttcaggtaacttcaacatctccgctgatgagcctataactgtgacacctcctgactcacaatcatatatctccgtcaattactctgtgagaatcaatgaaacatatttcaccaatgtcactgtgctaaatggttctgtcttctcagtgtgatggagaaagcccaaaaa

SEQ ID NO: 19963 - DNA, 1117 bp, Homo Sapiens
cactgtgcccaccatgattctatcctagtattttatcttttttcttgttgttgtagaggcattatcaaccgtttaaaccctcaagaccaaattatctttacatttttttaaagagaagatatccatccaaggttttccaacattgcgtatttgtcctccttgccaaaaaagagggtagaataagtaatgtttaattaatactgaattttttaatgtgcaaaaatctaactctgctttttaaagcaagtagaaggagtgacaatatggcaccattccaataatcaaacaccaataaaaatggcagcagtacaacaatctaagcaaatctcaaatacaacatacttgtaattagaacacaatgcaatgacttgattttagcaagaactagacacttaatttggtaaaagaaaccaaacaatgcattatattgaatactaagctaagttaccataattagtcttacaaattctcaaatttcacaactacttttgaacatctaaatttaaacctaaattttttaattaaatgcctgttcaacaaagctaattggaacaaacacatttatgtaaatttacattctagaataccagggtaaacaaggagacgttattcaaagatgaatgagaaagttctattctttttcatcatttgtgtgatcaggttgcaaaggacatgctctgtgaaaagaagagagaacatcaatagccatccaagtatcaactgtttgaaaaaaatagttacaaacctatataaatcaggaacattaattaacagtgcagtagatctggtctaatgactagaaatgaaagaaaattaaacttcattaattaacaaacacctacaatttcaagtattaatgcaacaaaatttttaacaatttatttgcctgttatttgcagaatcagtgtttctcctttagactacgttgtaatttttattaaaaaagaatctatttatatagcatattatttcaacatgtttattaaatggattgataaacaatataatccttcagcaagaactttgtggtaacaaaaagtaaaaaaattaaccaatccactttagcagagaaaacatatagcaagttgtcctttgactatatatactcttttgaacc

SEQ ID NO: 19964 - DNA, 934 bp, Homo Sapiens
gcacgaggcacatctctagcccatatcatccctatgcccctaagcagcctgcctttgaccaagccattcctcccctcagagtttgtggaaggaccacaaacatcccaccccttccagcccagcatcgtcctatgaggatctgcccagtttgcgtggggcaggagtggggttggtggaaagggaatgggggatgtgctgtgtctgggcagagagggccaagtagaaggtgggccctgggcacttgttctttgcttgagcctgacctcccctccacccgtccagtgtgctctggcacctgtcagcccacccagttccgctgcagcaatggctgctgcatcgacagtttcctggagtgtgacgacacccccaactgccccgacgcctccgacgaggctgcctgtgaaaaatacacgagtggctttgacgagctccagcgcatccatttccccagtgacaaagggcactgcgtggacctgccagacacaggactctgcaaggagagcatcccgcgctggtactacaaccccttcagcgaacactgcgcccgctttacctatggtggttgttatggcaacaagaacaactttgaggaagagcagcagtgcctcgagtcttgtcgcggcatctccaagaaggatgtgtttggcctgaggcgggaaatccccattcccagcacaggctctgtggagatggctgtcgcagtgttcctggtcatctgcattgtggtggtggtagccatcttgggttactgcttcttcaagaaccagagaaaggacttccacggacacaccaccacccaccaccaccctgccagctccactgtctcactaccgaggacacggagcacctggtctataccacaccacccggcccttctgagctgggtctcacggctctcactggcctgcttcctgcttgccaggcagaggctggg

SEQ ID NO: 19965 - DNA, 728 bp, Homo Sapiens
  misc_feature (563)..(591): n is a, c, g, or t
cccgggctgcaggaattcggcacgagggccgcaccaggagctgctgtagcgaagagagtttggcgcgatgtctcacaccattttgctggtacagcctaccaagaggccagaaggcagaacttatgctgactacgaatctgtgaatgaatgcatggaaggtgtttgtaaaatgtatgaagaacatctgaaaagaatgaatcccaacagtccctctatcacatatgacatcagtcagttgtttgatttcatcgatgatctggcagacctcagctgcctggtttaccgagctgatacccagacataccagccttataacaaagactggattaaagagaagatctacgtgctccttcgtcggcaggcccaacaggctgggaaataattgtgttggaagcactgggggggttggggtgggcttggaacacaggtgtgtacagcgtgctgtagtggaagttttgtatcatagtaatcctgtttccactttgttatactctagccaagattgactgtattagatgaaatgtgaggatcttgttcaatcggaaacccccgttacctcctcnnnnnnnnnnnnnnnnnnnnnnnnnnnnnacttaaacatttttatgatgatttagatggaagttgttcttcgtcacttaatgttggttccagtccttcaactgttcatatctactttataacattcacatactaacccttcttcaagatgggggtgggggttggaa

SEQ ID NO: 19966 - DNA, 2211 bp, Homo Sapiens
gcacgaggctccaccacagggcctggcgagcacctgcggaacgccctgtggcacacaggaaacacccctggccaggtgcgcaccctgtggcatgaccctcgtcacataggctggaaagatttcaccgcctacagatggcgtctcagccacaggccaaagacgggtttcattagagtggtgatgtatgaagggaagaaaatcatggctgactcaggacccatctatgataaaacctatgctggtggtagactagggttgtttgtcttctctcaagaaatggtgttcttctctgacctgaaatacgaatgtagagatccctaatcatcaaattgttgattgaaagactgatcataaaccaatgctggtattgcaccttctggaactatgggcttgagaaaacccccaggatcacttctccttggcttccttcttttctgtgcttgcatcagtgtggactcctagaacgtgcgacctgcctcaagaaaatgcagttttcaaaaacagactcagcattcagcctccaatgaataagacatcttccaagcatataaacaattgctttggtttccttttgaaaaagcatctacttgcttcagttgggaaggtgcccattccactctgcctttgtcacagagcagggtgctattgtgaggccatctctgagcagtggactcaaaagcattttcaggcatgtcagagaagggaggactcactagaattagcaaacaaaaccaccctgacatcctccttcaggaacacggggagcagaggccaaagcactaaggggagggcgcatacccgagacgattgtatgaagaaaatatggaggaactgttacatgttcggtactaagtcattttcaggggattgaaagactattgctggatttcatgatgctgactggcgttagctgattaacccatgtaaataggcacttaaatagaagcaggaaagggagacaaagactggcttctggacttcctccctgatccccactcttactcatcacctgcagtggccagaattagggactcagaatcaaaccagtgtaaggcagtgctggctgccattgcctggtcacattgaaattggtggcttcattctagatgtagcttgtgcagatgtagcaggaaaataggaaaacctaccatctcagtgagcaccagctgcctcccaaaggaggggcagccgtgcttatatttttatggttacaatggcacaaaattattatcaacctaactaaaacattccttttctcttttttcctgaattatcatggagttttctaattctctcttttggaatgtagattttttttaaatgctttacgatgtaaaatatttattttttacttattctggaagatctggctgaaggattattcatggaacaggaagaagcgtaaagactatccatgtcatctttgttgagagtcttcgtgactgtaagattgtaaatacagattatttattaactctgttctgcctggaaatttaggcttcatacggaaagtgtttgagagcaagtagttgacatttatcagcaaatctcttgcaagaacagcacaaggaaaatcagtctaataagctgctctgccccttgtgctcagagtggatgttatgggattctttttttctctgttttatcttttcaagtggaattagttggttatccatttgcaaatgttttaaattgcaaagaaagccatgaggtcttcaatactgttttaccccatcccttgtgcatatttccagggagaaggaaagcatatacacttttttctttcatttttccaaaagagaaaaaaatgacaaaaggtgaaacttacatacaaatattacctcatttgttgtgtgactgagtaaagaatttttggatcaagcggaaagagtttaagtgtctaacaaacttaaagctactgtagtacctaaaaagtcagtgttgtacatagcataaaaactctgcagagaagtattcccaataaggaaatagcattgaaatgttaaatacaatttctgaaagttatgttttttttctatcatctggtataccattgctttatttttataaattattttctcattgccattggaatagatatctcagattgtgtagatatgctatttaaataatttatcaggaaatactgcctgtagagttagtatttctatttttatataatgtttgcacactgaattgaagaattgttgg

SEQ ID NO: 19967 - DNA, 1788 bp, Homo Sapiens
gcacgagggaacccctattctccgaccgaagcgtcccagccgattgtggaagaggaggaaactaaaacatttaaagacctgggtgtgacagatgtgttgtgtgaagcttgtgaccagttgggatggacaaaacccaccaagatccagattgaagctattcctttggccttacaaggtcgtgatatcattgggcttgcagaaactggctctggaaagacaggcgcctttgctttgcccattctaaacgcactgctggagaccccgcagcgtttgtttgccctagttcttaccccgactcgggagctggcctttcagatctcagagcagtttgaagccctggggtcctctattggagtgcagagtgctgtgattgtaggtggaattgattcaatgtctcaatctttggcccttgcaaaaaaaccacatataataatagcaactcctggtcgactgattgaccacttggaaaatacgaaaggtttcaacttgaggctctcaaatacttggtcatggatgaagccgaccgaatactgaatatggattttgagacagaggttgacaagatcctcaaagtgattcctcgagatcggaaaacattcctcttctctgccaccatgaccaagaaggttcaaaaacttcagcgagcagctctgaagaatcctgtgaaatgtgccgtttcctctaaataccagacagttgaaaaattacagcaatattatatttttattccctctaaattcaaggatacctacctggtttatattctaaatgaattggctggaaactcctttatgatattctgcagcacctgtaataatacccagagaacagctttgctactgcgaaatcttggcttcactgccatccccctccatggacaaatgagtcagagtaagcgcctaggatcccttaataagtttaaggccaaggcccgttccattcttctagcaactgacgttgccagccgaggtttggacatacctcatgtagatgtggttgtcaactttgacattcctacccattccaaggattacatccatcgagtaggtcgaacagctagagctgggcgctccggaaaggctattacttttgtcacacagtatgatgtggaactcttccagcgcatagaacacttaattgggaagaaactaccaggttttccaacacaggatgatgaggttatgatgctgacagaacgcgtcgctgaagcccaaaggtttgcccgaatggagttaagggagcatggagaaaagaagaaacgctcgcgagaggatgctggagataatgatgacacagagggtgctattggtgtcaggaacaaggtggctggaggaaaaatgaagaagcggaaaggccgttaatcacttttatgaaggctcgagttctgctgttctgtaaaagagaattggagaatgaaacctgctccaacagagatcatgagactgaaattggtcagaattgtgtccagaatgtgctcagctaattcagtattcttccccattctgggttggagtttactgcagagtaattcttacagtgctgatgtcaagactgttactgttcttcgactttgactccttgctcatgacatgagtagggtgtgcttttctgtcacttcacacagaccttttgccttttttagctgcaagtcaaggactaggttgatgatgcccatgacctgtaattgtaaagaagcttggacatctgcaaatgatatttaaaccatcttggcttgtgctttattcaaactaatgtgaaacaataaatttaaatatttttttaagaaag

SEQ ID NO: 19968 - DNA, 1838 bp, Homo Sapiens
gcacgaggcttgatgagaatggaaaagattgtattggagaaggtgtgttggaaagtcaaagctactactgcctttcaatttctgcaactgtattattcactccttcaagagaacttgccacttgaaaggagaaatagcattaattttgaaagactagaagctcaactgaaggcatgtcattgcaggatcatattttctaaagcaaagccttctgtgttggcattgtctatcattgcattagagatccaagcacagaagtgtgtagagttaacagaaggaatagaatgtcttcagaaacattccaagataaatggcagagatctgaccttctggcaagagcttgtatccaaatgtttaactgaatattcatcaaataagtgttccaaaccaaatgttcagaagttgaaatggattgtttctgggcgtactgcacggcaattgaagcatagctactacagaataactcaccttccaacaattcctgaaatggtcccttaactggattattacagcaccaaaaaacttctctgaagcctttctccacaaccttgttctatggattccataatgttacaatggatttaagctatgaagcctcaaaacatcacgagataagcatgatggtctcagacttgggaaaactgcctaatattatgctgtagtggaattatgtttagatttgaattcatctgtgaagcattcaaatcaaagctaaaagcctaaatgtgaaatgctaatgacaagcctgagaaggtaaactgtgaatcttcatttctatcattgatctaactttagatattggatcaatatatttaggtggtattgaaaatgctattggaggagtcacactaatactatcaactatcagtcttcccacagcttcaatcactgtcattattctaatcctactcctacttaaattttaagttatgaggtttatgtcaaaagcaacatttcacaaatgtacttttaaggcataataagggttaacattctaggcagtataaacacaccccataatgcaagtaataggtaatctagagatgtggactttattgctatatgggaattacatttaaatttgagggcattttatataaagaaaaatacagacctataaagtttggcatattcattaagttatcttttaatatttttttctagaaaacaggtgacatttgtatctacgataaaaatttttatacagaacctactgcctcaaactgaatcccatcaagaaaactagtttctattgtattagtaactcaaaataaattatcacttcgaaaacttgctttcccacactaaggtaagttcagactagattgaacactccagaattttttactacagactgtttttaagttagaagtgatggcaattttataaatagagaatatacttccactgatgcccttactgtgccaaaacaaaaatcttaagaaaagcaagtagacaccttcataactatgaatgaagctgctgaagtagtgtttaggatcctccatggcagttagtgaatgtaagaagtacagtgttaaagtgttgtaaacagttactcagtgcaatgtatagcctgagtctatccatgatggctatatccaatttgacatcacgttatggatcagtacacaatgaaaaaccaaagaaccacagtatatcttattcttaacttttgtaaaccatgttttatgggtaactttttagttttcccaaaaggctgataaatttcaatattttgaatacatcattgttaattttgagttggcagaggtaaactaaccaactaccattatgttttagtactaagggatatacctttcaataaagcctcgtgc

SEQ ID NO: 19969 - DNA, 746 bp, Homo Sapiens
atgaaaaagctttataaaaataagctttaagaaacctcatttcttctatttaaaaaaaagcctctttcagtgcaagtggggtgccaaggatgtagaataaataagagggggccaggatcagtgcacagggaggaagcgctcacggacgctccgctccagcccgggcatcctggccacgcgcagcgcctgcagcagccgcaccagcagcgccccgtcctgcgcccccaggagctccgtgagccgccgacgcagcttcagctgcaaggccgcgcggcccgcccttggtgtcggaccccagccctccggggcctcgagggcctgcagcagccgctgcagcctcttgatggagatgtcctggaaagccacaaagtcgatgacggcacgctcacactcctcagctcctgcagtggggtggggaggcagcggtccgatcatttcacccacacacactggcgggggctgccaggtaccctgctttctgggccccactcggggggtttgcaggagagagaaatccctgtgcagtgagccgtgctggagagggcagtgcaacgatggggactggagaaggggcaggagccttcggtcagagacctggagcaaaggcctagggggcaggagcggccactcggaccttggctgcaagaggcaagggggcccaggcaagggcttgggggctcctgggccatcggaaggggcgagtggggacctgcagatggaccggactgacttgatgttaaggggtc

SEQ ID NO: 19970 - DNA, 936 bp, Homo Sapiens
gcacgaggggtggggtggtgttagtaccccatcttgtaggtcttgagaggctcggctacctcagtgtggaaggtgggcagttctggaatggtgccaggggcagagggggcaatgccggggcccaggtcggcaatgtacatgaggtcgttggcaatgccgggcaggtcaggcaggtaggatggaacatcaatctcaggcacctggcccaggtctggcacatagaagtagttctctgggacctgctgttccagctgctctctcttgctgatggacaagggggcatcaaacagcttctcctctgtctctgcccccagcatcacatgggtctttgttacagcaccagccagggggtccaggaagacatacttcttgtacaggttctaggtggtgttgaagagcagcaaggagctgacagagctgatgttgctgggaagacccccaagtccctcttctgcatcgtcctcgggctccggcttggtgctcacgcacacaggaaagtccttcagcttctcctgcagggcccgctcgtccagggggcggtgcttgctctggatcctgtggcgggggcgtctctgcaggccagggtcctgggcgcccgtgaagatggagccatattcctgcaggcgctctggagcagggtacttggcactggagaacaccttgatggccttcttgctgcccttgatcttctcaatcttggcctgggccaaggagaccttctctccaatggcctgcacctggctccggctctgctatacctgctgaagatgtctccagagaccttctgcaggtactgcagggcatccgccatctgctggacggcctcctctcaccgcagtctgggctggatgaagggcacggcataggtctgacctgccagggagtgctgcatcctcacaggagtcatggtgccgcgagcgtcctctggagctcctg

SEQ ID NO: 19971 - DNA, 894 bp, Homo Sapiens
ctttttatatagcaaaatgattcctcttggcaagatgtttctttatattattccaaagttatttcatacccattattatgtaaatatgaagagtttttttctgtttataattgtttataaaacaatgacttttaaagatttagtgcttaacattttcccaagtgtgggaacattatttttagattgagtaggtaccttgtagcagtgtgctttgcattttctgatgtattacatgactgtttcttttgtaaagagaatcaactaggtatttaagactgataattttacaatttatatgcttcacatagcatgtcaacttttgactaagaattttgttttacttttttaacatgtgttaaacagagaaagggtccatgaaggaaagtgtatgagttgcatttgtaaaaatgagactttttcagtggaactctaaaccttgtgatgactactaacaaatgtaaaattatgagtgattaagaaaacattgctttgtggttatcactttaagttttgacacctagattatagtcttagtaatagcatccactggaaaaggtgaaaatgttttattcagcatttaacttacatttgtactttagagtatttttgtataaaatccatagatttattttacatttagagtatttacactatgataaagttgtaaataattttctaagacagtttttatatagtctacagttgtcctgatttcttattgaatttgttagactagttctcttgtcttgtgatctgtgtacaattttagtcactaagactttcctccaagaactaagccaacttgatgtgaaaagcacagctgtatataatggtgatgtcataataaagttgttttatcttttaagtaaaagtaaaagtgctggagcctcgtgc

SEQ ID NO: 19972 - DNA, 2041 bp, Homo Sapiens
  misc_feature (1338)..(1354): n is a, c, g, or t
  misc_feature (1985)..(1998): n is a, c, g, or t
gcacgaggcagcaatggggtgctgaagggggagttgtcagacttgggggctgaggatggatggaccatggatgcggaagcagatcattcaggaggttctgacaggaacagcatggattccgtggatagctgttgcagtctcaagaagactgagagcttccaaaatgcccaggcaggctccaaccctaagaaggtcgacctcatcatctgggagatcgaggtgccaaagcacttagtcggtcggctaattggcaagcaggggcgctatgtgagttttctgaagcaaacatctggtgccaagatctacatttcaaccctgccttacacccagagcgtccagatctgccacatagaaggctctcaacatcatgtagacaaagcgctgaacttgattgggaagaagttcaaagagctgaacctcaccaatatctacgctcccccattgccttcactggcactgccttctctgccgatgacatcctggctcatgctgcctgatggcatcaccgtggaggtcattgtggtcaaccaggtcaatgccgggcacctgttcgtgcagcagcacacacaccctaccttccacgcgctgcgcagcctcgaccagcagatgtacctctgttactctcagcctggaatccccaccttgcccaccccagtggaaataacggtcatctgtgccgcccctggtgcggacggggcctggtggcgagcccaagtggttgcctcctacgaggagaccaacgaagtggagattcgatacgtggactacggcggatataagagggtgaaagtagacgtgctccggcaaatcagtctgactttgtcaccctgccgtttcagggagcagaagtccttctggacagtgtgatgcccctgtcagacgatgaccagttttcaccggaagcagatgccgccatgagcgagatgacggggaatacagcactgcttgctcaggtgacaagttacagtccaactggtcttcctctgattcagctgtggagtgtggttggagatgaagtggtgttgataaaccggtccctggtggagcgaggccttgcccagtgggtagacagctactacacaagcctttgacccccatgctgcttcctgagagtctttttttgcactgttgaaattgggcttggcactcaagtcaaagatgaacatcggaataacaaacattgtcctctccagaaagtcctttctttatccatactgtagtcctattgagaagacatttcgtctctgagaaaaaaggatggaactatgggttctcttcgcaaagccaaaggatagtgtttaacaagccagctggcttatcctggttctcagctgtttnnnnnnnnnnnnnnnnnggaatagaaacagtttcaaccagattgtcctattccccctgttccattcccctcttcttccttctatctccttccccggcaaaaaccaaacaaactggcagacaggccagggatgtatgttgcttgcttgagagggtttcttttacttcaaaatctttcttcagggagcaagacatgaactgactaattggtatccactacttgtacagcttacataaatgagttgatgatatttaaccagtttttataaacttcatttaggtctctaaacacagactttttaaattgcaactgtaaatatgaaatggtcatcacatctgaccttggtcagtggggaggggaactggtatcctgccaagcctggttgtaatttgtaaccattttctatttgtgcaaactctgtaaatatgtgtttaaacaaatgtaatattttgtacaagatacactggagaacaaagggaactcaagattcttccagccacatgtcacctgtaggtagaagtaaactctgcagtgcagcttctgctcttggcccctctggccagggcccctgtggcttcctgcacactggacaggtgactgtatggtagagactgtgatctgggaactttttgctgtacaaatctgtttnnnnnnnnnnnnnngtaattcatggaattaacttgcaaaaaaacctgcagcccgggg

SEQ ID NO: 19973 - DNA, 1444 bp, Homo Sapiens
gcacgaggctcaaatatctccagccctgggttacagccaagcactcagctctccaatctgggaagcaccgagactctagaagaaatgccctccgggtcacaggataagtctgctccatctggacacaagcatctgacggtagaagagttatttggaacctctttgccaaaggaacaaccagcagttgtgggtctggattcagaagaaatggagaggttgccaggagatgcctcccagaaagagcccaattcattcctaccatttccctttgagcagttaggaggagcccctcaatcagaaaccctgggtgtcccttctgctgcccaccattcagtccagcctgaaatcaccaccccggtgctaatcactccagcctccatcacacagtccaatgaaaagcatgctccaacctacacaatcccgttgagccctgttctcagtcccactctgccagctgaagctcctactgcacaggttccccccagcttacctcgaaacagcaccatgatgcaggcagtgaagaccacgcctagacagaggtctccactcctgaaccagccagtccctgagctaagccatgccagtctgattgccaaccagagccccttcagggccccattgaacgtgacgaacacagctggcacatccctcccaagcgttgatcttctccagaaactcaggttgaccccacagcatgaccaaatacagacacaaccacttgggaaaggtgcaatggtagccagcttttctccggcagctggtcagctagccacacctgagagcttcatagagcctccctctaagacagcagcagcaagagtggcggcctcagcctccctgagcaacatggtgcttgctccccttcagttatgcagcagaaccaggatcctgaagtatttgtgcagcctaaggtgttatccagtgccatcccggttgcaggcgccccactggttactgcaacgaccactgcagtgtcttcagtcctgctggccccaagtgttttccagcagacagttacaagatcttcggaccttgagaggaaagccagctccccttctcctctaactattggaacgccagaaagtcagagaaagccttccattattctcagcaagtctcagctccaggatacattaatacatctaataaagaatgattccagcttcctcagtacacttcatgaagtctacttgcaggttctgaccaagaacaaagacaaccacaacctatgactggagcagaataagtctaaaggcagagccccagcctcagagacaaataggcttcatcatggaaacttctgagcagaacattgagtttgagaatcctgaaattgagcctatgagaaagagactcatttcttaagaatgttttccaagtgacattctcagtgataatggaggtttcactgtgaagcatcaccagcagatcggttgcctcgtgc

SEQ ID NO: 19974 - DNA, 1303 bp, Homo Sapiens
gcacgaggccggagtcaaagccggttcccggcccagtcccgtcctgcagcagtctgcctcctctttcaacatgacagatgccgctgtgtccttcgccaaggacttcctggcaggtggagtggccgcagccatctccaagacggcggtagcgcccatcgagcgggtcaagctgctgctgcaggtgcagcatgccagcaagcagatcactgcagataagcaatacaaaggcattatagactgcgtggtccgtattcccaaggagcagggagttctgtccttctggcgcggtaacctggccaatgtcatcagatacttccccacccaggctcttaacttcgccttcaaagataaatacaagcagatcttcctgggtggtgtggacaagagaacccagttttggcgctactttgcagggaatctggcatcgggtggtgccgcaggggccacatccctgtgttttgtgtaccctcttgattttgcccgtacccgtctagcagctgatgtgggtaaagctggagctgaaagggaattccgaggcctcggtgactgcctggttaagatctacaaatctgatgggattaagggcctgtaccaaggctttaacgtgtctgtgcagggtattatcatctaccgagccgcctacttcggtatctatgacactgcaaagggaatgcttccggatcccaagaacactcacatcgtcatcagctggatgatcgcacagactgtcactgctgttgccgggttgacttcctatccatttgacaccgttcgccgccgcatgatgatgcagtcagggcgcaaaggaactgacatcatgtacacaggcacgcttgactgctggcggaagattgctcgtgatgaaggaggcaaagcttttttcaagggtgcatggtccaatgttctcagaggcatgggtggtgcttttgtgcttgtcttgtatgatgaaatcaagaagtacacataagttatttcctaggatttttccccctgtgaacaggcatgttgtattatataacatatcttgagcattcttgacagactcctggctgtcagtttctcagtggcaactatttactggttgaaaatgggaagcaataatattcatctgaccagttttctcttaaagccatttccatgatgatgatgatgggactcaattgtattttttatttcagtcactcctgataaataacaaatttggagaaataaaaatatctaaaataaattttgtttgccgtatattttcatataaaaatgcatatttgagtgctacattcgaataaatactacctttttagtg

SEQ ID NO: 19975 - DNA, 1576 bp, Homo Sapiens
tgaccgtgtgtcagaacaatcttgaatcatgaagctactaaccagagccggctctttctcgagattttattccctcaaagttgcccccaaagttaaagccacagctgcgcctgcaggagcaccgccacaacctcaggaccttgagtttaccaagttaccaaatggcttggtgattgcttctttggaaaactattctcctgtatcaagaattggtttgttcattaaagcaggcagtagatatgaggacttcagcaatttaggaaccacccatttgctgcgtcttacatccagtctgacgacaaaaggagcttcatctttcaagataacccgtggaattgaagcagttggtggcaaattaagtgtgaccgcaacaagggaaaacatggcttatactgtggaatgcctgcggggtgatgttgatattctaatggagttcctgctcaatgtcaccacagcaccagaatttcgtcgttgggaagtagctgaccttcagcctcagctaaagattgacaaagctgtggcctttcagaatccgcagactcatgtcattgaaaatttgcatgcagcagcttaccagaatgccttggctaatcccttgtattgtcctgactataggattggaaaagtgacatcagaggagttacattacttcgttcagaaccatttcacaagtgcaagaatggctttgattggacttggtgtgagtcatcctgttctaaagcaagttgctgaacagtttctcaacatgaggggtgggcttggtttatctggtgcaaaggccaactaccgtggaggtgaaatccgagaacagaatggagacagtcttgtccatgctgcttttgtagcagaaagtgctgtcgcgggaagtgcagaggcaaatgcatttagtgttcttcagcatgtcctcggtgctgggccacatgtcaagaggggcagcaacaccaccagccatctgcaccaggctgttgccaaggcaactcagcagccatttgatgtttctgcatttaatgccagttactcagattctggactctttgggatttatactatctcccaggccacagctgctggagatgttatcaaggctgcctataatcaagtaaaaacaatagctcaaggaaacctttccaacacagatgtccaagctgccaagaacaagctgaaagctggatacctaatgtcagtggagtcttctgagtgtttcctggaagaagtcgggtcccaggctctagttgctggttcttacatgccaccatccacagtccttcagcagattgattcagtggctaatgctgatatcataaatgcggcaaagaagtttgtttctggccagaagtcaatggcagcaagtggaaatttgggacatacaccttttgttgatgagttgtaatactgatgcacacattacaggagagagctgaacgttctctcagcccagagcagcaaacacatgaaagtcagaagtctctaatatatcatttgtcttttttccagtgaggtaaaataaggcataaatgcaggtaattattcccagctgacctaaagtcaataaaacattctgtttaagtgttaaaaa

SEQ ID NO: 19976 - DNA, 1326 bp, Homo Sapiens
gcacgaggaacgtttgcaattaatctagtcccagcacttttatttgtagagttctcaaatcaaaagtaacaaataattatacatcaggattgttaggaataccaattattttacaactgccactacgtgtttcttcttctctgacacaagtggcacagatccaggcttgctgtgtttaatacgattcacttcctttcgtcgacgagcttctttcatgatgcgctgttcctgaatctggctatagatagattttggtagatgtcgatgacgagctatacgttttatatgaggataatgctgaaatttctccttcaatttctggttataatccttggctgctttttctcgtgatgtaagcacacccaatttttcagaagcattagctttccacaggcgaatgttcatttcatcagatccacacataatatacttgctgtcagaagtccattttacacagataacatgttgcattctctttgtatgatatacctccctgcttcgacttttgtctacaggaaagattcgaatagatttatcgaaactagcagacacaaactccttcccagtgggagagtaatccacatcaagcactgcagatacatgatccatatggaccattacaggagtgtccagtgcacgcatatcaaaagtatataagttataatcttcatttgctgctgtaaaaatgaaagcttccatagggttccaacagattgtatttgttctcatatctaagataacctttttcaaaggagtagcttgcctcatatcgtacagtactatattcctgtcagatgcacaacttcccaagagaaatgtctcaattgggttaaatttaacactacttatactgtcaaatccccaggtcattgaacatataggattagttctttgttcatcccaaatgtctacttgctgtccacatgtggcaaaaacagcttctttccagtgatgatcaatcccagtatacactgtctttcctaatattgtatgtaatggctcttcctcgtctccatagcctggcccatccattttccactgcttcacagttttgtcatcaccaacagtgaaaaaagaagtcccacaaaagcgagtacatattcctcgtacaaagccttcatgtgcttgtattgtacggatacaattccgctgagttagattccaaattctaacctctccatcacacgccccagaaaggacagtagccagcttctctggatgctttgccaagcaattgactccatcacggtgaccatccagcgaagcaaggaatggttttgcaaatactcgttccagtttggtagcatttaaagctcttcctcgtgc

SEQ ID NO: 19977 - DNA, 422 bp, Homo Sapiens
ccccgggctgcaggaattcggcacgaggctcaacaacagacacatgatgatccgaggagaaaacatgtccaaaatcctaaaagcacgatccatggtcaccaggtgctttagagatcacttctttgatagggggtactatgaagttactcctccaacattagtgcaaacacaagtagaaggtggtgccacactcttctatcttgactattatggggaataggcttttttgactcaatcctctctggagacctgggacacctgcctcccagacgtgtgatatgttgtttgtactgctcaggcataccgggcaaaacaatccagacccctaagggacctggctgagtaggatcctgaggaaccttactggactttcgagaattttgacaacctcttgaaggagttggatgacttggtttgagatg

SEQ ID NO: 19978 - DNA, 1460 bp, Homo Sapiens
gcacgaggattttctgagctttctaaaaggaagaaaaacaagaaaggtaaaaggaaaggaccaggagagggtgttttaacgctgcgggcaaaacctccacctcctgatgaatttcttgactgtttccaaaagtttaaacacggatttaaccttctggccaaactgaagtctcatattcagaatcctagtgctgcagatttggttcactttttgtttactccattaaatatggtggtgcaggcaacaggaggtcctgaactagccagttcagtacttagtcccctattgaataaggacacaattgatttcttaaattatactgtcaatggtgatgaacggcagctgtggatgtcattgggaggaacttggatgaaagccagagcagagtggccaaaagaacagtttattccaccatatgttccacgattccgcaatggctgggagcccccaatgctgaactttatgggagccacaatggaacaagatctttatcaactggcagaatctgtggcaaatgtagcagaacatcagcgcaaacaggaaataaaaagattatccacagagcattccagtgtatcagagtatcatccagccgatggctatgcgttcagtagcaacatttacacaagaggatcccacctggaccaaggggaagctgctgttgcttttaagccaacttctaatcgccatatagatagaaattatgaaccactcaaaacacaacccaagaaatatgccaaatccaagtatgactttgtagcaaggaacaacagtgagctctcggttctaaaggatgatattttagagatacttgatgatcggaagcaatggtggaaagttcgaaatgcaagtggagactctggatttgtgccaaataacattttggatattgtgagacctccagaatctggattggggcgtgctgatccaccttatactcatactatacagaaacaaaggatggagtatggcccaagaccagctgatactccccctgctccatcacctcctccaacaccagctcctgttcctgttccccttcccccttccactccagcacctgttcctgtgtcaaaggtcccagcaaatataacacgtcaaaacagcagctccagtgacagtggtggcagtatcgtgcgagacagccagagacacaaacaacttccggtggaccgaaggaaatctcagatggaggaagtgcaagatgaactcatccacagactgaccattggtcggagtgccgctcagaagaaattccatgtgccacggcagaacgtgccagttatcaatatcacttacgactccacaccagaggatgtgaagacgtggttacagtcaaagggattcaaccctgtgactgtcaatagtcttggagtattaaatggtgcacaacttttctctctccataagatgaactgaggacagtctgccttgaaggggcgagagtctatagccaatca

SEQ ID NO: 19979 - DNA, 1207 bp, Homo Sapiens
gcacgagggcgattcggtggcacgtggagccacggcgtgggagtagggggctgaaggcaggcagcagcggccagggccgccctctgctagccgcttgggtctcgggataccccgtttcttcctgtaggtgtgggacgtgcgtgcggcgagatggacactcccccgctctcggattcggagtcggaatccgatgaatcccttgtcacagacagagagttgcaggatgcgttttcccgagggcttctgaagccaggcctcaatgtcgtgctagaggggccgaagaaggccgtgaacgacgtgaatggcctgaagcaatgtttggcagaattcaagcgggatctggaatgggttgaaaggctcgatgtgacactgggtccggtaccggagatcggtggatctgaggcgccagcacctcagaacaaggaccagaaagctgttgatccagaagacgacttccagcgagagatgagtttctatcgccaagcccaggccgcagtgcttgcagtcttaccccgcctccatcagctcaaagtccctacgaagcgacccactgattattttgcggaaatggccaaatctgatctgcagatgcagaagattcgacagaagctgcagactaaacaggctgccatggagaggtctgaaaaagctaagcaactgcgagcacttaggaaatacgggaagaaggtgcaaacggaggttcttcagaagaggcagcaggagaaagcccatatgatgaatgctattaagaaatatcagaaaggcttctctgataaactggatttccttgagggagatcagaaacctctggcacagcgcaagaaggcaggagccaaaggccagcagatgaggaaggggcccagtgctaaacgacggtataaaaaccagaagtttggttttggtggaaagaagaaaggctcaaagtggaacactcgggagagctatgatgatgtatctagcttccgggccaagacagctcatggcagaggcctcaagaggcctggcaagaaagggtcaaataagagacctggaaaacgaacaagagagaagatgaagaacagaacacactaaatagcatctttgaatacaaagaaccaagaaaaaggaatgaagactcgcaatttcacgacacactttgatcccttctgttggtgtcatgttgtaaacatttctttcaataaactaaagaaaaatttaagggggaaac

SEQ ID NO: 19980 - DNA, 1068 bp, Homo Sapiens
gcacgagggcctgccgcccgcggccctggcttcgggcttcagggagctctggtgcagtctccgcctgtcagtgccggcagtcgtccgcggcgcccgccccggtcccgcactggtgcagccatgtcctcttccccgtgggagcctgcgaccctgcgccgggtgttcgtggtgggggttggcatgaccaagtttgtgaagcctggagctgagaattcaagagactaccctgacttggcagaagaagcaggcaagaaggctttagctgatgcacagatcccttattcagcagtggaccaggcatgtgttggctatgtttttggtgactctacctgtgggcagagggctatctatcacagtttgggaatgactggaattcctataatcaatgtcaacaataactgtgctactggttctactgctttgtttatggcccgccagctgattcagggtggtgtggcagaatgtgtcttggctcttgggtttgagaagatgagtaagggaagccttggaataaaattttcagatagaaccattcccactgataagcatgttgacctcctgatcaataagtatggattgtctgctcacccagttgctcctcagatgtttgggtatgctggaaaagaacatatggaaaaatatggaacaaaaattgaacactttgcaaaaattggatggaaaaatcataaacattcagttaataacccgtattcccagttccaagatgaatacagtttagatgaagtgatggcatctaaagaagtttttgattttttgactatcttacaatgttgtcccacttcagatggtgctgcagcagcaattttggccagtgaagcatttgtacagaaatatggcctgccatccaaagctgtggaaattttggcacaagaaatgatgactgatttgccaagctcgtttgaagaaaaaagcattattaaaatggttggctttgatatgagtaaagaagctgcaagaaaatgctatgagaaatctggcctgacaccaaatgatattgacgtaatagaacttcacgattgcttttctaccaacgaactccttacttat

SEQ ID NO: 19981 - DNA, 1051 bp, Homo Sapiens
  misc_feature (606)..(615): n is a, c, g, or t
cccccgggctgcaggaattcggcacgaggctcatatttacacaagcgccaggagaggccaaagaacctttactccaggacacaaatgtgtgacgactgaaatcaggaagatttttctatcagcacccaggtcttagttttcacctctagttctggatgtacattccatttccatccacagtgtactttaagattgtcttaagaaatgtatctgcatgaactccgtgggaactaaaggaagtgggaacttagaaccagacagttttccaaagatgttacaatttcttttgaaaaaccttttgtttattagcaccaatttctcgccactaagctatttgttttattatacatcctttaattaaaaactatatatgtaacttcttagatattagcaaatgtctctgctaccatttccttaaggtgttgagctttaactctatgctgactcagtgagacacagtaggtagtatggttgtggacctatttgttttaacattgtaaaattttgagtcagattttaatattgtaaaatcttgggtcaaataattcaaagccttaatgcagatgcactaaaacaaagaaatggtaaatgaattgtttgcatttnnnnnnnnnnctcttaagaaaactgtactaaatctgaatcatgttttgagcttgtttgcagtacttttaaacattattcactactgtttttgaagtgagaaagtatcagccatttagcatttaagttggggtatttagagcctgtaatctaaatgctggctcaaatttattccccagctacttcttataccactattcttttaatgtttgcataatcataagcacctcaacacttgaatacataatctaaaaattatatagtaaagctggtagccttgaaaatgtcagtgtgatatctattatgtagataaatatatatagtgggcctttcaggactgtcacagtaacactttatttacagagctaatgtttgtcctaaattttcaggaccctagaggagagctttatacactaccgatgtgaatttctctaaagtgtatattttt

SEQ ID NO: 19982 - DNA, 934 bp, Homo Sapiens
gcacgaggggtacatcagttatcttgaacattctgacgtgtaaaggaccataaggtacatcatttatcttgaacattccgacgtgtaactcacagccgaagcactccatcccagatttgttgtctgggaacttaggatcctctaggaagctaatctgcttagtctatttttagaggattgatctctggcacaagcagcttcctggagttacctcagcagaagactagaattagagaaaagggaaagaccttttcttctagtaagtgtcaagtacagatgctctttgacttatgatggggttatgtcccagtaaacccattggaagtcaaatgcatttaatacccctgactggacaccacagcttagcctcgtccaccctaaatgtactcagaacacttagaattgcccacagttgggcagaatcatctaacacaaactctattttataatcgagtgttgaatatatcatgtaatttattgaatattgtacattatgttgaaattgcaaccatttcacaccattgtaaagtccaaaaatcagaagctgaggactgtctgtacatgacattgaatcacatgaatggattactagggcctgaggggtgtccgttctttagaaaaatgtagagtatatatatcttcagggctgtgaattccatactagttatcaatattttaagatcattctgtatatacatattttaaattatgcaagcaaactaggaggagaatgtgcaattttgagggatacctaatttgcattcggttaggggatatttttcaacctcttgctttatactctgatatggggtgtgtttatgaacttgttaatgttatttaatcatgcagatttccagtcagtgtattgctcatttactgacaaaaagggaaaatacgaaacacagaaagggaaaataaactgacttttataatg

SEQ ID NO: 19983 - DNA, 952 bp, Homo Sapiens
gcacgaggggccgatcgatttgccagtgaggccagtggctaccaggacaacattgcgcgcctggaggaggaaatccggcacctcaaggatgagatggcccgccatctgcgcgagtaccaggacctgctcaacgtgaagatggccctggatgtggagattgccacctaccggaagctgctggagggagaggagagccggatcaatctccccatccagacctactctgccctcaacttccgagaaaccagccctgagcaaaggggttctgaggtccataccaagaagacggtgatgatcaagaccatcgagacacgggatggggaggtcgtcagtgaggccacacagcagcagcatgaagtgctctaaagacagagaccctctgccaccagagaccgtcctcacccctgtcctcactgctccctgaagccagccttcttccatcccaggacaccacacccagcctcagtcctcccctcacagcctctgacccctcctcactggccatccctcgtggtccccaacagcgacatagcccatccctgcctggtcacagggcatgccccggccacctctgcggaccccagctgtgagccttggctgttggcagtgagtgagcctggctcttgtgctggatggagcccaggcgggagcggtggccctgtccctcccacctctgtgacctcaggcactagcctttggctctggagacagccccagagcagggtgttgggatactgcagggccaggactgagccccgcagacctccccagcccctagcccaggagagagaaagccaggcaggtagccagggggactagcccctgtggagactggggggcttgaaattgtccccgtggtctcttactttcctttccccagcccagggtggacttagaaagcaggggctacaagagggaatccccgaaggtgctggaggtgggagcaggagat

SEQ ID NO: 19984 - DNA, 861 bp, Homo Sapiens
gcacgaggccccagtcccggctgccccctccgccaccgccgccgcccgccggcaggttccctggtcagcgtcccatcccggtcgggagttctctccaggcggcacgatgccgaggaaacagtgaccctgagcgaagccaagccgggcggcaggaacttctgcaatgtcccatcaacctctcagctgcctcactgaaaaggaggacagccccagtgaaagcacaggaaatggacccccccacctggcccacccaaacctggacacgtttaccccggaggagctgctgcagcagatgaaagagctcctgaccgagaaccaccagctgaaagaagccatgaagctaaataatcaagccatgaaagggagatttgaggagctttcggcctggacagagaaacagaaggaagaacgccagttttttgagatacagagcaaagaagcaaaagagcgtctaatggccttgagtcatgagaatgagaaattgaaggaagagcttggaaaactaaaagggaaatcagaaaggtcatctgaggactccactgatgactccaggcttcccagggccgaagcggagcaggaaaaggaccagctcaggacccaggtggtgaggctacaagcagagaaggcagacctgttgggcatcgtgtctgaactgcagctcaagctgaactccagcggctcctcagaagattcctttgttgaaattaggatggctgaaggagaagcagaagggtcagtaaaagaaatcaagcatagtcctggggcccacgagaacagtctccactggcacggcattgtctaaatataggagcagatctgcagatggggcccagaattacttcgaacatgaggagttaactg

SEQ ID NO: 19985 - DNA, 1339 bp, Homo Sapiens
  misc_feature (1105)..(1150): n is a, c, g, or t
ggctgcaggaattcggcacgaggcctgtttctccagctccccagcgaggaatcagctcgcagcccgcggcccagcgcacccgcagcagcgcccgcagctcgtccgcgccatgttccaggcggccgagcgcccccaggagtgggccatggagggcccccgcgacgggctgaagaaggagcggctactggacgaccgccacgacagcggcctggactccatgaaagacgaggagtacgagcagatggtcaaggagctgcaggagatccgcctcgagccgcaggaggtgccgcgcggctcggagccctggaagcagcagctcaccgaggacggggactcgttcctgcacttggccatcatccatgaagaaaaggcactgaccatggaagtgatccgccaggtgaagggagacctggctttcctcaacttccagaacaacctgcagcagactccactccacttggctgtgatcaccaaccagccagaaattgctgaggcacttctgggagctggctgtgatcctgagctccgagactttcgaggaaatacccccctacaccttgcctgtgagcagggctgcctggccagcgtgggagtcctgactcagtcctgcaccaccccgcacctccactccatcctgaaggctaccaactacaatggccacacgtgtctacacttagcctctatccatggctacctgggcatcgtggagcttttggtgtccttgggtgctgatgtcaatgctcaggagccctgtaatggccggactgcccttcacctcgcagtggacctgcaaaatcctgacctggtgtcactcctgttgaagtgtggggctgatgtcaacagagttacctaccagggctattctccctaccagctcacctggggccgcccaagcacccggatacagcagcagctgggccagctgacactagaaaaccttcagatgctgccagagagtgaggatgaggagagctatgacacagagtcagagttcacggagttcacagaggacgagctgccctatgatgactgtgtgtttggaggccagcgtctgacgttatgagcgcaaaggggctgaaagaacatggacttgtatatttgtacnnnnnnnnnnnnnnnnnnnnnnnnnnnnnnnnnnnnnnnnnnnnnntttaaagggtgtacttatatccacactgcacactgcctggcccaaaacgtcttattgtggtaggatcagccctcattttgttgcttttgtgaactttttgtaggggacgagaaagatcattgaaattctgagaaaacttcttttaaacctcacctttgtggggttttggagaaggttatcaaaaatttc

SEQ ID NO: 19986 - DNA, 1195 bp, Homo Sapiens
gcacgaggcttttgttccaccaccaagtgcacaagagatacctgtggtctctgcacctgctccagcccctattcacaaccagtttccagctgaaaaccagcctgccaatcagaatgctgctcctcaagtggttgttaatcctggagccaatcaaaatttgcggatgaatgcacaaggtggccctattgtggaagaagatgatgaaataaatcgagattggttggattggacctattcagcagctacattttctgtttttctcagtatcctctacttctactcctccctgagcagattcctcatggtcatgggggccaccgttgttatgtacctgcatcacgttgggtggtttccatttagaccgaggccggttcagaacttcccaaatgatggtcctcctcctgacgttgtaaatcaggaccccaacaataacttacaggaaggcactgatcctgaaactgaagaccccaaccacctccctccagacagggatgtactagatggcgagcagaccagcccctcctttatgagcacagcatggcttgtcttcaagactttctttgcctctcttcttccagaaggccccccagccatcgcaaactgatggtgtttgtgctgtagctgttggaggctttgacaggaatggactggatcacctgactccagctagattgcctctcctggacatggcaatgatgagtttttaaaaaacagtgtggatgatgatatgcttttgtgagcaagcaaaagcagaaacgtgaagccgtgatacaaattggtgaacaaaaaatgcccaaggcttctcatgtctttattctgaagagctttaatatatactctatgtagtttaataagcactgtacgtagaaggccttaggtgttgcatgtctatgcttgaggaacttttccaaatgtgtgtgtctgcatgtgtgtttgtacatagaagtcatagatgcagaagtggttctgctggtacgatttgattcctgttggaatgtttaaattacactaagtgtactactttatataatcaatgaaattgctagacatgttttagcaggacttttctaggaaagacttatgtataattgctttttaaaatgcagtgctttactttaaactaaggggaactttgcggaggtgaaaacctttgctgggttttctgttcaataaagttttactatgaatgaccctg

SEQ ID NO: 19987 - DNA, 988 bp, Homo Sapiens
gcacgaggactgggagtcgttagtgaggatgacgcggcatggcaagaactgcaccgcaggggccgtctacacctaccacgagaagaagaaggacacagcggcctcgggctatgggacccagaacattcgactgagccgggatgccgtgaaggacttcgactgctgttgtctctccctgcagccttgccacgatcctgttgtcaccccagatggctacctgtatgagcgtgaggccatcctggagtacattctgcaccagaagaaggagattgcccggcagatgaaggcctacgagaagcagcggggcacccggcgcgaggagcagaaggagcttcagcgggcggcctcgcaggaccatgtgcggggcttcctggagaaggagtcggctatcgtgagccggcccctcaaccctttcacagccaaggccctctcgggcaccagcccagatgatgtccaacctgggcccagtgtgggtcctccaagtaaggacaaggacaaagtgctgcccagcttctggatcccgtcgctgacgcccgaagccaaggccaccaagctggagaagccgtcccgcacggtgacctgccccatgtcagggaagcccctgcgcatgtcggacctgacgcccgtgcacttcacaccgctagacagctccgtggaccgcgtggggctcatcacccgcagcgagcgctacgtgtgtgccgtgacccgcgacagcctgagcaacgccaccccctgcgctgtgctgcggccctctggggctgtggtcaccctcgaatgcgtggagaagctgattcggaaggacatggtggaccctgtgactggagacaaactcacagaccgcgacatcatcgtgctgcagcggggcggtaccggcttcgcgggctccggagtgaagctgcaagcggagaaatcacggccggtgatgcaggcctgagtgtgtgcgggagaccaaataaaccggcttgggtgcgcaaaaaaaacctcgtgc

SEQ ID NO: 19988 - DNA, 1273 bp, Homo Sapiens
  misc_feature (252)..(265): n is a, c, g, or t
cagaaatatccagatgcagtgaactgccagaaggtaaccagtctcaaacatgcttatcccattatcaaccctgaaagtttgcttgtcctttaagataaaaatgtaatgttgtgatattccttccagtaatgccactgtattttgtctccaaataaaagaagcttattgtagtatgtttgcagaaaaattctaaacaaaaattatacagcttattagagtgtgggaatagggatctaaattttaaataaaatnnnnnnnnnnnnnnaattggtgctgattttataattgcgcagtttgtttagttttttcttacttttaaattccaacttaaaattatgaggtttcagaaatatattgaaagtttaacaatgtttaaaaatagaaaagcatgagtgttcatgctttaaaatgatttttaaatttgtattttatattgttttatctatctgtctttgcaagcagtcttcaggttaaagatacttctaacaggttacagtacatttcctctgtatgtaaattagatgggataatagaattcataacccataatattctttgaaagctaagctttaaacttcattttatgtcctttcacaaataaattagtttaaaacagaaagtggctacttgccattttgacatcaactcattttgcgaggcttaggcagctagacatcgtttaaaacaaaatattaacttatattacatgtgtatctatctattgtcagtcgtctctcagttcttgaggtatattattttaatcattccatgccttaatatgcttgcaatacaagaatatcttcagatgggtgaataccaaaaggctttcagtttttagtcagaaatcaagcattgggctgtggtagccaaaaaccataggttagctaaaaagatcatgatacaattattttattaagtcatggttaataacaaatgaatccagacttgtctaacagattttccatcaacaaatattgttatgtgcaaaagtattgcctatgttgttttacacaccactgcattaactagaactgctgagaggactgtatatatgattttaaacctaagttgattttttttctcactcttgaaaggagtacttctttgtgaaagcagttcttacagctttgttttcaaccagctaaaaatgttttatatattactctaacctgttgtcctccacattctattgtcctaattgtactgttttctgatttgtatttatgtcttgagacagtaactttttgaataaaaataaacctacagtaaaaaa

SEQ ID NO: 19989 - DNA, 1049 bp, Homo Sapiens
  misc_feature (481)..(495): n is a, c, g, or t
  misc_feature (766)..(783): n is a, c, g, or t
gcacgagggggaaccccagtccccggacgaattgctcccgaaaggcgacgcggagaagcctgaggaggagctggaggaggacgacgatgaggagctagatgagaccctgtcggagagactatggggcctgacggagatgtttccggagagggtccggtccgcggccggagccacttttgatctttccctctttgtggctcagaaaatgtacaggttttccagggcagccttgtggattgggaccacttcctttatgatcctggttcttcccgttgtctttgagacggagaagttgcaaatggagcaacagcagcaactgcagcagcggcagatacttctaggacctaacacagggctctcaggaggaatgccaggggctctaccctcacttcctggaaagatctagattgttattgctgtttgagctgtctcagtgggataagtttgaaattcaagtgtttgaactgctgataatttggannnnnnnnnnnnnnnaactttggcacattgatctatctaaacccggtggggagaattatccccacattgtctcatggaaagactcaacttgcaactgtgccctccacactatccttacttctgtctccactctgataccagagtgcagccatgcagacggttattccagctctggtcacccgactcctttcaccaaattgctcctaactggaagatctcactttccccttgtggggtaggaaccgatgccagtgggagggatgtgcccctgaccctttaaggctgnnnnnnnnnnnnnnnnnnaaagaatggagttgttggggcgggacatgcccccaatgtgaaacagacaaaatgcattacacctgtagtgtaaagtggcccctatgaatccctatgtatgagaggagggaggcaggctgcagcttcagccacagaatggggactatggaagacagcaggagctcatttcctttgcacattttggctgttagacctgtgtttgtgtttaaaaaaagagaagtcagtgctcactttttgtatttaaatattaaaaatgattccaactg

SEQ ID NO: 19990 - DNA, 1832 bp, Homo Sapiens
gcacgaggggttgctgggcggcccggtctcggagaagaggggagagtggcgggccgctgaataagcttccaaaatgatgcccacaccagttatcctattgaaagaggggactgatagctcccaaggcatcccccagcttgtgagtaacatcagtgcctgccaggtgattgctgaggctgtaagaactaccctgggtccccgtggcatggacaagcttattgtagatggcagaggcaaagcaacaatttctaatgatggggccacaattctgaaacttcttgatgttgtccatcctgcagcaaagactttggtagacattgccaaatcccaagatgctgaggtgggtgatggcaccacctcagtgaccttgctggctgcagagtttctgaagcaggtgaaaccctatgtggaggaaggtttacacccccagatcatcattcgagctttccgcacagccacccagctggcagttaacaagatcaaagagattgctgtgaccgtgaagaaggcagataaagtggagcagaggaagctgctggaaaagtgtgccatgaccgctctgagctccaagctgatctcccagcagaaagctttctttgctaagatggtggtggatgcagtgatgatgctcgatgatttgctgcagcttaaaatgattggaatcaagaaggtacagggtggagccctcgaggattctcagctggtagctggtgttgcattcaagaagactttctcttacgctgggtttgaaatgcaacccaaaaagtaccacaatcccaagattgcccttttgaatgtcgagctcgagttgaaagctgagaaagacaatgctgagataagagtccacacagttgaggattatcaggcaattgttgatgctgagtggaacattctctatgacaagttagagaagatccatcattctggaggccaaagttgtcttgtccaaactccccattggggatgtggccacccagtactttgctgacagggacatgttctgtgctggccgagtacctgaggaggatctgaagaggacaatgatggcctgtggaggctcaatccagaccagtgtgaatgctctgtcagcagatgtgctgggtcgatgccaggtgtttgaagagacccagattggaggcgagaggtacaatttttttactggctgccccaaggccaagacatgcaccttcattctccgtggcggcgccgagcagtttatggaggagacagagcggtccctgcatgatgccatcatgatcgtcaggagggccatcaagaatgattcagtggtggctggtggcggggccattgagatggaactctccaagtacctgcgggattactcaaggactattccaggaaaacagcagctgttgattggggcatatgccaaggccttggagattatcccacgccagctgtgtgacaatgctggctttgatgccacaaacattctcaacaagctgcgggctcggcatgcccaggggggtacatggtatggagtagacatcaacaacgaggacattgctgacaactttgaagctttcgtgtgggagccagctatggtgcggatcaatgcgctgacagcagcctctgaggctgcgtgcctgatcgtgtctgtagatgaaaccatcaagaacccccgctcgactgtggatgctcccacagcagcaggccggggccgtggtcgtggccgcccccactgagaggcaccccacccatcacatggctggctggctgctgggtgcacttaccctccttggcttggttacttcattttacaaggaaggggtagtaattggcccactctctcctactggaggctatttaat

SEQ ID NO: 19991 - DNA, 1281 bp, Homo Sapiens
gcacgaggcaggaccttaactgatgtaagaaatctcaaatttccaccattatttactcagaaatatccttgtgagtacgtgatggttcaagacatgctctctccatcccccatggaacgacctgaagctataaacatcattgaaaatgctgtatttgaggacttggactttccaggaaaaacagtgctcagacagaggtctcgctccttgagttcatcgggaacaaaacattcaagacagtccaacaactcccatagccctttgccaagcaattagccttaagttgtgctagcaaccctaataggtgatgcagataatagcctacttcttagaatatgcctgtccaaaattgcagacttgaaaagtttgttcttcgctcaatttttttgtggactactttttttatatcaaatttaagctggatttgggggcataacctaatttgagccaactcctgagttttgctatacttaaggaaagggctatctttgttctttgttagtctcttgaaactggctgctggccaagctttatagccctcaccatttgcctaaggaggtagcagcaatccctaatatatatatatagtgagaactaaaatggatatatttttataatgcagaagaaggaaagtccccctgtgtggtaactgtattgttctagaaatatgctttctagagatatgatgattttgaaactgatttctagaaaaagctgactccatttttgtccctggcgggtaaattaggaatctgcactattttggaggacaagtagcacaaactgtataacggtttatgtccgtagttttatagtcctatttgtagcattcaatagctttattccttagatggttctagggtgggtttacagctttttgtacttttacctccaataaagggaaaatgaagctttttatgtaaattggttgaaaggtctagttttgggaggaaaaaagccgtagtaagaaatggatcatatatattacaactaacttcttcaactatggactttttaagcctaatgaaatcttaagtgtcttatatgtaatcctgtaggttggtacttcccccaaactgattataggtaacagtttaatcatctcacttgctaacatgtttttatttttcactgtaaatatgtttatgttttatttataaaaattctgaaatcaatccatttgggttggtggtgtacagaacacacttaagtgtgttaacttgtgacttctttcaagtctaaatgatttaataaaactttttttaaattaaaacctcgtgc

SEQ ID NO: 19992 - DNA, 1502 bp, Homo Sapiens
gcacgagggttcagaataaagtttaggccacataaaattgctgtttaatgtagtcgatggaagactttaaactatgcttctagcttatttttccctcattcattcagcaaatctctattgagttcttcagtgagaaggagcaggcactgggcctggaatggaaggcgggaatgaatgggcctctgatggtgagaggtgacggggtccctcagctgtgagatgcaaggggcgccttgcagcctccataatatacatttgactttgcaaacgtctagacatgttttctgaacctttttcaggacatttcaacctcgggactattcatattagtggcctgagaggtgtttgttgtggggccaccctgtgcatggtagaatgttcagcagcattcctgccatccatatccattaggtgccagtagcacccccgctagagctgtgaaaaattctctccagacatagtcagatgtctcctggggccatatcacccctccgttaagaaccactgatgtcttttacaaaccaggagttatcctcctggtggttaatatggtgtaaccaaagaatcttgcactcaatgcacagtgtgatgttaactaaaacgagttaaatatttaggaggcttgacagctacctgcattgtagaaccttttcttatctcagtggacccttctataacctaaatataccattgatgattcttcttccattcagtgacatccacagattatgcagctatacttgtgaaatcgtgcatgaggccccagggcaccgttctagaacaacgtcacttcacacaggcagctgagaaaggttctcttgcttttccagtatcttcctaaggatggagcccaaaattgcagagcagtaactttggaataaaaccagggtgggtataaaacttcttattcttaaatttacatataagatctattaagcttgacacatctgtgtcatcacgcactgaagacaggaagcagttcactgagtcagctggttcccaagctcgcacagaaggtgataagttactatcaaatgccagtgagaatcttcttatagaataacctgggcccaagtgattttagtacaaaacttgcccttctttggtttaattttctatgtgcttttaggtgtgaatccagatatgcggtcttaattcctttggaaatacacagttcgtttagttactgtacactcttgtttgttcaataaactgcatatcaacttcccacaaaagctgacttttttgggtctcttacatataaagtaggtcattgagttgatttttttggaggtatctcatattggtcgaattcttctggtatggactcttgccttatatagaggcttctatttctcttaagtcaccatcaatacaacggccggagtttctgtttttgcaataagaagatgttggtattttatgtagggtaaatgtgactgggaatacacctttggaacggaattctttatcaataaagtttcacaatccgtccctctccc

SEQ ID NO: 19993 - DNA, 1290 bp, Homo Sapiens
gcacgagggaaaatcttaaaacaagcatttgtacgtttttagcagttttatcacatttagacattattactcaaaatattccagaaaagaaactaattctgaagcaagcccttatagttgtgctgcagtggtgtttcaatcacaattttagtgttcgactgtatgctttagttgctcttaagaaactctggactgtgtgtaaagtgttaagtgttgaagaatttgatgccctgactcctgtgattgaatccagcctccatcaagtggaaagcatgcacggagcagggaatgccaagaagaattggcaacgcattcaggagcatttcttttttgcaacatttcacccactcaaggattattgtctagagaccatattttacatccttccacgcctttcaggccttattgaagatgaatggatcaccattgataaatttaccagattcactgatgttcctttagctgcgggatttcagtggtacctttctcaaactcaacttagtaaactaaaaccaggtgactggtctcagcaagacataggtactaatttggtcgaagcagataaccaagcggagtggaccgacgttcagaagaagattatcccgtggaacagtcgtgtttccgacttagacctggagctcctgtttcaggatcgtgctgccagacttggaaagtcaattagtagactcatcgttgtggcctcgctcatcgacaaaccgaccaatttaggaggactgtgcaggacctgtgaggtatttggggcttcagtgctcgttgttggcagccttcagtgtatcagcgacaaacagtttcagcacctcagtgtctctgcagaacagtggcttcctctagtggaggtaaaaccacctcagctaattgattatctgcagcagaagaaaacagaaggttataccatcattggagtggaacaaactgccaaaagtttagacctaacccaatattgctttcctgagaaatctctgctcttgttgggaaattcctcaacagggcattatccgctccctgaatgtccatgtgagtggagccctgctgatctgggagtacaccaggcagcagctgctctcgcacggagataccaagccatgatgtgccttctttagtgaactgctgctgctgttcagacttttttaaaaaaactatttggactaaagaaacagattctgaaatttattgtgataatttgtattcttttttcttgcaatttatgccaaaagtttgccatgtgccttaacatattactatatattttcccctttaataacacttttg

SEQ ID NO: 19994 - DNA, 1649 bp, Homo Sapiens
  misc_feature (308)..(343): n is a, c, g, or t
  misc_feature (1352)..(1373): n is a, c, g, or t
gcacgagggctggctcctgcataggacactgaaaaccaacttcgattatcttcaagaggtgcctatcttaacactggatgttaatgaagactttaaagacaaatatgaaagtctggttgaaaaggtcaaagagtttttgagtactttgtgatcttgctgaagactacaggcagccaaatggttccagatacttcagctttgtgtatcttcgtaacttcatattaatataagtttctttagaaaacccaagtttttaatcgtttttgttttaaggaaaaaagatttttaaaatgaatcttatgcaaaannnnnnnnnnnnnnnnnnnnnnnnnnnnnnnnnnnnaaaaaagacatttaaagacaaagacattatttctcatagcaggaaatgtagaggtagatggttccagtatcagcatagtgactaaactacattataaaagatccagcttccttctgtcattcccctcttttgtcttcctcagcaggttggcttttttccctggtgcctctcacttcgttggtgaccagtttcttaaactgaaagctttaatgttacatagtaaatggtagtgtgtcctgtgtaaattagtgtacctattaaaagttgcaaagtggaattaaaggaatccctagaataaggattctgaagttttattttaaattattatcttcttaacagtttagtcccacctcttacttcctgcctcagtctgctttctctactgtctggataattaggcagcctgctataaagttaaagtcacacatttctattttgcaaacactgtgattactctttgctttgtagtttgctttgctttgtagggttctgcttttaagtttttctctttttcagacaaattactgataaaaatgatattgctctatatgtaatatatcctgaaagcattattttttgttgaataggaaataaaattaatgaagacagaggctagaaagcatccattaattaatgagacacacttaactacttatctctaaaccatctatgtgaatatttgtaaaaataatgaatggactcatcttagttctgtatataaatatattttctttctagtttgtttagttaaggtgtgcagtgtttttcctgtgtattaaacctttccattttacgttttagaaaattttatgtattttaaaataaggggaagagtcattttcacttttaaactactatttttctttccaagtcatttttgtttttggtttcttattcaaagatgataatttagtggattaaccagtccagacgcactgatctttgcaaaggagacttaatttcaaatctgtaattaccatacataaactgtctcattatacgtatgcannnnnnnnnnnnnnnnnnnnnnggtataaattaatttgttaattaaatatttcttaagtataaaccttatgaactacagtggagctacactcattgaaatgtaatttcagttctaaaaaggatgtaataatcattttagaattaaaaatttatttctacttttaaataaattatgaatattaaaggtgaaaattgtataaattactttgattccattttaagtggagacatattttcagtgatttttagtaacctttaaaattgtataatgacttttaaaattttgtagaattgaaaa

SEQ ID NO: 19995 - DNA, 1134 bp, Homo Sapiens
gcacgaggcagcgacccaccatggagacccgctacaacctgaagagtccggctgttaaacgtttaatgaaagaagcggcagaattgaaagatccaacagatcattaccatgcgcagcctttagaggataacctttttgaatggcacttcacggttagagggcccccagactccgattttgatggaggagtttatcacgggcggatagtactgccaccagagtatcccatgaaaccaccaagcattattctcctaacggctaatggtcgatttgaagtgggcaagaaaatctgtttgagcatctcaggccatcatcctgaaacttggcagccttcgtggagtataaggacagcattattagccatcattgggtttatgccaacaaaaggagagggagccataggttctctagattacactcctgaggaaagaagagcacttgccaaaaaatcacaagatttctgttgtgaaggatgtggctctgccatgaaggatgtcctgttgcctttaaaatctggaagcgattcaagccaagctgaccaagaagccaaagaactggctaggcaaataagctttaaggcagaagtcaattcatctggaaagactatctctgagtcagacttaaaccactctttttcactaactgatttacaagatgatatacctacaacattccagggtgctacggccagtacatcgtacggactccagaattcctcagcagcatcctttcatcaacctacccaacctgtagctaagaatacctccatgagccctcgacagcgccgggcccagcagcagagtcagagaaggttgtctacttcaccagatgtaatccagggccaccagccaagagacaaccacactgatcatggtgggtcagctgtactgattgtcatcctgactttggcattggcagctcttatattccgacgaatatatctggcaaacgaatacatatttgactttgagttataatatggttttgtgacttatgagctgtgactcaactgcttcattaaacattctgcattgggtataatctaagaattgtttacaaaaagattattttgtatttacccttcattcctttttttgatccttgtaagtttagtataatatatctagacattca

SEQ ID NO: 19996 - DNA, 1972 bp, Homo Sapiens
  misc_feature (1575)..(1612): n is a, c, g, or t
gcacgaggccttcctgtattgctattaaggagtcagcaaaagtgggtgatcaagctcaaaggagggtgatgaaaggtgttgatgacctagacttcttcattggtgatgaagcaatagaaaaacctacatatgcaacaaagtggccaatccgccatggtatagttgaagattgggacttaatggaaaggtttatggagcaagtgatctttaaatatttaagggcagaacctgaagaccattattttcttttgactgaacctccattgaatactccagaaaacagggaatatactgctgaaataatgtttgagtccttcaatgttccaggcttgtacattgctgtgcaggctgttcttgccttagctgcatcttggacctcaagacaagtaggagaacggacgttgaccggtacggtaatagacagtggagatggtgtcactcatgtcattcctgtggctgaagggtatgtgattggcagctgtattaaacacattccaatcgcaggacgagatataacatattttattcagcaactgctgagagaccgagaagtaggaatccctccagaacaatccttggaaactgctaaggcagtaaaggagcgctatagttatgtctgcccagatttagtaaaagaatttaacaagtatgatacagatgggtcaaaatggattaaacagtatactggaatcaatgctatctcaaagaaagagttttctatcgatgttggttatgagagatttttgggacctgaaatcttttttcatccagagtttgctaatccagactttacacaacctatctcagaagttgtagatgaagtaattcagaattgtcctattgatgtcagacgtcctctctacaagaatattgtcctctctggaggttcaaccatgttcagggactttggacgtcgcttgcaaagagatttgaaaagaactgtagatgcccggctgaaattaagtgaggaattgagtggtggtagattgaagccaaaacctattgatgtacaagtcattacacaccacatgcagcgatatgcagtttggtttggaggatcaatgctggcttccacgcctgagttctaccaagtatgccacaccaaaaaggattatgaagaaattggacctagcatttgtcgtcacaatccagtgtttggagtcatgtcgtaaaattggcttcatagttattggggttagggaggtggggaagagataatctttctgattacctgttttgtctggatggctggttttgaggttttaaacctgacttgaaatagtaacaccaaacatgattatacaggaatattttaataagtgtatcaccatgcagatgtagaagagagcgaaagtgattgtgtttttctttagattgaatatttgaatcttatgtgtaacaaaaagaagtgggttttagttctttctgtgccctgatattttgtatattaatgaattatccaagattcgatgggatttatcagtgtgtagatagctctataatgcttgaattgtacacttctaagtgtgcagtgcaagagcttgtttatatttcatactttttatactttgaggnnnnnnnnnnnnnnnnnnnnnnnnnnnnnnnnnnnnnnccatgaccaagtaaaggataaattcaaaaaatagcctcatgagacttggcatacacactcatgggattccagttattatggagtgcttccatccctctccaccccttccccccaaaaggttttctttgcaagtgcttttggaactaagagctagtatcttggattaactgatgcctgctagtgctttctgattactcgcattctgtttcttgctttaaaagaagagtaaagacaagagtgttggaccagtattgcagttctgtagtgtcatttcttataaaaaacaaaacaacaacaataatttatcaaaattggcatatttaaagcctaacattctaataaaggcacaaatttcttttt

SEQ ID NO: 19997 - DNA, 932 bp, Homo Sapiens
gcacgaggcttacgtttcaaagtcctgctgatgctagggcttttgatagaggtatccgaagagctatagaggatatttctcaaggatgccccgaatcaaaaaatgaagctgaaggggcagatgacttacaagcaaatgaagaggattcttccagttctctagtgaaggatcacctttttcagcaagagacagttgttaccagtgagccttatagaagctcaaatataagaccttctccctttgaagatctgaatgccagaagagtctacatgcaaagccaagccaatcagataacatttggtcagccaggcttggacattcagagcagaagtatggaatacgtacagcggcaaatatccaaggaatgtggaagcctaaagtcccaaaatagggtccctttgaaatcaatcagacatgtcagctttcaagatgaggatgagattgtcagaataaaccctcgagatatcttaatacgtcgctatgcagactacagacatcctgacatgtggaaaaatgacttggaaagagatgatgctgattccagtattcagttttctaaaccagacagtaaaaaatcagactatctgtactcttgtggggatgagactaagttaagttcacccaaagactctgtggtatttaagacgcagccttcctcattaaaaattaagaagtcaaaacgaagaaaagaggatggtgaacgttctcgctgcgtatactgccaggaaaggtttaatcatgaagaaaatgtcacgggaaaatgtcaggatgctccagaccctattaaaagatgcatatatcaagttagttgcatgctctgtgcagagagcatgttgtatcattgtatgtcagactcagagggagatttttctgatccctgttcgtgtgacactaacgacgacaagttctgcttgcgatggttagccctggta

SEQ ID NO: 19998 - DNA, 852 bp, Homo Sapiens
cttaaggaatccattcatgttggaagcccaaattccctaacatatgcactaggggttggctctgggaagtaacagtcaccaaagtctggaagttcttcccttgaacttgagtacccactgtactattggaagccaaatggccaggtattggcaatggccagggaaatcccaagctggctcaaaagccagtggttagggaaaaaaaaggtcaagtggactggtaaaaattctacttcaactgcccttattcataaatacaattttcctaacagtctcactctccaccagtcccatatccacaacccactcacaggcttcaagcagcaggaccttgccatattaccctaaatctccatattgcagcagctctaccctgtcccctcagcttcttcaataatgaccttttttaaaattctcttccctgactgctatatttacacataaatttcttagtgttactgaagcttcaaagctgctgcctatatgctataatgcaacaaaaatagccttgagggccaaatataaatatgatttcaagatctaccacagtcctagaaaataaactttatgggctgtgaatggtaccatgagggtttctcaagaaccatatctggttccctatattcaggtaaccatgagtttgtgctttgggaaaatgcaaagggctataaaaattcatgaggcttatttaacccttgccttctttaaaacatttcatttttattttagtgttcagtccggttctagtcttagcagtgtcttatggttacaatctactcttctgtttctccaccagttggcaaataacacaacctctcacaaaatgaatttaaaaaggactcccggaaaaaa

SEQ ID NO: 19999 - DNA, 1621 bp, Homo Sapiens
ccgcggtggcggccgctctagaaccatttaaaatcccccgggctgcaggaattcggcacgagggcgctgaggaggaaactgaaaaacagagtagcagctcagactgccagagatcgaaagaaggctcgaatgagtgagctggaacagcaagtggtagatttagaagaagagaaccaaaaacttttgctagaaaatcagcttttacgagagaaaactcatggccttgtagttgagaaccaggagttaagacagcgcttggggatggatgccctggttgctgaagaggaggcggaagccaaggggaatgaagtgaggccagtggccgggtctgctgagtccgcagcactcagactacgtgcacctctgcagcaggtgcaggcccagttgtcacccctccagaacatctccccatggattctggcggtattgactcttcagattcagagtctgatatcctgttgggcattctggacaacttggacccagtcatgttcttcaaatgcccttccccagagcctgccagcctggaggagctcccagaggtctacccagaaggacccagttccttaccagcctccctttctctgtcagtggggacgtcatcagccaagctggaagccattaatgaactaattcgttttgaccacatatataccaagcccctagtcttagagataccctctgagacagagagccaagctaatgtggtagtgaaaatcgaggaagcacctctcagcccctcagagaatgatcaccctgaattcattgtctcagtgaaggaagaacctgtagaagatgacctcgttccggagctgggtatctcaaatctgctttcatccagccactgcccaaagccatcttcctgcctactggatgcttacagtgactgtggatacgggggttccctttccccattcagtgacatgtcctctctgcttggtgtaaaccattcttgggaggacacttttgccaatgaactctttccccagctgattagtgtctaaggaatgatccaatactgttgcccttttccttgactattacactgcctggaggatagcagagaagcctgtctgtacttcattcaaaaagccaaaatagagagtatacagtcctagagaattcctctatttgttcagatctcatagatgacccccaggtattgtcttttgacatccagcagtccaaggtattgagacatattactggaagtaagaaatattactataattgagaactacagcttttaagattgtacttttatcttaaaagggtggtagttttccctaaaatacttattatgtaagggtcattagacaaatgtcttgaagtagacatggaatttatgaatggttctttatcatttctcttccccctttttggcatcctggcttgcctccagttttaggtcctttagtttgcttctgtaagcaacgggaacacctgctgagggggctctttccctcatgtatacttcaagtaagatcaagaatcttttgtgaaattatagaaatttactatgtaaatgcttgatggaattttttcctgctagtgtagcttctgaaaggtgctttctccatttatttaaaactacccatgcaattaaaaggtacaatgcagc

SEQ ID NO: 20000 - DNA, 1926 bp, Homo Sapiens
  misc_feature (1790)..(1807): n is a, c, g, or t
ccccgggctgcaggtaacacctcagactttcagtccaaaaaattctacaagggaaaaatcattgggtgattgatttctatgctccttggtgtggaccttgccagaattttgctccagaatttgagctcttggctaggatgattaaaggaaaagtgaaagctggaaaagtagactgtcaggcttatgctcagacatgccagaaagctgggatcagggcctatccaactgttaagttttatttctacgaaagagcaaagagaaattttcaagaagagcagataaataccagagatgcaaaagcaatcgctgccttaataagtgaaaaattggaaactctccgaaatcaaggcaagaggaataaggatgaactttgataatgttgaagatgaagaaaaagtttaaaagaaattctgacagatgacatcagaagacacctatttagaatgttacatttatgatgggaatgaatgaacattatcttagacttgcagttgtactgccagaattatctacagcactggtgtaaaagaagggtctgcaaactttttctgtaaagggccggtttataaatattttagactttgcaggctataatatatggttcacacatgagaacaagaatagagtcatcatgtattctttgttatttgcttttaacaacctttaaaaaatattaaaacgattcttagctcagagccatacaaaagtaggctggattcagtccatggaccatagattgctgtccccctcgacggacttataatgtttcaggtggctggcttgaacatgagtctgctgtgctatctacataaatgtctaagttgtataaagtccactttcccttcacgttttttggctgacctgaaaagaggtaacttagtttttggtcacttgttctcctaaaaatgctatccctaaccatatatttatatttcgttttaaaaacacccatgatgtggcacagtaaacaaaccctgttatgctgtattattatgaggagattcttcattgttttctttccttctcaaaggttgaaaaaatgcttttaatttttcacagccgagaaacagtgcagcagtatatgtgcacacagtaagtacacaaatttgagcaacagtaagtgcacaaattctgtagtttgctgtatcatccaggaaaacctgagggaaaaaaattatagcaattaactgggcattgtagagtatcctaaatatgttatcaagtatttagagttctatattttaaagatatatgtgttcatgtattttctgaaattgctttcatagaaattttcccactgatagttgatttttgaggcatctaatatttacatatttgccttctgaactttgttttgacctgtatcctttatttacattgggtttttctttcatagttttggtttttcactcctgtccagtctatttattattcaaataggaaaaattactttacaggttgttttactgtagcttataatgatactgtagttattccagttactagtttactgtcagagggctgcctttttcagataaatattgacataataactgaagttatttttataagaaaatcaagtatataaatctaggaaagggatcttctagtttctgtgttgtttagactcaaagaatcacaaatttgtcagtaacatgtagttgtttagttataattcagagtgtacagaatggtaaaaattccaatcagtcaaaagaggtcaatgaattaaaaggcttgcaactttttcaaaaacctgttagaatatgctttattgtgttttgaggagnnnnnnnnnnnnnnnnnncaatatcactttatcctccagtatttcctcataagggttattatagccataattaatgttaaaatagactttgttcttcatattctcccatctttttcgctactatatactctgtctgg

SEQ ID NO: 20001 - DNA, 1174 bp, Homo Sapiens
gcacgaggagagcatcggccggcgaccgttccggcggccattgcgaaaacttccccacggctactgcgtccacgtggcggtggcgtggggactccctgaaagcagagcggcagggcgcccggaagtcgtgagtcgagtcttcccgggctaatccatgccgggttggaggctgctgacgcaggtcggcgcccaggtgctgggtcgactcggggacggcctgggtgctgccctgggggcggggaacagaacacacatctggctttttgttagaggtcttcatggaaagagtggtacatggtgggatgagcatctttctgaagaaaatgtcccattcattaagcagttggtctctgatgaagataaagcccaattagcaagtaaactgtgtcctctgaaagatgaaccatggcctatacatccttgggaaccaggttcctttagagttggtcttattgccttgaagctgggcatgatgcctttatggaccaaggatggtcaaaagcatgtggtcacattacttcaggtacaagactgtcatgtcttaaaatatacgtcaaaggaaaactgtaatggaaaaatggcaaccctgtctgtaggaggaaaaactgtatcacgttttcgtaaagctacatccatattggaattttaccgggaacttggattgccgccgaaacagacagttaaaatctttaatataacagataatgctgcaattaaaccaggcactcctctttatgctgctcactttcgtccaggacagtatgtggatgtcacagccaaaactattggtaaaggttttcaaggtgtcatgaaaagatggggatttaaaggccagcctgctacgcatggtcaaacgaaaacccacaggagacctggagctgttgcaactggtgatattggcagagtctggcctggaactaaaatgcctggaaaaatgggaaacatatacaggacagaatatggactgaaagtgtggagaataaacacaaagcacaacataatctatgtaaatggctctgtacctggacataaaaattgcttagtaaaggtcaaagattctaaactgcctgcatataaggatctcggtaaaaatctaccattccctacatattttcctgatggagatgaagaggaactgccagaaaatttgtatgatgaaaacgtgtgtcagccc

SEQ ID NO: 20002 - DNA, 1416 bp, Homo Sapiens
ccccgggctgcaggcttgtatgcaggagaaatcttaattggagtaatagaaaatggaagatggtgttgttaataaaggcatttaatagataaaaacatctcccaaaaggattttgaagctgatcctatttagttaaaaagataattttgctttccaccgtaggtccagaaaactaattattggcatcagtctgtgaaatagtccattatttgttgttaaaaatgcttcaaaaggttttcagtgtcagtctgagatgcctggtatataggagcctttgggaaatacctatttttcagtattccctgcatattggatatcaccatgaagcaagagacatgcattccataatcctgtagacactcagactcaggggaaaatacaagttatatcctgaaagcctttaaaactctatggtaggatcaaagattccaatggtttcagagaggttttatttcaattaatttgttctagtgctttcaagagcaagtacatcaaaatgtagaaggtaaaatgtatgcaacactaatataaattattccaagtctttaaggagccaaagaaaaaaaagatttctcacagcttttgttctgttttgtatttcaattaggaacttgcagtattattttgaaaaccattctaaaataataggagttaggaaataaataaagttttgctagccctgctaagttcaggcttagaggcttatcgctaagtgtaaacttcaccagattccacgaaaagctggatagctttttttctgacttatgttgtggttgcacccctcacaaatggcagaacagtatgtaaagctggtaacacctcggtttcagtgcaccatgtgtttgctttgtgaaggtgaagaatatgttggtttagagaaagaaattggatgtaattttatgcaatttacttttaaagacaaacataactatttagcagagaatattttaataaatgcaaaacaacagctggactgctgtacatcaaggacagattaactggaaaacatatgttccttatgtgtgattgagagccattcagaaaagacttcctttgtgttcagcctatacttttccatatggtataccttgaaaaaaattagcacaccatggttatttttctaccttttataaaagacagagcctgtttactcatttagaagatagagaaaattggtctaaaattgaacatcctagattcacactcccaagtcacttaaggtgatttgatggtgaggaaaatgattgacaaagcccaacaatgatctcaggaattacattttccaacagaccaaaaaatgttttcatgtagcagcaatgcagatttggtgaatatttaatatatattttagtatgtatttcactttatgactgacaattaaaaaatattgtttggccaaatagtaaaccctcgtgc

SEQ ID NO: 20003 - DNA, 2301 bp, Homo Sapiens
  misc_feature (1387)..(1622): n is a, c, g, or t
gcacgaggcaaaccatttcaagaccctttgttttgtgcaaatcaacgttattgatatcaatgatcagatccccatctttgaaaaatcagattatggaaacctgactcttgctgaagacacaaacattgggtccaccatcttaaccatccaggccactgatgctgatgagccatttactgggagttctaaaattctgtatcatatcataaagggagacagtgagggacgcctgggggttgacacagatccccataccaacaccggatatgtcataattaaaaagcctcttgattttgaaacagcagctgtttccaacattgtgttcaaagcagaaaatcctgagcctctagtgtttggtgtgaagtacaatgcaagttcttttgccaagttcacgcttattgtgacagatgtgaatgaagcacctcaattttcccaacacgtattccaagcgaaagtcagtgaggatgtagctataggcactaaagtgggcaatgtgactgccaaggatccagaaggtctggacataagctattcactgaggggagacacaagaggttggcttaaaattgaccacgtgactggtgagatctttagtgtggctccattggacagagaagccggaagtccatatcgggtacaagtggtggccacagaagtaggggggtcttccttaagctctgtgtcagagttccacctgatccttatggatgtgaatgacaaccctcccaggctagccaaggactacacgggcttgttcttctgccatcccctcagtgcacctggaagtctcattttcgaggctactgatgatgatcagcacttatttcggggtccccattttacattttccctcggcagtggaagcttacaaaacgactgggaagtttccaaaatcaatggtactcatgcccgactgtctaccaggcacacagactttgaggagagggcgtatgtcgtcttgatccgcatcaatgatgggggtcggccacccttggaaggcattgtttctttaccagttacattctgcagttgtgtggaaggaagttgtttccggccagcaggtcaccagactgggatacccactgtgggcatggcagttggtatactgctgaccacccttctggtgattggtataattttagcagttgtgtttatccgcataaagaaggataaaggcaaagataatgttgaaagtgctcaagcatctgaagtcaaacctctgagaagctgaatttgaaaaggaatgtttgaatttatatagcaagtgctatttcagcaacaaccatctcatcctattacttttcatctaacgtgcattataattttttaaacagatattccctcttgtcctttaatatttgctaaatatttcttttttgaggtggannnnnnnnnnnnnnnnnnnnnnnnnnnnnnnnnnnnnnnnnnnnnnnnnnnnnnnnnnnnnnnnnnnnnnnnnnnnnnnnnnnnnnnnnnnnnnnnnnnnnnnnnnnnnnnnnnnnnnnnnnnnnnnnnnnnnnnnnnnnnnnnnnnnnnnnnnnnnnnnnnnnnnnnnnnnnnnnnnnnnnnnnnnnnnnnnnnnnnnnnnnnnnnnnnnnnnnnnnnnnnnnnnnnnnnnnnnntacaggcatgaaccactgcacccacctacttagatatttcatgtgctatagacattagagagatttttcatttttccatgacatttttcctctctgcaaatggcttagctacttgtgtttttcccttttggggcaagacagactcattaaatattctgtacattttttctttatcaaggagatatatcagtgttgtctcatagaactgcctggattccatttatgttttttctgattccatcctgtgtccccttcatccttgactcctttggtatttcactgaatttcaaacatttgtcagagaagaaaaaagtgaggactcaggaaaaataaataaataaaagaacagccttttcccttagtattaacagaaatgtttctgtgtcattaaccatctttaatcaatgtgacatgttgctctttggctgaaattcttcaacttggaaatgacacagacccacagaaggtgttcaaacacaacctactctgcaaaccttggtaaaggaaccagtcagctggccagatttcctcactacctgccatgcatacatgctgcgcatgttttcttcattcgtatgttagtaaagttttggttattatatatttaacatgtggaagaaaacaagacatgaaaagagtggtgacatatcaagaataaacactggttgtagtcagtttt

SEQ ID NO: 20004 - DNA, 894 bp, Homo Sapiens
gcacgaggggtcaggtggcgtttgctgtggcggctaggcccgcgtgcgctggagacctccgcgctggcccccgcgagcctcctgccctggcccggcgctgcggctctgccgcggcggcagcatgggtggcccccggggcgcgggctgggtggcggcgggcctgctgctcggcgcgggcgcctgctactgcatttacaggctgacccggggtcggcggcggggcgaccgcgagctcgggatacgctcttcgaagtccgcagaagacttaactgatggttcatatgatgatgttctaaatgctgaacaacttcagaaactcctttacctgctggagtcaacggaggatcctgtaattattgaaagagctttgattactttgggtaacaatgcagccttttcagttaaccaagctattattcgtgaattgggtggtattccaattgttgcaaacaaaatcaaccattccaaccagagtattaaagagaaagctttaaatgcactaaataacctgagtgtgaatgttgaaaatcaaatcaagataaagatatacatcagtcaagtatgtgaggatgtcttctctggtcctctgaactctgctgtgcagctggctggactgacattgttgacaaacatgactgttaccaatgaccaccagcacatgcttcacagttacattacagacctgttccaggtgttacttactggaaatggaaacacgaaggtgcaagttttgaaactgcttttgaatttgtctgaaaatccagccatgacagaaggacttctccgtgcccaagtggattcatcattcctttccctttatgacagccacgtagcaaaggagattcttcttcgagtacttacgctatttcagaaataaagaactgcctcaaaata

SEQ ID NO: 20005 - DNA, 1431 bp, Homo Sapiens
gcacgaggtgctgctgctgcaaaaccagtggcgaccaagcctgaggtccctaggccacaggcagccaaaccagctgccaccaagccagccaccactaagcccatggttaagatgtcccgtgaagtccaggtgtttgagataacagagaacagcgccaaactccactgggagaggcctgagccccccggtccttatttttatgacctcaccgtcacctcagcccatgatcagtccctggttctgaagcagaacctcacggtcacggaccgcgtcattggaggcctgctcgctgggcagacataccatgtggctgtggtctgctacctgaggtctcaggtcagagccatctaccacggaagtttcagtacaaagaaatctcagcccccacctccacagccagcaaggtcagcttctagttcaaccatcaatctaatggtgagcacagaaccattggctctcactgaaacagatatatgcaagttgccgaaagacgaaggaacttgcagggatttcatattaaaatggtactatgatccaaacaccaaaagctgtgcaagattctggtatggaggttgtggtggaaacgaaaacaaatttggatcacagaaagaatgtgaaaaggtttgcgctcctgtgctcgccaaacccggagtcatcagtgtgatgggaacctaagcgtgggtggccaacatcatatacctcttgaagaagaaggagtcagccatcgccaacttgtctctgtagaagctccgggtgtagattcccttgcactgtatcatttcatgctttgatttacactcgaactcgggagggaacatcctgctgcatgacctatcagtatggtgctaatgtgtctgtggaccctcgctctctgtctccaggcagttctctcgaatactttgaatgttgtgtaacagttagccactgctggtgtttatgtgaacattcctatcaatccaaattccctctggagtttcatgttatgcctgttgcaggcaaatgtaaagtctagaaaataatgcaaatgtcacggctactctatatacttttgcttggttcattttttttcccttttagttaagcatgactttagatgggaagcctgtgtatcgtggagaaacaagagaccaactttttcattccctgcccccaatttcccagactagatttcaagctaattttctttttctgaagcctctaacaaatgatctagttcagaaggaagcaaaatcccttaatctatgtgcaccgttgggaccaatgccttaattaaagaatttaaaaaagttgtaatagagaatatttttggcattcctctaatgttgtgtgatgttatttttcgtgtgctggagggaggggatttaattttaattttaaaatgtttaggaaatttatacaaagaaactttttaataaagtatattgaaagttt

SEQ ID NO: 20006 - DNA, 819 bp, Homo Sapiens
gcacgagggcgcgatccaagagggatttaagcagcccagagctccagagaaaaagagagcgagagagaaccacacacagagacggcttaagcgtttacccgaattaaatatatatttttaaaaagaactgttgagttttatcattttcgttaagtgaccgtgcgcagcgctgtaactgcaggatggggaagcagaatagcaaactggcccctgaagtgatggaggacctggtgaagagcacagagtttaatgagcatgaactcaagcagtggtacaaaggatttctcaaggactgtccaagtgggaggctaaatctcgaggaatttcagcagctctatgtgaagttctttccttatggagacgcctccaagtttgcccagcatgccttccgaaccttcgacaagaatggggacggcaccattgacttccgagagttcatctgcgctctgtccatcacctccaggggcagctttgagcagaagctgaactgggccttcaatatgtatgacctggatggtgatggcaagatcacccgagtggagatgctggagatcatcgaggctatctacaaaatggtaggcactgtgatcatgatgaaaatgaatgaggatggcctgacgcctgagcagcgagtagacaagattttcagcaagatggataagaacaaagatgaccagattacactggatgaattcaaagaagctgcaaagagcgacccttccattgtattacttctgcagtgcgacatccagaaatgagctgatgtcaatgctatggactgcacaaaagtctcaatgttccattcagtctgcagctatt

SEQ ID NO: 20007 - DNA, 505 bp, Homo Sapiens
aataccacagaatcacctgagtgtcaattgaaagttgtcaattaaaaggtaaccttttaatctcgtaggaggaatctcattaagacatttttcctgatatgtagagcagtctgttggcaaaaatgcatatattttctttcatatttgtaaaattatatttaatggaattcttttctttgattatcaaggactttcactgcaggcagtgctatttcttgtgcctaagaatgtttccaaaagtcgcatcgctaatgatatttgccaagttgagtgtacacaaagtttctcatatcctgttcaagttaatcaacatcaagcacatggggatgctttagggtgagtctatagtacaaaatgcataaaccatgtccccaggaaatttgaaaggaagcaggtgctgaatggaatttttttccttttccatgagctgtgttaattctatctccagtaggcctaatgcttgaataagcaagatgtctaatcaataaattattttcatgctcag

SEQ ID NO: 20008 - DNA, 1214 bp, Homo Sapiens
  misc_feature (1023)..(1031): n is a, c, g, or t
  misc_feature (1137)..(1162): n is a, c, g, or t
ccccgggctgcaggaattcggcacgagggcccatgctattattcagccggcagggaaaactgcggctgcaaaaatggtacctggccacttcggacaaggaacggaagaagatggtgcgcgagctcatgcaggttgtcctggctcgaaagcccaagatgtgcagcttcctggagtggagggacctcaaagttgtctataagagatatgccagcctctacttctgctgcgccatcgagggccaagacaatgagctcatcacactggagctgatccaccgatacgtggagctcttagacaaatactttggcagtgtgtgcgagctggacatcatcttcaactttgagaaggcctacttcatcctggatgagtttttgatggggggggatgtccaggacacctccaagaagagtgtgctgaaagccatcgagcaggctgacctactgcaagaggaggatgagtcgccacggagtgtgctggaggagatgggtttggcatagcccctgctgggccggggtgtggcgatggggtcctggtagcgtggcgggaacggctgcttctcctctgcccagggccctgttcttggtgggactcggctgcccctcctctgctgcctcacctttcggagtgagctgtgggctcaggcccttcaaacattccctccctccacccccctacctccactttccccttttcccactgaaggttttagaagctaggaggcaggaaaatgtgacccagatggggggtgctatttggcttttattccctgcctttgcagaaatgatgtcacctcagatgtccctccctccctaataactgtaaatatataaatatgtcaggttaaagggaaaaggtgttcagggcactttttgtcctttttgtcccataacctacctccacctccaccctccccctagccagccaggcagcttttttgcctgggaggggagcctggacccccctttttttccttggctgcagtggggcctttatccagtgccagggaggaacaacatagttaannnnnnnnnaaccttgcccctttgagggaaggaagggttgggggaagggcaagctttttgggaccctggtcctggccctggcctttcactccagttttgggtgaggcaggagctnnnnnnnnnnnnnnnnnnnnnnnnnnagtgtttgcctttatgtccttttttttgaaataaaaggaaaagcatttttgg

SEQ ID NO: 20009 - DNA, 971 bp, Homo Sapiens
cgtccgcggacgcgtgggttatcgccaaggatggctctactgccatccactttgagcactcttggggtgatggtgtggcagtgctcagattttttaatgaagtatttaaagacagcactcagacccctgccgtcactccacagagccagccagctaccactgactctactgtcacggtgcagaaactcaacttcgagctgactgatgccttaaagactggcatcacagctgctaaggaaaagtttgatgccaccatgaaaaccctcactattgactgcgtccagtttcagagaggaggcaaagaattcctgaagaagcaaaagctgagccctgacgcagttgcccagctggcattccagatggccttcctgcggcagtacgggcagacagtggccacctacgagtcctgtagcactgccgcattcaagcacggccgcactgagaccatccgcccggcctccgtctatacaaagaggtgctctgaggcctttgtcagggagccctccaggcacagtgctggtgagcttcagcagatgatggttgagtgctccaagtaccatggccagctgaccaaagaagcagcaatgggccagggctttgaccgacacttgtttgctctgcggcatctggcagcagccaaagggatcatcttgcctgagctctacctggaccctgcatacgggcagataaaccacaatgtcctgtccacgagcacactgagcagcccagcagtgaaccttgggggctttgcccctgtggtctctgatggctttggtgttgggtatgctgttcatgacaactggataggctgcaatgtctcttcctacccaggccgcaatgcccgggagtttctccaatgtgtggagaaggccttagaagacatgtttgatgccttagaaggcaaatccatcaaaagttaacttctgggcagatgaaaagctaccatcacttcctcatcatgaaaactggga

SEQ ID NO: 20010 - DNA, 995 bp, Homo Sapiens
gcacgaggatacctccaaacagtggggctaaaaccaagcggctagaagccctacagctgccttcggccaggaagtgaggatggtgtgggccctccccgccggccccctgggtccccagtgttcgctgtgtgtgcgtttgtcctctgctgccatctgccccggctgtgtgaattcaagacagggcagtgcagcactaggcaggtgtgaggagccctgctgaggtcactgtggggcacggttgccacacggctgtcatttttcacctggtcattctgtgaccaccaccccctcccctcaccgcctcccaggtggcccgggagctgcaggtggggatggctttgtcctttgctcctgctccccgtgggacctgggaccttaaagcgttgcaggttcctgatttggacagaggtgtggggccttccaggccgttacatacctcctgccaattctctaactctctgagactgcgaggatctccaggcagggttctcccctctggagtctgaccaattacttcattttgcttcaaatggccaattgtgcagagggacaaagccacagccacactcttcaacggttaccaaactgtttttggaaattcacaccaaggtcgggcccactgcaggcagctggcacagcgtgggcccgaggggctgtggaacgggtcccggaactgtcgacatgtttgattttagcgtttccttttgttcttcaatcaggtgcccaagtaagtgatcagcacagctgcttcaaataggagaacccataaaataggatgaaaatcaagtaaatgcaagatgtccacactgtttttaaacttgaccctgatgaaaatgtgagccctgttagcagatggctatgggagaggaaaaccgtatctgaaatgggccagaacagaaggatgaaatgaattccagagtcctcccacctgaatgaattatactgtggccttacccaggtgaatgggccttccaaaataaaactctagtcccttt

SEQ ID NO: 20011 - DNA, 537 bp, Homo Sapiens
  misc_feature (149)..(212): n is a, c, g, or t
  misc_feature (294)..(303): n is a, c, g, or t
gcacgaggctcctctcttcctgctctgtccctccttctccatcagggagcagcgtgacttcagcgagtcccgcgagcacctggctagacagttaacaagcacgtccttccagcctgagccagcgcaggtttgggagggggcttcctggnnnnnnnnnnnnnnnnnnnnnnnnnnnnnnnnnnnnnnnnnnnnnnnnnnnnnnnnnnnnnnnngtagtgaccaattcctatctcttccctctccgcaggctcaatgaatcgaatgaatgtgaacttcttcatctgtgaaaaatcnnnnnnnnnnccattttgttctgtttgggggcttctgttttgtttggcgagagagcgatggctgccgtggggagtactggggagccctcgcggcaagcagggtgggggggacttgggggcatgccgggccctcactctctcgcctgttctgtgtctcacatgctttttctttcaaaattgggatccttccatgttgagccagccagagaagatagcgagatctaaatctctgcctcgtgccgaa

SEQ ID NO: 20012 - DNA, 1448 bp, Homo Sapiens
gcacgagggcaacaggctaccaagtccgtgctgtttgtgtgtctgggtaacatttgtcgatcacccattgcagaagcagttttcaggaaacttgtaaccgatcaaaacatctcagagaattggagggtagacagcgcggcaacttccgggtatgagatagggaacccccctgactaccgagggcagagctgcatgaagaggcacggcattcccatgagccacgttgcccggcagattaccaaagaagattttgccacatttgattatatactatgtatggatgaaagcaatctgagagatttgaatagaaaaagtaatcaagttaaaacctgcaaagctaaaattgaactacttgggagctatgatccacaaaaacaacttattattgaagatccctattatgggaatgactctgactttgagacggtgtaccagcagtgtgtcaggtgctgcagagcgttcttggagaaggcccactgaggcaggttcgtgccctgctgcggccagcctgactagaccccaccctgaggtcctgcatttctcagtcggtgtgtaatcacgttccagggcccaaagcccagctctttgttcagttgacttactgtttcttaccttaaaaagtaattgtagatggaaatcagttgtgtttggcaggagaatcaataaaaatctttgattcagacagcttatggggtattttaagcattcttagactagttgaacatctcactttgccccagttacaaaaatagtagaacaagcaacataaaacaatgaaggaaaacctcacttgaaggcccaggtcaacatctaagcctgttgagacttagataatcgagtctacctcttcagtaggtttgtgtggatggcctggagggcaggtgccctctgctccccagtgctacctctctcttccctagggccttttgtggattgacagtagtcccctccgtaggagctcacagtctagattagaagtgttttaatttctacacacccatagtgcacacttgtatattgaaaagatagggaagagagaaacatttatggaatcagtcgttggcaccttcaatacttcatgatttttgtcgagtttacttcatgaggaggtcagcccattggctcccatctgaaccactttgcctctgaaacttaattacatccagaaagaaggacacttgtatgctagtctatggtcagttgaggaatatgactgtttttatatgcacatgtaacccaaatgtccaatataaattggcttattttttaaaataattttaaaagttgggaaaagtgttattatttggcatgcttaaatattgaataagtattcttcatcagcatttaataaatgtataggcagatgtaaggtaatttctgtgtattttgagataatgtcaaaatcatgaatatttcaaaataaactggggagttataaaatacaacta

SEQ ID NO: 20013 - DNA, 1703 bp, Homo Sapiens
  misc_feature (845)..(856): n is a, c, g, or t
gcacgaggcccatggaagaggaagaggagccagagcaaaagccttgtctgaaacctactctgaggcccatcagctctgctccatctgtttcctctgccagtggcaatgcaacacctaacactcctggggatgagtctccctgtggtattattattcctcatgaaaactcaccagatcaacagcaacctgaggagcataggccaaaaataggactaagtcttaaactgggtgcttccaatagtcctggtcagcctaattctgtgaagagaaagaaactacctgtagatagtgtctttaacaaatttgaggatgaagacagtgatgacgtaccccgaaaaaggaaactggttcccttggattatggtgaagatgataaaaatgcaaccaaaggcactgtaaacactgaagaaaagcgtaaacacattaagagtctcattgagaaaatccctacagccaaacctgagctcttcgcttatcccctggattggtctattgtggattctatactgatggaacgtcgaattagaccatggattaataagaaaatcatagaatatataggtgaagaagaagctacattagttgattttgtttgttctaaggttatggctcatagttcgccccagagcattttagatgatgttgccatggtacttgatgaagaagcagaagtttttatagtcaaaatgtggagattattgatatatgaaacagaagccaagaaaattgggtcttgtgaagtaaaactttttatatttagagttccatttcagatttcttctttgccacccttttaaggactttgaatttttctttgtctttgaagacattgtgagatctgtaannnnnnnnnnnngtagaaaatgtgaattttttggtcctctaatttgttgttgccctgtgtactcccttggttgtaaagtcatctgaatccttggttctctttatactcaccaggtacaaattactggtatgttttataagccgcagctactgtacacagcctatctgatataatcttgttctgctgatttgtttcttgtaaatattaaaacgactccccaattattttgcagaattgcacttaatattgaaatgtactgtataggaaccaacatgaacaattttaattgaaaacaccagtcataaactattaccacccccactctcttttgatcagaaatggcaagcccttgtgaaggcatggagtttaaaattggaatgcaaaaattagcagacaatccattcctactgtatttctgtatgaatgtgtttgtgaatgtatgtgtaaaagtctttcttttccctaatttgctttggtggggtccttaaaacatttcccaactaaagaatagaattgtaaaggaaaagtggtactgttccaacctgaaatgtctgttataattaggttattagtttcccagagcatggtgttctcgtgtcgtgagcaatgtggtttgctaactggatggggttttcttattaataagatggctgcttcagcttctcttttaaaggaatgtggatcatagtgatttttccttttaattttattgctcagaaatgaggcatatcctaaaaatcctggagagctgtatttaatgcattttgcactattggccttagtttaatccaattgtatctgttatttaacaaaaaatcatcataccaaagtggtaagtgaaaacccccctttaaacaaa

SEQ ID NO: 20014 - DNA, 798 bp, Homo Sapiens
gcacgaggccccctccctccttctccctctccctcaaatccgtgagttttggaagccccagggcctctctcccccgcccctcctggatgaggccaccatcccccaaaccggcttgttttgcagtttccccaggatcctggaagctcgctggcgctcgagggtggcggggacacgggggggtgggtgaaggttcgttaccttttctagtgcgttctatcatagttaacggttgcacacttttttaaaaaaagtaaatggatttgccacaattaaatgtcataacatttatgacagaatataaaatattaacatattttaagccaagttttaggtgtattttttgaatcttggttataaacccaattttaaagggcgatgtatccagcgttgtgaaggcaacagagtgtacccatatttatatttttataaaatacctataagactgtgaatctcttgtgctaatggctgagttaattgaaggatcgttttgcccctttttagcctcccagagcttcgaggactcaattcgaacccgaaatcctgccgtgggggaggggttgcgtcgagacctgggcccggggaggttctcctgcgtcactttctgtcctgaaaggcgcccttcctggtttctgtggctccaattttctatgcagccccacaccccttgttgttttgatcctgaaaataaaaagggaggctgaattattcaaatttaaatgaggtttcccctttcatggaagtgctgctgacccttcgtgcagaaatggggagcacttgaggacacaagtgggtggaggc

SEQ ID NO: 20015 - DNA, 985 bp, Homo Sapiens
ttcggcacgaggatacatatggtaattgtagggtaatacccacaacaactgtagtttcttacttggccaagagaatgcttatttaagtgttagacttccattctggcaaaatcttgccttatcagaagacattggaaagagggattccctttggtgtttggtcttctacttagaaaaacctattgcagttagtttatcttgtagtattcatctttgtattctgaagataaggtttgaattaaattgatacacacagaggggaaccgattttttttatccaatgtgaattataaatgagataatccacagttattcattgtggagttgttgagactatgaaagactcattgtctttgtattcagctcttaaatagtgtaactatatccccacctctgcttgctttctttccctcccctccaatgataaagaaaatgataaattttctgttgtgcattcaattcttattttaaataagactaagtataggcattgtacctgacattgctacgtttctaccagtgtttcaatttaaagtgctagtgtttaaaaacattttcaagggataaggccttctgtactttgcttatttgaagaatcagtggtaggagcagtgaagtaaattctatggagtacatttctaaaataccacatttctgaaatcataaataagtttattcaggttctaaccctttgctgtacacaagcagacagaaatgcatctgttacataaatgagaaaaagctattatgctgatggagcatgctttttaaatcctttaaaaacactcaccatataaacttgcatttgagcttgtgtgttcttttgttaatgtgtaaagttctcctttctcgaattgccagtgtgtacttggcttaactcaagaacagtttcttctggattccttatttgatttatttaacctaattatattctaatattgcaaatattaccataagtgggtaaaataaattccccttctggaaa

SEQ ID NO: 20016 - DNA, 1484 bp, Homo Sapiens
  misc_feature (904)..(992): n is a, c, g, or t
taaatggcaaggctctctggatgctgtaatgccccatctgatgcatcagcataagtccattacaaccctacagggagaggatatagtttttcttgctacagacattaatcttcctggtgctgttgactgggtgatgatgcagtcctgttttggctttcacttcatgttagtcttagagaaacaggaaaaatacgatggtcaccagcagttcttcgcaatcgtacagctgataggaacacgcaagcaagctgaaaattttgcttaccgacttgagctaaatggtcataggcgacgattgacttgggaagcgactcctcgatctattcatgaaggaattgcaacagccattatgaatagcgactgtctagtctttgacaccagcattgcacagctttttgcagaaaatggcaatttaggcatcaatgtaactatttccatgtgttgaaatggcaatcaaacattttctggccagtgtttaaaacttcagtttcacagaaaataaggcacccatctgtctgccaacctaaaactctttcggtaggtggaagctagacacatgaaggtaaataaaaagaaaggctgttaaatacaggaaacagttgcatgtagtaacactaatatatttaaaaataagtcaacagtaaaccactgaaaaaatatatgtatatacacccaagatgggcatcttttgtattaagaaaggaagcattgtaaaataattctgagttttgtgtttgttgtagattgattgtattgttgaaaaagtttgtttttgcgtgggagtgtgtgcctgcgtgggtgtgtgcgtgtttgggttttttttcctttaactgacaagccatcttgagtggtcatgggccactgcttttccctttgtgagtcaatacatagtgctgctgtgtgnnnnnnnnnnnnnnnnnnnnnnnnnnnnnnnnnnnnnnnnnnnnnnnnnnnnnnnnnnnnnnnnnnnnnnnnnnnnnnnnnnnnnnnnnttgtaccattttaaagttagtatcttttgatatgcatatttgtttatggtaaaaaatttataacgtgttcaatattttcttttcccccattaatcagttcattagaaatattttaaaatcagctattttgtgaagccatgagttccaaaaagtaaaggtgacatcggaaaaataatcaaaagctatttaaagcatctataaggtgctctctttctgtcttctacagatgagtcacacctttgagcttaatctttgaaaggttagagaataaattgatttttataaatactgcaaatcaggcttttgtttcctttttcagatatcttggacaaatcacatattttaaaatttgttcttgtatttattggttttgcagaagaagcatcgtcatgcacagtatttgtaattaaaaacaaatcatttgtttaaaaggcagttgcaaaaatgtttttgtcttttataattctcattaaaagaatatctggcaaattt

SEQ ID NO: 20017 - DNA, 1776 bp, Homo Sapiens
gcacgagggcgcagcccggcctcgaagaacttctgcttgggtggctgaactctgatcttgacctagagtcatggccatggcaaccaaaggaggtactgtcaaagctgcttcaggatcaatgccatggaagatgcccagaccctgaggaaggccatgaaagggctcggcaccgatgaagacgccattattagcgtccttgcctaccgcaacaccgcccagcgccaggagatcaggacagcctacaagagcaccatcggcagggacttgatagacgacctgaagtcagaactgagtggcaacttcgagcaggtgattgtggggatgatgacgcccacggtgctgtatgacgtgcaagagctgcgaagggccatgaagggagccggcactgatgagggctgcctaattgagatcctggcctcccggacccctgaggagatccggcgcataagccaaacctaccagcagcaatatggacggagccttgaagatgacattcgctctgacacatcgttcatgttccagcgagtgctggtgtctctgtcagctggtgggagggatgaaggaaattatctggacgatgctctcgtgagacaggatgcccaggacctgtatgaggctggagagaagaaatgggggacagatgaggtgaaatttctaactgttctctgttcccggaaccgaaatcacctgttgcatgtgtttgatgaatacaaaaggatatcacagaaggatattgaacagagtattaaatctgaaacatctggtagctttgaagatgctctgctggctatagtaaagtgcatgaggaacaaatctgcatattttgctgaaaagctctataaatcgatgaagggcttgggcaccgatgataacaccctcatcagagtgatggtttctcgagcagaaattgacatgttggatatccgggcacacttcaagagactctatggaaagtctctgtactcgttcatcaagggtgacacatctggagactacaggaaagtactgcttgttctctgtggaggagatgattaaaataaaaatcccagaaggacaggaggattctcaacactttgaatttttttaacttcatttttctacactgctattatcattatctcagaatgcttatttccaattaaaacgcctacagctgcctcctagaatatagactgtctgtattattattcacctataattagtcattatgatgctttaaagctgtacttgcatttcaaagcttataagatataaatggagattttaaagtagaaataaatatgtattccatgtttttaaaagattactttctactttgtgtttcacagacattgaatatattaaattattccatattttcttttcagtgaaaaattttttaaatggaagactgttctaaaatcacttttttccctaatccaatttttagagtggctagtagtttcttcatttgaaattgtaagcatccggtcagtaagaatgcccatccagttttctatatttcatagtcaaagccttgaaagcatctacaaatctctttttttaggttttgtccatagcatcagttgatccttactaagtttttcatgggagacttccttcatcacatcttatgttgaaatcactttctgtagtcaaagtataccaaaaccaatttatctgaactaaattctaaagtatggttatacaaaccatatacatctggttaccaaacataaatgctgaacattccatattattatagttaatgtcttaatccagcttgcaagtgaatgg

SEQ ID NO: 20018 - DNA, 959 bp, Homo Sapiens
gcacgaggcaaaagtctaaaatacccattggtgatgttttttaaaaaaatcttgctttcagctttcaggagttaatattctttgttttaatttgataattggatatggttgatttatattgggtttaaactgtggagctttcatgtttactgtaatttagtcttaaaatattttttacttagtaaccagtgcttttgataatgtggttggcaacaaaccagcaactatttagaagtgtcataagagttcattctttgagtattgggaaagttaattcagatcctactcaaaaagcatcttcacatattaaaagattcagacagggatctgtgtagaggagtaatttgcagttatttaacataaacctgatttgcagtgatctctaagtaattctgcaaaatccggtattactatgtcaagttattgcttttggtaaattgtctgacccagttattaatgaaagaatatggatttaaaaatttttaaactaaataatttgtgctgtcacagaaatggtattgttgctcttgtttactgggtataatttcccaatgcattgatgtgaagggatagaaaatctaaactaatttagttatccattggggggtgtatttactgtgatgaagatgagacagatgccatcagagctttgtgaatcagctggggtgttttcactgataaacaacacatagcaggtgtgcattcattacaaatatatgtatctgccaaggtggagccactttaaagagtgagttttgtcttgtatctaaagtggatacaagcgtatgtttaaactgcaagatttttacttgctagagaatctgtttaatatagtggtttggcctcctgattatttataggtttttataaatttagaatcaatttctctgtaaggtggctcaaatttttcaactcttgtgcacataaaattgagttgaagttcattgtgcctttttttc

SEQ ID NO: 20019 - DNA, 800 bp, Homo Sapiens
gcacgaggggatcatgtatatgccatccgcgaggcagccaccagcaacctgaagaagctagtggaaaagtttgggaaggagtgggcccatgccacaatcatccccaaggtcttggccatgtccggagaccccaactacctgcaccgcatgactacgctcttctgcatcaatgtgctgtctgaggtctgtgggcaggacatcaccaccaagcacatgctacccacggttctgcgcatggctggggacccggttgccaatgtccgcttcaatgtggccaagtctctgcagaagatagggcccatcctggacaacagcaccttgcagagtgaagtcaagcccatcctagagaagctgacccaggaccaggatgtggacgtcaaatactttgcccaggaggctctgactgttctgtctctcgcctgatgctggaagaggagcaaacactggcctctggtgtccaccctccaacccccacaagtccctctttggggagacactggggggcctttggctgtcactccctgtgcatggtctgaccccaggccccttcccccagcacggttcctcctctccccagcctgggaagatgtctcactgtccacctcccaacgggctaggggagcacggggttggacaggacagtgaccttgggaggaaggggctactccgcccacgtcagggagagatgtgagcatcccgggtcactggatcctgctgctgtaatgggaacccctcccccatttacttctccacctcccgtcctccccatcattggttttttttgtgtgtcaactgtgccg

SEQ ID NO: 20020 - DNA, 899 bp, Homo Sapiens
ccccgggctgcaggaattcggcacgaggtggccatgttgaaggtaacatgaactcttaagatcttgacccagggcgacttggttttgcttaaggtggcatcaccaatgttccaaatcctttggggagatgagggcatccccacagaaaaagaggaataatagaccaatggattttctcctttcaccagtatgtttggaaccctctgatccaatgtcttttgatactgatctcttgtccaaatgagaatgtcgctttagctgaaattcaaatggctgtgacaatttaccgaaatgatgaagtaaccaccattcccacctttcaccgcctaggctccaagtctgaatacatttttgaaataggaactcccttttgcaaaaaagaaacctgggtgtcagggaggtgaagtgacttgccctaggagcagacagcatgccaagaatggaattaggctcaggatccagcctgggctcaccctgtctggctcattcccacccaggaaactgaagataaaagatttgggaaaacacaccaagaaaaaggggcagttttctttgcccaagcatttggtgctagttagaggctgttcactctctcctgctcctcttcggagtagaaataaaggctgtgacacaaggaagccagtggggtgggagggaggcaccataatccctccctaaaacccacagaagactaacctgatactcttttgacccaactgcatcaacactaaacagctgcaaacccctgaatctttcacacatgccaagtgaacattcttgatgatttctctttgtgaccgcaaccacctgcaaccagaacgactctagaatttccttccccgcccccctttttgtttagtttctaatctcttgtttatgaggtgtggggtttataaggg

SEQ ID NO: 20021 - DNA, 1239 bp, Homo Sapiens
gcacgagggttacttttgaacagtccattgaagctgtgcaagctatatctatgttcaatggccagctgctatttgatagaccaatgcacgtcaagatggatgagagggccttaccaaaaggagatttcttccctcctgagcgtccacaacaacttccccatggccttggtggtattggcatggggttaggaccaggagggcaacccattgatgccaatcacctgaataaaggcatcggaatgggaaacataggtcccgcaggaatgggaatggaaggcataggatttggaataaataaaatgggaggaatggaggggccctttggtggtggtatggaaaacatgggtcgatttggatctgggatgaacatgggcaggataaatgaaatcctaagtaatgcactgaagagaggagagatcattgcaaagcagggaggaggtggaggtggaggaagcgtccctgggatcgagaggatgggtcctggcattgaccgcctcgggggtgccggcatggagcgcatgggcgcgggcctgggccacggcatggatcgcgtgggctccgagatcgagcgcatgggcctggtcatggaccgcatgggctccgtggagcgcatgggctccggcattgagcgcatgggcccgctgggcctcgaccacatggcctccagcattgagcgcatgggccagaccatggagcgcattggctctggcgtggagcgcatgggtgccggcatgggcttcggccttgagcgcatggccgctcccatcgaccgtgtgggccagaccattgagcgcatgggctctggcgtggagcgcatgggccctgccatcgagcgcatgggcctgagcatggagcgcatggtgcccgcaggtatgggagctggcctggagcgcatgggccccgtgatggatcgcatggccaccggcctggagcgcatgggcgccaacaatctggagcggatgggcctggagcgcatgggcgccaacagcctcgagcgcatgggcctggagcgcatgggtgccaacagcctcgagcgcatgggccccgccatgggcccggccctgggcgctggcattgagcgcatgggcctggccatgggtggcggtggcggtgccagctttgaccgtgccatcgagatggagcgtggcaacttcggaggaagcttcccaggttcctttggtggagctggaggcatgctcctgggggggccaggaaggcctgccaatatttgtgagaaat

SEQ ID NO: 20022 - DNA, 1487 bp, Homo Sapiens
  misc_feature (952)..(977): n is a, c, g, or t
  misc_feature (1031)..(1051): n is a, c, g, or t
gcacgaggccgagccagtgtgctgagctctccgcgtcgcctctgtcgcccgcgcctggcctaccgcggcactcccggcacgaggctctgcttggcctcgccatgccggtggacctcagcaagtggtccgggcccttgagcctgcaagaagtggacgagcagccgcagcacccgctgcatgtcacctacgccggggcggcggtggacgagctgggcaaagtgctgacgcccacccaggttaagaatagacccaccagcatttcgtgggatggtcttgattcagggaagctctacaccttggtcctgacagacccggatgctcccagcaggaaggatcccaaatacagagaatggcatcatttcctggtggtcaacatgaagggcaatgacatcagcagtggcacagtcctctccgattatgtgggctcggggcctcccaagggcacaggcctccaccgctatgtctggctggtttacgagcaggacaggccgctaaagtgtgacgagcccatcctcagcaaccgatctggagaccaccgtggcaaattcaaggtggcgtccttccgtaaaaagtatgagctcagggccccggtggctggcacgtgttaccaggccgagtgggatgactatgtgcccaaactgtacgagcagctgtctgggaagtagggggttagcttggggacctgaactgtcctggaggccccaagccatgttccccagttcagtgttgcatgtataatagatttctcctcttcctgccccccttggcatgggtgagacctgaccagtcagatggtagttgagggtgacttttcctgctgcctggcctttataattttactcactcactctgatttatgttttgatcaaatttgaacttcattttggggggtattttggtactgtgatggggtcatcaaattattaatctgaaaatagcaacccagaatgtnnnnnnnnnnnnnnnnnnnnnnnnnngaccaggtctacagtgatagagcaaagcatcaaagaatctttaaggaaggtttnnnnnnnnnnnnnnnnnnnnngattggttgcctctgcctttgtgatcctgagtccagaatggtacacaatgtgattttatggtgatgtcactcacctagacaaccagaggctggcattgaggctaacctccaacacagtgcatctcagatgcctcagtaggcatcagtatgtcactctggtccctttaaagagcaatcctggaagaagcaggagggagggtggctttgctgttgttgggacatggcaatctagaccggcagcagcgctcgctgacagcttgggaggaaacctgagatctgtgttttttaaattgatcgttcttcatgggggtaagaaaagctggtctggagttgctgaatgttgcattaattgtgctgtttgcttgtagttgaataaaaatagaaacctgaatgaaataaaaatataataaatctaatgaacaaaagcaaaatataa

SEQ ID NO: 20023 - DNA, 1036 bp, Homo Sapiens
gcacgaggattcactggaagcagactcacatttagatgaagtctggatcaaagaagtgataacgaaggcagggatgaagttaaagtggagtaaattaaaacaggacaaagtcagaaaaaataaagatgctgtaagaaggccccaggcagatccagctttattaaccccaaggtccccagttgttactataatgggccatgttgatcacgggaaaacgacattacttgacaaatttcgaaaaactcaagtggcagcagtggaaactggaggcatcactcagcacattggtgcctttcttgtctctctgccttctggggaaaagataacttttcttgatactccaggacatgctgctttctcagcaatgagagccagaggtgctcaggtcactgacattgtcgtattggttgtagctgcagatgatggagtgatgaaacaaactgtagaatctattcagcatgccaaagatgcacaggttcctattatccttgccgtaaataaatgtgacaaagctgaggctgatcctgagaaagtgaaaaaagagctgctggcttacgatgtggtatgtgaagattatggaggtgatgttcaagcagtgcctgtctccgcacttacgggcgataatctgatggctttggcagaagcaacagttgctcttgcagaaatgttagaattgaaagcagatcccaatggtccagtggaaggaacagtaatagagtctttcacagacaaaggaagaggtcttgttactacagctataattcaaagaggaactttaagaaaaggctctgttctggttgctggaaaatgttgggcaaaagtacgcttaatgtttgatgaaaatggaaaaacaattgatgaggcctatcccagcatgccagtgggaattacaggctggagagaccttccttctgcaggagaagaaattcttgaagtaaatctgagctcagggcacgtgaagttgttgactggaggaaatatgaacaagaacaggagaaaggtcaggaggatctgaaaataatagagaaagcgaagg

SEQ ID NO: 20024 - DNA, 757 bp, Homo Sapiens
gcacgagggtttccttgcgtgagctatgtgaaaatgaagacgacaacgttgtcttagcctttgaacaactgagtacaactttttgggaaaagttaaacaaagtctaaaaacaaagtctatgcaaaccacttaaaaataattccatagtagtttttcaggtcacgtttttgattcttatgcttcttgccagaaatacattatgataaagtggaaatacattacgatgaagtggaaagagcaaacactttggaatcaaacagagttgcaatcaaacctgccatgttctgtcatgaatactcacaaattatttagtatacctgaatcttggtttctttttataactgagtaataatggttacatctcaggtagtttgaggattgactaaaaaaatgcgagaatgttgtatgtgactgaataacaatttttactctgcgaagccaaagtaaatataatattatcagtaactttatccccagtgtcagtatttataaaatgtttattaaggctagaaaaaatgaatacaatatcctgaaggtgaaatatattctcttcaattagcataaatatgatttacataagttagctatacagctattgagatagtactttctagtaaacttaaactactttttaaacatacattttgtgatgatttaacaaaaatatagagaatgatttgctttattgtaattgtatataagtgactggaaaagcacaaagaaataaagtgggttcgatctgtttaaaaattaaaga

SEQ ID NO: 20025 - DNA, 920 bp, Homo Sapiens
ctgctgtctccttctgtcctcattcctgtccttctcacagtcagtccctcttggctcttcctagagtccctttcattccctcatttccacttcctgccgctgtactgtcacctgtggcctggatttgcactcttggtccaacaccctcaactccaacacctctgtctttctgccccatccactagacaaaagctgactctggaaaacattaggcactcagaatcaagggttctggggtcagatggataattgccatcatcctcaccaagttgccactggactttcttgcccctaaatccactgggcatttcattgctacctttcttgacttcttgattgtttttgtgatactgacacatcccccctttcagaacaccctctgcccttggattctgtgcacaggaagctagttgctcccctgaatacactctttcttccttgtaatacagcctctgattttgagcccaagaataaagactacagttctcagactccttcgcaaataaattttgtgactaaactctagtcaacagtaagtgtcatgtagcagctcctgggaatctcctttaaaaagagagcttgtttatacctattgtcatctctgttcttctgtgccccttcttccattttgctgcctggaaagcagatgtgatggctggaattccagtcaccattttggaccatgaggacaacaccctagagatgtggagtggctaaaagaagcctgtgttcctgagaacttagaggaccaggacctctattccaggcttggacacctacatttagactattatatgaggaagcaatcaacttctcacttgtttcaaccactttcacttgcagtcaaacctgaattgtaagtgaaattgctttcctgatagcaaacctgttggattttctcagaatccctgggcaacttt

SEQ ID NO: 20026 - DNA, 1048 bp, Homo Sapiens
cgggctgcaggaattcggcacgaggagcccttacttaccttgcactgagaaagaagacaaaggccagtatgcacagctttcctccactgctgctgctgctgttctggggtgtggtgtctcacagcttcccagcgactctagaaacacaagagcaagatgtggacttagtccagaaatacctggaaaaatactacaacctgaagaatgatgggaggcaagttgaaaagcggagaaatagtggcccagtggttgaaaaattgaagcaaatgcaggaattctttgggctgaaagtgactgggaaaccagatgctgaaaccctgaaggtgatgaagcagcccagatgtggagtgcctgatgtggctcagtttgtcctcactgaggggaaccctcgctgggagcaaacacatctgacctacaggattgaaaattacacgccagatttgccaagagcagatgtggaccatgccattgagaaagccttccaactctggagtaatgtcacacctctgacattcaccaaggtctctgagggtcaagcagacatcatgatatcttttgtcaggggagatcatcgggacaactctccttttgatggacctggaggaaatcttgctcatgcttttcaaccaggcccaggtattggaggggatgctcattttgatgaagatgaaaggtggaccaacaatttcagagagtacaacttacatcgtgttgcggctcatgaactcggccattctcttggactctcccattctactgatatcggggctttgatgtaccctagctacaccttcagtggtgatgttcagctagctcaggatgacattgatggcatccaagccatatatggacgttcccaaatcctgtccagcccatcggcccacaaaccccaaaagcgtgtgacagtaagctaacctttgatgctataactacgattcggggagaagtgatgttctttaaagacagattctacatgcgcacaaatcccttctacccggaagttgagctcaatttcatttctgttttctggccacaactgccaaatggg

SEQ ID NO: 20027 - DNA, 697 bp, Homo Sapiens
gcacgagggcccaaccagacgcccagtcacaggcgagagccctgggatgcaccggccagaggccatgctgctgctgctcacgcttgccctcctggggggccccacctgggcagggaagatgtatggccctggaggaggcaagtatttcagcaccactgaagactacgaccatgaaatcacagggctgcgggtgtctgtaggtcttctcctggtgaaaagtgtccaggtgaaacttggagactcctgggacgtgaaactgggagccttaggtgggaatacccaggaagtcaccctgcagccaggcgaatacatcacaaaagtctttgtcgccttccaagctttcctccggggtatggtcatgtacaccagcaaggaccgctatttctattttgggaagcttgatggccagatctcctctgcctaccccagccaagaggggcaggtgctggtgggcatctatggccagtatcaactccttggcatcaagagcattggctttgaatggaattatccactagaggagccgaccactgagccaccagttaatctcacatactcagcaaactcacccgtgggtcgctagggtggggtatggggccatccgagctgaggccatctgtgtggtggtggctgatggtactggagtaactgagtcgggacgctgaatctgaatccaccataaataaaagctttctgc

SEQ ID NO: 20028 - DNA, 1632 bp, Homo Sapiens
gcgcgaggaaacagccgattggagacgggagccaaccagggctgcattggaggttgaaatcacaaagattagacacctttttagataggtgttcttcagcaccactgacaacacggttctgacagtatttcatgacaatggatggtgacagttctacaacagatgcttctcaactaggaatctctgcagactatattggaggaagtcattatgttatacagcctcatgatgatactgaggacagcatgaatgatcatgaagacacaaatggttcaaaagaaagtttcagagaacaagatatatatcttccaatagcaaacgtggctaggataatgaaaaatgccatacctcaaacgggaaagattgcaaaagatgccaaagaatgtgttcaagaatgtgtaagtgagttcatcagttttataacatctgaagcaagtgaaaggtgccatcaagagaaacggaaaacaatcaatggagaagatattctctttgctatgtctactttaggctttgacagttatgtggaacctctgaaattataccttcagaaattcagagaggctatgaaaggagaaaagggaattggtggagcagtcacagctacagatggactaagtgaagagcttacagaggaggcatttactaaccagttaccagctggcttaataaccacagacggtcaacaacaaaatgttatggtttacacaacatcatatcaacagatttctggtgttcagcaaattcagttttcatgatctgaagaaatgatggaatggggagtgtagagaaatgagagtctgtatgattctggaacagagacatcagaaggaaagactggtgaaaagatgtatctttgtatattaatagctgtaatgtagcttcctgatgcttgactaattgaggtgttaattctgacttgagaatctttttcatgaatgattttaaagaaaaatttggattttaaaggtattaaaatatttttgttttgtacgagagtttgttgctctgtatgactcctgtatgcattgtatattgcaatttattactgtcagagatttgtagacagtttcttattttcatattgaatcatgttacttttgtaattcaagtaagcggctgggttaattcatgatgtttgcccttttaataaaatataagggtagagttcattttgaatgcaagttgcctttattataaatttgagtttgtcttggttataccttgcatgataacctagctagatttctagcatttgctgtatttattaaaattattatttttttggtaaaacattaatagtttaagcagcatcatttttttaaaaatgtaattgaataagtgtgaatgcagaagcaaatattgtctgccctgttaaacttggtgcccattaacagtgtttacactgttcatcgtgcctgttatgtagttttagttattggagctttttaagactagatttggttttgagtacatttttaagatgttggaatatattaagttaatgtagtcctagtgctctgaaatggtgcccctttcatttggacatgatttttttcaatcatatcttcagtactatagtatctcttacgaagaggagttatagtctgatggaaatgtcttcatttacctttt

SEQ ID NO: 20029 - DNA, 1106 bp, Homo Sapiens
atcccccgggctgcaggaattcggcacgagggttgatagctggtaatgaatcttgccctcagcctcagacatcggaacacctggctgctatagagatcatgaaactgaagcatattttgattctacaaaataaaattgatttggtaaaagaaagtcaggctaaagaacaatacgagcagatccttgcatttgtccaaggtacagtagcagagggagctcccattattccaatttcagctcagctgaaatacaatattgaagttgtttgtgagtacatagtaaagaaaattccagtacccccaagagactttacttcagagccccggcttattgttattagatcttttgatgtcaacaaacctggctgtgaagttgatgaccttaagggaggtgtagctggtggtagtatcctaaaaggagtattaaaggtgggccaggagatagaagtaagacctggtattgtttccaaagatagtgaaggaaaactcatgtgtaaaccaatcttttccaaaattgtatcactttttgcggagcataatgatctgcaatatgctgctccaggcggtcttattggagttggaacaaaaattgaccccactttgtgccgggctgacagaatggtggggcaagtacttggtgcagtcggagctttacctgagatattcacagaattggaaatttcctatttcctgcttagacggcttctaggtgtacgcactgaaggagaccagaaagcaacaaaggtcaaaagctgtctaagaatgaagtgctcatggtgaacataggatccctgtcacaggagggagagttagtgctgtcaagccgatttgggtaaattgttttgaccaatccgtgtgcacagaggtaggagaaaaaattgcccttaccgaaaattgaaaacacctggcgtttattggttggggtcagataaaaagagagtggacatccagccaacatatgatgatgactgaaaaaatcctttaataaaactttcggatgagatttggagtgggaattcctcttaacacccaaggggtttattttcccaccacttttgggaaattaatttccactttcttttcttattagggaaacgggtaagggta

SEQ ID NO: 20030 - DNA, 768 bp, Homo Sapiens
  misc_feature (484)..(493): n is a, c, g, or t
gcacgaggccaatacactaagcacatatatggctagtgtaattaaagaattggattttaaagtttcagtcaatttaaacttaaaccgaagcagtggaaaatgttgaaatatatatatattccttgtgggggtttttattagggcagaatggaaaatgggaactagagtgctttcttggttctgataggaaagtgaattatttatatacttacaatacaggatggtgattttcaggtatagttcctgaattttatggtaaaacttttgtagtcatttcaatagctgtctttcccaaaggcactttattgtccgctcttatttccttaatcattgttctcactgtatcatcttgtaatttattcatttcttgtaatctgtccattcccttttaataagtttaggtcagcctcttagaaccatttctttttcatgggatggggtagggggagttaaagcttgcttgtccacaactgagttacttatnnnnnnnnnngcaactctggttgagaaatcagatgcatgagattgtatgtctaattctgcaagatcctgaaggcatggctcttaaaggatgccatcatgtagtttagaagccactaatttccgaggagtaatctaatgttggttagatctttggattgactgcagcaaagtattggtagagcagtctatctcatataattctttctaggaaaatttgggaagcgactttaacacaaaaacgaggcaatttactatttgccattttctatgttaactgcttaatta

SEQ ID NO: 20031 - DNA, 858 bp, Homo Sapiens
  misc_feature (504)..(522): n is a, c, g, or t
  misc_feature (573)..(586): n is a, c, g, or t
gcacgaggtgtttattctgatacttttatttgggagtcctatatcacaaaatgacatgtgtactgtttttacaaccggtattagaaattgagatgtttttattttgactatttgagagtaaaattgtagataatgttccaaaccatcatcaaaaatgcagagcaaacttttctgtatataaactgtacataaaaacaaggcactatacatttttggggagatattaaggtagaaaggttgattcgcatagattctccagagtccatgccattaagtacaaattctttgttcattttagcaccggaagcagtactcagaacaagtcatacctaatgctgcaggaaacatttccaaacgtgtatgaagatacatattggtggcagagctaattcaacagaagcaactccatctaccttttcatgttattttgacaccaaaacaaatcttgaaagtgaatgaatacatattgctttgttaaatacatatttgacttatatggtgttnnnnnnnnnnnnnnnnnnntttagaatccacaaactatcaaaataacactttataaagagaactgcttcnnnnnnnnnnnnnnggcattgcctagctggaacaagaaggcagtgctatctatagcagctgcggcttaagtgcacataacagatacttttattaattctgataacctcctgaatggtggaaagaagtttccaaacagttcccttgaacatttacaaaatacacaactccgggacagcagtatctttaacaatgtcatgttctgaaaactctgattgaaaaatactttgtgaaaaacaccagtcaaaaatatatatccagggggggcccgggaaccaattcgcctaa

SEQ ID NO: 20032 - DNA, 1212 bp, Homo Sapiens
gcacgaggcagacatacaggtgcgccgtggggaaggtgtgacatccacttctcgccgcattggaccagaactatccaggcgtatctaccttcagatgaccactttacagccacatctctctttagatagtgctgactgattctagccctcagggatgaggatgaaaagctggaaacttccacttccccaacctcagagcctgactgtaatgaagagactggcagcacctcctggaacacaagcctaggtgaggcccagtctttcttgggtcttattatttgtgaaggtctctctgcctgtcggctggggcagagactgaaatactgccacctacctttggcatttaatgttcctctcctggcaaaaattcactgccacagacaaaccacccccactcctacccagccagccctcaaaacacaaaggaacaaagacagtccactcagacacttatttaataactgtagaaatccaaaagaattagcatcaaatcttgaagtcgtgagtgaagctgcgggttggcttgactgggctcagccactgagctgcctcaaccggccaaggaacgggattatgatgactatgcggacttctatattgtcttcatctcattgtgtgtattatgtatttagtttcaataaagcatttgtaccaatggctctggagcttggaggaagactaaaggaatgtgtagtgattctgagtaagatgtagacctacgcagcagagctatgggggagaagattaacaaagtcctttcttccaatatcaggatagtcatgagttgcagtcccatccaaaaggtcattagggctaaaaggccctctgtgtctctgaactatgagattcttgctccctccgggggagccaaggagcttgcaactgggagtttgcagtgaatgagcaccatgacacagtcatttctgatccctctatccagctgttgtgaaaagatgaagcaaaggaggcaagaaaatgcttaatttagcagacaagagaatggacagtgtgatccttgtttgtgctagccattgggtgatgcaccacttttcagctccatgatgctacttgtttcccttcatatcctgtttccatttatgcccttcagttatggtctagaatcaaacaattctaaacctcagtgtcttatgaagctgacacttcaaaacctgcagaagcaggttgcctttgaggtatttagcggacgcgtgg

SEQ ID NO: 20033 - DNA, 1380 bp, Homo Sapiens
  misc_feature (506)..(519): n is a, c, g, or t
agaagcagctttacctacttgtttctttttgtctctcttcctggacactcactttttcagagactcaacagtctctgcaatggagtgtgggtccaccttagcctctgacttcctaatgtaggaggtggtcagcaggcaatctcctgggccttaaaggatgcggactcatcctcagccagcgcccatgttgtgatacaggggtgtttgttggatgggtttaaaaataactagaaaaactcaggcccatccattttctcagatctccttgaaaattgaggccttttcgatagtttcgggtcaggtaaaaatggcctcctggcgtaagcttttcaaggttttttggaggctttttgtaaattgtgataggaactttggaccttgaacttacgtatcatgtggagaagagccaatttaacaaactaggaagatgaaaagggaaattgtggccaaaactttgggaaaaggaggttcttaaaatcagtgtttcccctttgtgcacttgtagnnnnnnnnnnnnnnccttctagagctgatttgatggacaatggagagagctttccctgtgattataaaaaaggaagctagctgctctacggtcatctttgcttagagtatactttaacctggcttttaaagcagtagtaactgccccaccaaaggtcttaaaagccatttttggagcctattgcactgtgttctcctactgcaaatattttcatatgggaggatggttttctcttcatgtaagtccttgggaattgattctaaggtgatgttcttagcactttaattcctgtcaaattttttgttctccccttctgccatcttaaatgtaagctgaaactggtctactgtgtctctagggttaagccaaaagacaaaaaaaattttactacttttgagattgccccaatgtacagaattatataattctaacgcttaaatcatgtgaaagggttgctgctgtcagccttgcccactgtgacttcaaacccaaggaggaactcttgatcaagatgcccaaccctgtgatcagaacctccaaatactgccatgagaaactagagggcaggtcttcataaaagccctttgaacccccttcctgccctgtgttaggagatagggatattggcccctcactgcagctgccagcacttggtcagtcactctcagccatagcactttgttcactgtcctgtgtcagagcactgagctccacccttttctgagagttattacagccagaaagtgtgggctgaagatggttggtttcatgtttttgtattatgtatctttttgtatggtaaagactatattttgtacttaaccagatatatttttaccccagatggggatattctttgtaaaaaatcctcgtgc

SEQ ID NO: 20034 - DNA, 1661 bp, Homo Sapiens
  misc_feature (1488)..(1500): n is a, c, g, or t
gcacgaggcttttctgctggtgtagccaatcgtagcgccagcatacgcattccccggactgttggccaggagaagaagggttactttgaagatcgtcgcccctctgccaactgcgaccccttttcggtgacagaagccctcatccgcacgtgtcttctcaatgaaaccggcgatgagcccttccagtacaaaaattaagtggactagacctccagctgttgagcccctcctagttcttcatcccactccaactcttccccctctcccagttgtcccgattgtaactcaaagggtggaatatcaaggtcgtttttttcattccatgtgcccagttaatcttgctttctttgtttggctgggatagaggggtcaagttattaatttcttcacacctaccctcctttttttccctatcactgaagctttttagtgcattagtggggaggagggtggggagacataaccactgcttccatttaatggggtgcacctgtccaataggcgtagctatccggacagagcacgtttgcagaagggggtctcttcttccaggtagctgaaaggggaagacctgacgtactctggttaggttaggacttgccctcgtggtggaaacttttcttaaaaagttataaccaacttttctattaaaagtgggaattaggagagaaggtaggggttgggaatcagagagaatggctttggtctcttgcttgtgggactagcctggcttgggactaaatgccctgctctgaacacgaagcttagtataaactgatggatatccctaccttgaaagaagaaaaggttcttactgcttggtccttgatttatcacacaaagcagaatagtatttttatatttaaatgtaaagacaaaaaactatatgtatggttttgtggattatgtgtgttttgctaaaggaaaaaaccatccaggtcacggggcaccaaatttgagacaaatagtcggattagaaataaagcatctcattttgagtagagagcaagggaagtggttcttagatggtgatctgggattaggccctcaagacccttttgggtttctgccctgcccaccctctggagaaggtgggcactggattagttaacagacaacacgttactagcagtcacttgatctccgtggctttggtttaaaagacacacttgtccacataggtttagagataagagttggctggtcaacttgagcatgttactgacagagggggtattggggttattttctggtaggaatagcatgtcactaaagcaggccttttgatattaaattttttaaaaagcaaaattatagaagtttagattttaatcaaatttgtagggtttctaggtaatttttacagaattgcttgtttgcttcaactgtctcctacctctgctcttggaggagatggggacagggctggagtcaaaacacttgtaattttgtatcttgatgtctttgttaagactgctgaagaattannnnnnnnnnnnnataataaggaataaaccccacctttattccttcatttcatctaccatttttctgggttcttgtgtggctgtggcaggccagctgtggttttcttttgccatgacaacttctaattgccatgtacagtatgttcaaagtcaaatacttcctccattgtaaac

SEQ ID NO: 20035 - DNA, 1051 bp, Homo Sapiens
  misc_feature (897)..(922): n is a, c, g, or t
ccgagactcagggtcttcaggaaagtctcgaaggaagcggcagatttatggctatgacagcaggttcagcatttttgggaaggacttcctgctcaactaccctttctcaacatcagtgaagttatccacgggctgcaccggcaccctggtggcagagaagcatgtcctcacagctgcccactgcatacacgatggaaaaacctatgtgaaaggaacccagaagcttcgagtgggcttcctaaagcccaagtttaaagatggtggtcgaggggccaacgactccacttcagccatgcccgagcagatgaaatttcagtggatccgggtgaaacgcacccatgtgcccaagggttggatcaagggcaatgccaatgacatcggcatggattatgattatgccctcctggaactcaaaaagccccacaagagaaaatttatgaagattggggtgagccctcctgctaagcagctgccagggggcagaattcacttctctggttatgacaatgaccgaccaggcaatttggtgtatcgcttctgtgacgtcaaagacgagacctatgacttgctctaccagcaatgcgatgcccagccaggggccagcgggtctggggtctatgtgaggatgtggaagagacagcagcagaagtgggagcgaaaaattattggcattttttcagggcaccagtgggtggacatgaatggttccccacaggatttcaacgtggctgtcagaatcactcctctcaaatatgcccagatttgctattggattaaaggaaactacctggattgtagggaggggtgacacagtgttccctcctggcagcaattaagggtcttcatgttcttattttaggagaggccaaattgttttttgtcattggcgtgcacacnnnnnnnnnnnnnnnnnnnnnnnnnnaaggtgtcttataatcttttacctatttcttacaattgcaagatgactggctttactatttgaaaactggtttgtgtatcatatcatatatcattttagcagtttgaaggcatacttttgcatagaaat

SEQ ID NO: 20036 - DNA, 1740 bp, Homo Sapiens
gcacgaggtgacctgcaagatgccctggtaatcttacagttatatgaacgaattaaagttcctgttgactggagtaaggttaataaacctccatacccgaaactgggagccaacatgaaaaagctagaaaactgcaactatgctgttgaattagggaagcatcctgctaaattctccctggttggcattggagggcaagacctgaatgatgggaaccaaaccctgactttagctttagtctggcagctgatgagaagatataccctcaatgtcctggaagatcttggagatggtcagaaagccaatgacgacatcattgtgaactgggtgaacagaacgttgagtgaagctggaaaatcaacttccattcagagttttaaggacaagacgatcagctccagtttggcagttgtggatttaattgatgccatccagccaggctgtataaactatgaccttgtgaagagtggcaatctaacagaagatgacaagcacaataatgccaagtatgcagtgtcaatggctagaagaatcggagccagagtgtatgctctccctgaagaccttgtggaagtaaagcccaagatggtcatgactgtgtttgcatgtttgatgggcaggggaatgaagagagtgtaaaataaccaatctgaataaaacagccatgctcccaggtgcatgattcgcaggtcagctatttccaggtgaagtgcttatggcttaaggaactcttgggccattcaaaggacttttcattttgattaacaggactagcttatcatgagagccctcaaggaaagggtttaagaaaaacactcctctttcccatagtcagagttgaatttgtcaggcacgcctgaaatgtgctcatagccaaaacattttactctctcctcctagaatgctgcccttgacatttcccattgctgtatgttatttcttgctctgttatcttttgccctcttagaatgtccctctcttgggacttgcttagatgatgggatatgaatattattagacagtaattttgctttccatccagtatgctagttcttattcgagaactatggtcagagcgtatttggatatgagtatcctttgcttatctttgtagtactgaaaatttgccgaagtaactggctgtgcagaatgtaatagaagcttttcttattcttttattcttaagatcagtatctttttacagtattctttctacatgatccttttttgtacatttaagaatattttgattatattaaacaagactgctgattttgctactttttttaaggggtcttcaagtaagtaaaacatacatcgtagctagaagaaaaatgtaccttaaatttgcatcttccctctcatacccaagctgtaaacaattgaaatattttgtcttaaatcacttggttcaatacatgcttatttgttttaaaacctgtatcatcaaactctctctctaaatttaaaatgctgttgaatatgatacttttgaggagagagtgtgctcagaacttagacgggatttggtaggcaagtatgctaagtgtacaatatattttttaattttacacctgaaacaaagaaatgtggtcactaaaataaaagtatatatgtaggaattaatgtactcttgctttgtcaagctgtttgctatagtttccaggtattatgttactctaactctgaaagtgatgtaatctggtagcatgtagtagtcaaataaaggcatttactaat

SEQ ID NO: 20037 - DNA, 925 bp, Homo Sapiens
gcacaagggttttggtgatttttgtctgattgcaatgtctggacgtggtaagcaaggaggcaaagctcgcgccaaagcgaaatcccgctcttctcgcgctggtctccagttcccggtgggccgagtgcaccgcctgctccgtaaaggcaactacgcagagcgggttggggcaggcgcgccggtgtacctggcggcggtgttagagtacctgaccgccgagatcctggagctggccggcaacgcggctcgcgacaacaagaagactcgcatcatcccgcgccacttgcagctggccatccgcaacgacgaggagctcaacaaactgctaggccgggtgaccattgctcagggcggcgtccttcctaacatccaggccgtgcttctgcctaagaagaccgagagtcaccacaaggccaagggcaagtgatttgacaggttgcaaaagcttctcatttcagagagatgccaggatcctaagtgcctgccaaacttaccaattctaaggaataagtggatggatggcattactgattcctacattactgattgattctgcatccgcaaattgttttattaaaaacattctacatcatgtgtggggagataaggaggataaaatgaagagaaagaatattattgaggggaagttcttctgaatacaaaatgtgtttaattttttaaataagtattacattcacagggttcaaactatttgaagtaaagagattatatataaagaatccatccctcaacttacccaggtggtcacttttctttttcttgtgtatctgcccagtattcattcctgctgatatcagtcaataatgaatgatacgtgttttcttcacttttttcattcttgtcaggtagcaagactgtgtagactttttctgcacttgcccttttcataacaatctatcttgga

SEQ ID NO: 20038 - DNA, 1779 bp, Homo Sapiens
gcacgaggcttcattgtagaagagattcaaagaattgctgaaggcccatacatagatgttgtgaaacttcaaactatgagatgtctttttgaagcatatgaacatgttctttcccttttggagaatgtatttactcctatgttctgccatagtgatgagtatttcagacaacttttaagaggtgcagaatcaccaacacgcaattcaaaattgaacagaggtagcctaagtttggatgattttcggaacacacagaaaaggggagaatcatttggaatcagcagaataggtagcaaaattaaaggagtattcaaaagtaccacaatggagggagctatgttgcctaattatggtgtagctgaaggtgaagatgattttattgaagaaggtattgttgtaatggaagatgattctccagtggaggctgtgagcacacctaatactccccgaaaccttgctgcatggaaaattagcattccatatgtagacttttttgaggatccctcctctgaaaggaaggagaaaaaagaaagaattcctgtgttttgtattgatgttgaaagaaatgatagaagagcagttggacacgagcctgaacattggtctgtctatagaagatatcttgaattctatgtacttgaatcaaaactaacagaatttcatggtgcatttcctgatgcccagcttccttctaagaggatcattggccccaaaaattatgaattcttaaagtcaaagagggaagagttccaagaatatctacagaaacttctgcagcatccagaactgagtaatagtcaacttctggcagactttctttcccctaatggtggggaaacacaatttcttgataagatactaccagatgtaaatcttgggaaaattataaaatctgttcctggaaaactaatgaaagagaaaggtcagcatttggaaccttttatcatgaatttcattaattcttgtgagtctccaaagcctaaaccaagtagaccagaactgaccattctcagccctacttcagaaaacaacaagaagcttttcaatgatctgtttaaaaataatgcaaaccgtgctgaaaatacagagagaaagcaaaatcagaattattttatggaggtgatgactgtagaaggagtctatgattacctgatgtatgtaggacgggtagttttccaggttcctgactggcttcatcatctcttaatgggaactcgaatcctctttaaaaacaccctggaaatgtatactgattactatcttcagtgtaaactagaacagctatttcaggagcaccgtttggtctcactcataacacttctcagagatgctatattctgtgaaaacactgaacctcgctctctccaagataagcaaaaaggagcaaaacagacttttgaagaaatgatgaattacattccagatctgttagtcaagtgtattggtgaagaaaccaagtatgaaagcatcagacttctgtttgatggcttacagcaaccagtactcaacaagcagctgacttatgttttattggacattgtgatacaggaactgtttccagagctcaataaggtacaaaaggaagttacctctgtgacatcttggatgtaaacacttggatttggtatagaataacccattgaaatttctgctgtgcgagggtggtagaaatttacttttttgggtatattcttatatatattatgtacatcgctgtctgaaattttagttattttttgtttttaataaagactaacacaaacttaatgattaaaagtg

SEQ ID NO: 20039 - DNA, 793 bp, Homo Sapiens
gcacgagggcaagaaccttcctacctattctaacgtttttgccctctaagaaaaatggcctcaggtatggtatagacatagcaagaggggaagggctgtctcactctagcaaccatccctccattacacacagaaagccctcttgaagcaaaagaagaagaaagaaagaaagcttatctctaaggctactgtcttcagaatgctctgagctgaatgctcttgctcctttcccaagaggcagatgaaaatatagccagtttatctatacccttcctatctgaggaggagaatagaaaagtagggtaaatatgtaacgtaaaatatgtcattcaaggaccaccaaaactttaagtaccctatcattaaaaatctggttttaaaagtagctcaagtaagggatgctttgtgacccagggtttctgaagtcagatagccattcttacctgccccttactctgacttattgggaaagggagaactgcagtggtgtttctgttgcagtggcaaaggtaacatgtcagaaaattcagagggttgcataccaataatcctttggaaactggatgtcttactgggtgctagaatgaaaatgtaggtatttattgtcagatgatgaagttcattgtttttttcaaaattggtgttgaaatatcactgtccaatgtgttcacttatgtgaaagctaaattgaatgaggcaaaaagagcaaatagtttgtatatttgtaataccttttgtatttcttacaataaaaatattggtagcaaataaaaataataaaaacaataacttt

SEQ ID NO: 20040 - DNA, 1371 bp, Homo Sapiens
gcacgaggatgccgcgcaatgcctctgttcccaacctgcgtgggtccgaggagaggcttctggccctgaagaagccagctctgccagccctaagccgcactactgagctgcaggacgagctgagccacttgcgcagccagattgcaaagatagtggcagctgatgcagcttcggcttcattaacgccagatttcttatctccaggaagttcaaatgtctcttctcccttaccttgttttggatcctcattccactctacaacttcctttgtcattagtgacatcaccgaggagacagaggtggaggtccctgagcttccatcagtccccctgctttgttctgccagccctgaatgttgcaaaccagaacacaaagctgcctgcagttcgtctgaagaggatgactgcgtctctttgtccaaggccagcagctttgcagacatgatgggtatcctgaaggactttcaccgaatgaaacagagtcaagatctgaaccggagtttattgaaggaggaagaccctgctgtgcttatctctgaggtcctaaggaggaagtttgctctaaaggaagaagatatcagtagaaaaggaaattgacaaccctcagctctgcaaactcagtctcatgctcctggaataccttcaatagctgccttcctcaccgcagatgtttctgcctcttaaggatagatcttctgcaacagtcttgctgacaagctagagcttggactgaaagagaagagctggattatatatttcccagacttcaaaccctagcagaagctaaggcttgtgatttgacctgagacatttgtttcaggtaatcgtgtagaatgaagtatcttagtttaaagggtaagagagaagttgtttctggtttttccttgcccctgtgtgaaaataggtcctaaatgactgacttcactgcattagaccctatagctggtctcacaagacactttgtgcccagctgtcactcactcagcagcttccttgcagcagagcagggctgaggggaaggggctatgaatgtttgtatacatgttcacagggcacggaaaatcttatgctgctccgtcataaacctacaccaatgcccagcaatcaccctcctcacttccttgtctagatgtagaggtcaggctgctgaaccagccaacacatgggctactgctgggaagcctgggctgttttttttcttaacacattttatattactgaacaaccaaatctaccctcacgggccctgaggcttatcagttccactgattaaaactttctcttccacggactttaagcccggtaggaaagagagaggaggagggggaagagcaaccatctttcttcaaggcccttgactgctcctttgggc

SEQ ID NO: 20041 - DNA, 1019 bp, Homo Sapiens
gcacgaggctttctcatccttcccaacccagtgccgtttatttcagaagcttcctggccactgggcttggatgcttcgggcttctgactgctccataggttttgactggtgaaacaggggcccagatgacaacctctccttcgctccacaggtacgcgggagcctcaggttctctcaggggcagcaaagtggcccaagctgcccctgacagcacagggcctgggggtggctaacgagagaggccttacagtgccggcatgcctcctcttccactgtcgtccttcctcagagggcctcacgccaaacaaacggccttttcgtgtgaaacatcttcagggcgggaaaggggccacttctggctttgttagcaataactgaccttcagtttacccttctgaaggagcagggactcagcacagaattcactttagacggggctgaaggagtgtccctcctctatgtgaaaagaaaattgttttattcttcattctgactttttaactgtttggctcacttccagttagtttgaatgaaaataataattttctacttggagttgaagagggcagaatccgcagctctcatcattgtgatgtgtagcatgtctgccctctgactggacatcattgccattaactttcttctgggcatcacggcaatgtcacgatgcccagacttggagcaaggcaaccttggagtcagtccactcataaaatatggtaacacccattttaaaatttaagttttgtccttaaagacaacttcagtggttaattataaaagttgtgttacttcgtcctaaattaaattgatagaaagatttaaaaatgtgttttgtttctactattcagaaactgcgaactagggaaaggttggtatgaaaaaatgtctttccttttttcaatgtacatagttcaactctttctttgttacatttaaactatatccatggatatcagtctgctttggactcctctgctagtgttacagatggaaataaaaccattaatttgaaccaa

SEQ ID NO: 20042 - DNA, 1641 bp, Homo Sapiens
  misc_feature (1478)..(1486): n is a, c, g, or t
gcacgaggcaaggacgtgcctttggaaatcttggaaacacacattacctccttggcaacttcagggatgcagttatagctcatgagcagcgtctccttattgcaaaagaatttggagataaagcagctgaaagaagagcatatagcaaccttggaaatgcatatatatttcttggtgaatttgaaactgcctcggaatactacaagaagacactactgttggcccgacagcttaaagaccgagctgtagaagcacagtcttgttacagtcttggaaatacatatactttacttcaagactatgaaaaggccattgattatcatctgaagcacttagcaattgctcaagagctgaatgatagaattggtgaaggaagagcatgttggagcttaggaaatgcatacacagcactaggaaatcatgatcaagcaatgcattttgctgaaaagcacttggaaatttcaagagaggttggggataaaagtggtgaactaacagcacgacttaatctctcagaccttcaaatggttcttggtctgagctacagcacaaataactccataatgtctgaaaatactgaaattgatagcagtttgaatggtgtacgccccaagttgggacgccggcatagtatggaaaatatggaacttatgaagttaacaccagaaaaggtacagaactggaacagtgaaattcttgctaagcaaaaacctcttattgccaaaccttctgcaaagctactctttgtcaacagactgaaggggaaaaaatacaaaacgaattcctccactaaagttctccaagatgccagtaattctattgaccaccgaattccaaattctcagaggaaaatcagtgcagatactattggagatgaagggttctttgacttattaagccgatttcaaagcaataggatggatgatcagagatgttgcttacaagaaaagaactgccatacagcttcaacaacaacttcttccactccccctaaaatgatgctaaaaacatcatctgttcctgtggtatcccccaacacggatgagtttttagatcttcttgccagctcacagagtcgccgtctggatgaccagagggctagtttcagtaatttgccagggcttcgtctaacacaaaacagccagtcggtacttagccacctgatgactaatgacaacaaagaggctgatgaagatttctttgacatccttgtaaaatgtcaaggatccagattagatgatcaaagatgtgctccaccacctgctaccacaaagggtccgacagtaccagatgaagactttttcagccttattttacggtcccagggaaagagaatggatgaacagagagttcttttacaaagagatcaaaacagagacactgactttgggctaaaggactttttgcaaaataatgctttgttggagtttaaaaattcagggaaaaaatcggcagaccattagttactatggatttannnnnnnnncctttcaaacacggtaaggaaacaatctattacttttttccttaaaaggagaatttatagcactgtatacagcttaaaatatttttagaatgatgtaaatagttaaccttcagtagtctattaaggcattaatacttctctggaacatgcgcgtt

SEQ ID NO: 20043 - DNA, 2094 bp, Homo Sapiens
gcacgaggggatcacttttatttcaaacaattaaatacaaaccaatattttaccccttcatagatgaaatcacatcttttcaggatatgagtataaagtaacaagcctagggcagagcttgtactgacaaagtcctgaaactacaatgagaggaaacacattgctctacttcgggataagtcatgaccgagactcaatttcagagacgctctatgaacagaggtgcttgaagccacagtggcagaagggaaagatggggaagtgtgccgaagagcctccaggcatgacagacagtcccctgaccaagcacaagtaacaggccctttgggtctctgcttctcactggaaaatgatgaagcctagatctgatgactcctagtgccaacatttaacaaagttcgaaagttatgcaggacttcacacatgtacggaatggctgtatcacagaatattatgcgttagaaagttcacggtcactatacctagctctaaaatttttcagagaaacagcagactaataagtgaatcttaaataaaggaataacattttaatgaaataaatgaaacagagcagggaaaccaaagagccaattaggggaagaatcctgaaaaagtatggcttcacacagcagcagcattgaagaaaacactatcgatttttcccagagaaaaaaactccaaaaatgtccaataaccaagtgcacagagttatggtcaataagactttgaacatgcatcacacatacataagtacataaagaaaattttcatttatttttccctcagatatacttcaaaataacatgtagacacagaatcacaaatatatacaaaacaaagtatcgcctggttatttcaagaagagttttccctcaattttcttagctgctgtgcataaaattcaaagctttcagggggttcaatgaaagggacaggctctccagcatacttcagcaaagatgcgtaacgctttagaaacagatcatccaattttgtattctttgcagtcaaatgttcatacagtgctttagcagatgtgacatctttctctgagacatagcttttcatgagggaattgtatgcttcttccttttcatttaattcaggaatcaattctaacacagatttcacagttgatgcctttccttgtttcctagaattcctaaggaggaacaacaacaaaatcggggtttgttcagcaattgcaccacatctctgtaggagagctctggcatcatccaccttgcctgcatccacaagttgaaggaaaaaatcagtgacaggtttataaattgcaaactgattggccaatctctccgccatgatgcttatcttttcaactgctggttccaactgctcctctattacttttctgaataagtatgccaagccgaagtattggggttcaatgactttattctctgaagtaagcatattttcaatgttttctattgcggcatctatgttattattctttatttgagccaaagcaatgttattgatgaaaaccatttttgaaagtccaatggagtcttcgagtccatttaacatcttctgaactacttctatgttttcaacatcacccttcatggccaatgcctggatgacacgggtcactgctaacctagaaggggtctgctgctgatccaatactgttttcagtgttgtcacagcctctttcaaataatcccgcctaacttgcgttatgatgaggcggctgttggcagcatcgttcagtgtgaagcccttgatgtgggtctccgcgaatgctttcacttccattgcttgtgtaaaataatcttctgacatcagtaatttaatgagattgctgtaggtttcagcattaaacacaatgttttgctcttttgcattcaggaaaatatcatatgccccttttttttggttcaatcggcaggcaatcaatatatctttctggaaatcaggttctgtggttgaggctgacgaagaattcagggaatgtttttcatcttcataccacaactcaggtacgtcaaacggaacttcctggttaccctctctaaggatttctgctaataatcttaatgtcttttcacgaggaataacacctcgtgc

SEQ ID NO: 20044 - DNA, 1277 bp, Homo Sapiens
gcacgaggggaggaacctgtctttaaagctgtccctgaagtgacagcggagagaaccaggcagcccagaaaccccaggcgtggagattgatcctgcgagagaagggggttcatcatggcggatgacctaaagcgattcttgtataaaaagttaccaagtgttgaagggctccatgccattgttgtgtcagatagagatggagtacctgttattaaagtggcaaatgacaatgctccagagcatgctttgcgacctggtttcttatccacttttgcccttgcaacagaccaaggaagcaaacttggactttccaaaaataaaagtatcatctgttactataacacctaccaggtggttcaatttaatcgtttacctttggtggtgagtttcatagccagcagcagtgccaatacaggactaattgtcagcctagaaaaggaacttgctccattgtttgaagaactgagacaagttgtggaagtttcttaatctgacagtggtttcagtgtgtaccttatcttcattataacaacacaatatcaatccagcaatctttagactacaataatacttttatccatgtgctcaagaaagggcccctttttccaacttatactaaagagctagcatatagatgtaatttatagatagatcagttgctatattttctggtgtagggtctttcttatttagtgagatctagggataccacagaaatggttcagtctatcacagctcccatggagttagtctggtcaccagatatggatgagagattctattcagtggatcagaatcaaactggtacattgatccacttgagccgttaagtgctgccaattgtacaatatgcccaggcttgcagaataaagccaactttttattgtgaataataataaggacatatttttcttcagattatgttttatttctttgcattgagtgaggaacataaaatggcttggtaaaagtaataaaatcagtacaatcactaactttcctttgtacatattattttgcagtatagatgaatattactaatcagtttgattattctcagagggtgctgctctttaatgaaaatgaaaattatagctaatgttttttcctcaaactctgctttctgtaaccaatcagtgttttaatgtttgtgtgttcttcataaaatttaaatacaattcgttattctgtttccaatgttagtatgtatgtaaacatgatagtacagccatttttttcatatgtgagtaaaaataaaatagtatttttaaaaatat

SEQ ID NO: 20045 - DNA, 1075 bp, Homo Sapiens
gcacgagggttctttttgttcactcctaccccccatcaccatttgattgatctccttaccctgtaatttccccttcttgtcgcttacctgcagtatctttcccacccaggcatgccttattctttctaaaggaaagtatgaatggagaggggaaagcttgggaaactgatagatttccttggatgccaaaacacctccatagcctgtctgcccggccctatgtggaaacagcattgagtttcaagtcctttatgcctccacccagggatagccacttgtaatccacatggcaattgtgaaacaagcaggaaatgcgtaattgtcagaattttgtggggaaaggactagggaataaggaaaacaaagatcttccttgtgttttagagctgtcagctagaggagcacctgcttgagtctgatgccatctaatggtcccagaagaaactgggttttgaacctagagttccatggactcttaggaattagactactactactactaagcattcactggtgcttactatgtgctattgctgtgccaagtatctgaaacctgtcttcttaccttatttttcaagataattctatgtggcaggtattactatctcaattctaagagtgagaaaatggagttttagaaacatttactaacttgcctgggtcacatagctaaggaagaggtggacttgcccagctttgcataaaactcctcaaaagagttgcctatactccctgactccacttatcttcctactatcctctttttaaaatatattatttatttatttaaataagcaatatatgaatgtggtttgaaattcaaaagacacaaagaagtatacagaggaaagcctcactctcaatccttctcaaggtttgctaattcctcttgcataggcaatccgttcttccagctttgtgtttatctttccagagagtttactgtgtataagcaaatatgtatatctttattcttgctcagtattttcgcaaacagcagctgtctaagttcactgttctgaactttatttttttaaattaaaaatatatgggctatgtagtattctaggggggg

SEQ ID NO: 20046 - DNA, 798 bp, Homo Sapiens
  misc_feature (508)..(532): n is a, c, g, or t
ccttgttcacaaaagactttattatctagtgatgcatactgagaacatacagaaatctgcatggtccacttcacatgcagtaaaacaatcttcactttacaataagtgagtgtcaactgttttatgcaatagacaacactttaaagtcacattcttaaagaaaagcttcatttacaaaataaataaaaggtaaagaagcaattaccgcttttaaaaagcagctgctttgttcaagagtggaaggtttatgcctgtattgaaagacaacatgatcacaaataatgaaaacaatgaacaaatgaaaaacacttttaccataaagcagtacactttcaaaatgacatacaaatagttaaaaatttcattacgttgtctagcctttaaatatgaggactttcaaaattaggcctcaacatttgtaattagtaaatgaaaactacgcatcgtttctatgtcactaggaactatatttaacaaaatgtatataaagtctatagcaagttgattnnnnnnnnnnnnnnnnnnnnnnnnncagtacactgaaggcgctctatccatcaagcgcgttctcttccaattttaaatgtgatgaacaaacagaaattgtaactatgccacagttgcaatgccaaaaaataaaacaagatcagttatcacacatgcagggaattctgccacaaagctaacatccctcatttgtcagttgttccaataaaataacatcttaaaacaccagagatgttgatgggtttagcttaccttcaatgtactgaatgctgcacacaaccctgctttaaa

SEQ ID NO: 20047 - DNA, 1641 bp, Homo Sapiens
gaattcggcacgaggggtctcctatatgatataagaagagtactaattgctctcgtgtattcggtgccgcgactttcacgatggctcgcccaaccttactaccttctgtcggccctgctctctgctgccttcctactcgtgaggaaactgccgccgctctgccacggtctgcccacccaacgcgaagacggtaacccgtgtgactttgactggagagaagtggagatcctgatgtttctcagtgccattgtgatgatgaagaaccgcagatccatcactgtggagcaacatataggcaacattttcatgtttagtaaagtggccaacacaattcttttcttccgcttggatattcgcatgggcctactttacatcacactctgcatagtgttcctgatgacgtgcaaaccccccctatatatgggccctgagtatatcaagtacttcaatgataaaaccattgatgaggaactagaacgggacaagagggtcacttggattgtggagttctttgccaattggtctaatgactgccaatcatttgcccctatctatgctgacctctcccttaaatacaactgtacagggctaaattttgggaaggtggatgttggacgctatactgatgttagtacgcggtacaaagtgagcacatcacccctcaccaagcaactccctaccctgatcctgttccaaggtggcaaggaggcaatgcggcggccacagattgacaagaaaggacgggctgtctcatggaccttctctgaggagaatgtgatccgagaatttaacttaaatgagctataccagcgggccaagaaactatcaaaggctggagacaatatccctgaggagcagcctgtggcttcaacccccaccacagtgtcagatggggaaaacaagaaggataaataagatcctcactttggcagtgcttcctctcctgtcaattccaggctctttccataaccacaagcctgaggctgcagccttttatttatgttttccctttggctgtgactgggtggggcagcatgcagcttctgattttaaagaggcatctagggaattgtcaggcaccctacaggaaggcctgccatgctgtggccaactgtttcactggagcaagaaagagatctcataggacggagggggaaatggtttccctccaagcttgggtcagtgtgttaactgcttatcagctattcagacatctccagggtttctccatgaaactctgtggtttcatcattccttcttagttgacctgcacagcttggttagacctagatttaaccctaaggtaagatgctggggtatagaacgctaagaattttcccccaaggactcttgcttccttaagcccttctggcttcgtttatggtcttcattaaaagtataagcctaactttgtcgctagtcctaaggagaaacctttaaccacaaagtttttatcattgaagacaatattgaacaaccccctattttgtggggattgagaaggggtgaatagaggcttgagactttcctttgtgtggtaggacttggaggagaaatcccctggactttcactaaccctctgacatactccccacacccagttgatggctttccgtaataaaaagattgggatttcctttt

SEQ ID NO: 20048 - DNA, 740 bp, Homo Sapiens
gcacgaggtcactgatgtacattaagccaataaactgctttaatgaataacaaactatgtagtgtgtccctattataaatgcattggagaagtatttttatgagactctttactcaggtgcatggttacagcccacagggaggcatggagtgccatggaaggattcgccactacccagaccttgttttttgttgtattttggaagacaggttttttaaagaaacattttcctcagattaaaagatgatgctattacaactagcattgcctcaaaaactgggaccaaccaaagtgtgtcaaccctgtttccttaaaagaggctatgaatcccaaaggccacatccaagacaggcaataatgagcagagtttacagctcctttaataaaatgtgtcagtaattttaaggtttatagttccctcaacacaattgctaatgcagaatagtgtaaaatgcgcttcaagaatgttgatgatgatgatatagaattgtggctttagtagcacagaggatgccccaacaaactcatggcgttgaaaccacacagttctcattactgttatttattagctgtagcattctctgtctcctctctctcctcctttgaccttctcctcgaccagccatcatgacatttaccatgaatttacttcctcccaagagtttggactgcccatcagattgttgctgcacatagttgcctttgtatctctgtatgaaataaaaggtcatttgttcatg

SEQ ID NO: 20049 - DNA, 648 bp, Homo Sapiens
  misc_feature (305)..(317): n is a, c, g, or t
gcacgaggcgaacaccaacatccacaggctaacaccccttcagtccacacaaagaagcttcatattttttttataagcatagaaataaaaaccaagccaatatttgtgactttgctctgctacctgctgtatttattatatggaagcatctaagtactgtcaggatggggtcttcctcattgtagggcgttaggatgttgctttctttttccattagttaaacatttttttctcctttggaggaagggaatgaaacatttatggcctcaagatactatacatttaaagcaccccaatgtctctcnnnnnnnnnnnnnacttccctttcttcttccttatataacatgaagaacattgtattaatctgatttttaaagatctttttgtatgttacgtgttaagggcttgtttggtatcccactgaaaggttctgtgttgcaaaccaaagtctgtttatgtcagggggagggggccattgcatccttagccattggcacaaaatatgtggagtagtaacttaatatgtaaaggtgtaacatagatatatttaaaagggaaatggagaatgctgtgaaatgtcttgtggcttatggtctctgtatttatgcagctgatttgtctgtctgtaactgaagtgtgggtccaagg

SEQ ID NO: 20050 - DNA, 485 bp, Homo Sapiens
catctataggttttttttattaaaaaagaaattaagtgttgtcactaaagattgaaggaaattaacaatcttacaattctagaacaggcaaacttcatgataagggattcttaagttttcaaagtgtaggagctctttcacagatacactcttggtgtagggggctgtaagttttatcaaatgttttacatttcatgctttaatctttgctggtagtctaaataaaataaatacacagtgttcaggattatctggatagccatcttaaataacaaagtgttccgcatgaccacagcctctgcacttgtgcctctgatccatatgacaccaaaaccaactatgcttttcatatgatttctccaattgggtcctgtgacctttcacagaattgttgaacatttcctatgaaatctgtggaggacaaggtggaaaacactggttcaaagcagtgattttcaaggtgggatgggatggggtggagttga

SEQ ID NO: 20051 - DNA, 961 bp, Homo Sapiens
gcacgaggcacctgtgctttggtgacaacaaagtgaagatggaggtgtgtaggttagggggaatcaagcatctggttgaccttctggaccacagagttttggaagttcagaagaatgcttgtggtgcccttcgaaacctcgtttttggcaagtctacagatgaaaataaaatagcaatgaagaatgttggtgggatacctgccttgttgcgactgttgagaaaatctattgatgcagaagtaagggagcttgttacaggagttctttggaatttatcctcatgtgatgctgtaaaaatgacaatcattcgagatgctctctcaaccttaacaaacactgtgattgttccacattctggatggaataactcttcttttgatgatgatcataaaattaaatttcagacttcactagttctgcgtaacacgacaggttgcctaaggaacctcagctccgcgggggaagaagctcggaagcaaatgcggtcctgcgaggggctggtagactcactgttgtatgtgatccacacgtgtgtgaacacatccgattacgacagcaagacggtggagaactgcgtgtgcaccctgaggaacctgtcctatcggctggagctggaggtgccccaggcccggttactgggactgaacgaattggatgacttactaggaaaagagtctcccagcaaagactctgagccaagttgctgggggaagaagaagaaaaagaaaaagaggactccgcaagaagatcaatgggatggagttggtcctatcccaggactgtcgaagtcccccaaggggttgagatgctgtggcacccatcggtggtaaaacatatctgactcttctagcagaaagttccaactcagccacttggaaggctctgcagggtctctccagaactctctgctggcaactggaagtttgcagcatatatccgggcggcgtcgaaaagaaagggg

SEQ ID NO: 20052 - DNA, 1520 bp, Homo Sapiens
gcacgagggtcggccggatccctccttctcccggcgcctcaagcggaagaccattcctcaagaattttgtatccaaggcccaaaagtttgttacccaagatgatgaatgctgacatggatgcagttgatgctgaaaatcaagtggaactggaggaaaaaacaagacttattaatcaagtgttggaactccaacacacacttgaagatctctctgcaagagtagatgcagttaaggaagaaaatctgaagctaaaatcagaaaaccaagttcttggacaatatatagaaaatctcatgtcagcttctagtgtttttcaaacaactgacacaaaaagcaaaagaaagtaagggattgacacccttctgttttatggaattgctgctgatcattttttctttaaaacttggatagattccaaaagttacagtacctttgtggcttcattgaatatttatgaagataatgtcagatgtagacaaaaataacacaataacaggagacttccataagtttgtgtattatgttagtctatgaaaacgtgcaaatgtattgtagagactttatgattagaattgcatatatttatgaaacttaaagatgaatgttttattgaatttgtaggtttagcactgtcttttattataggattagtaagatatacaagaaaataaccaccgtgttgtgaaaaagtgaccaaaatcatgtactaaatgcacagctttatgtaccctgtccaccatcttgtgcctcttctccatttgcctcttccttcctatttcccttccgctaaggaaaaaaattggtgtcacatttgtaaaagtaattttaatagttaatcatctctgagagtaacctgtattttaattgttgaaacttaaccaaaataagatactgtctcagctagggcttgtcatttgtgtatttagtgttaagataggaatgctagtgtctctttaattaattggaaatagatggaggctaaaaatgaaggtttttctttgaaactgaattaacttgggaatatttgttgttaaaaacttctttttgcccaaaataactcattttgtattatctgaaaatatataatttctggtcatgtgtatgttaaaatagaaaattttgaggaaaaatggaaatagggtggaaaagtactcggtaaacagtagtaaccaaatattttcactccagatttgtgttttctctggcacagagtagatcttttgggaaatatatatgaaagtggattaagtttgactacccttatgttagccacatctggatgagaacagttacaaagagtttggtctctaagttgatttgtacccagtggggtcaacttctgcaaaattccgtaatggtgtattagtattagaatagtgaataaaatgggaaagttatacatgtatacttattatcttgctcagtattttatcttcacttgtcctagaattttctgtaacccctggctactggggtttgaagaggtttagtcatccctttaacaatttttaaaaattta

SEQ ID NO: 20053 - DNA, 950 bp, Homo Sapiens
cgtccgaagcgaggcaaattattatctcagcccatttctcagcatggacagttggcaaattttttgcaagctcatgaacatctcagctggttacatgaaattaatagccaagaattagaaaaggctcatgcaacacttctgggtttggcaaatatggaaactcgttactttgcaaagaagaaaacccttcttggcttgagtaaattggctgcattagcttcagacttttcagaggatatgctacaagaaaaaattgaagaaatggctgagcaggagcgctttctactgcatcaggagaccctacctgaacagctgctggcggagaaacagctaaatctcagtgcgatgccagtattgactgcaccacaactcattggtctatatatctgtgaagaaaatagaagagctaatgaatatgatttcaagaaagctttggacttgttggaatatattgatgaggaagaagatataaatataaatgatctaaaactggaaatcctttgcaaagctcttcagagagataactggtccagttctgatggcaaagatgatccaattgaagtatctaaagacagtatatttgtgaagatcttacagaaacttttaaaagatggcattcagctcagtgagtacttaccggaggtgaaagacctgctacaagcggatcagcttggaagcttaaagtccaatccttacttcgagtttgttttgaaagcaaattatgaatattatgttcagggacaaatataactttttctaaaaatggccattgtttatgaaatctgtataagtgtgtccttatacaaattttaggccataaacaagtgtaagtttgtacaatttcataacatgtatagctgagtttttatactttatatgtaggaagctaatataaaatagttatgtaactgtgattttggttttcagttatgtgacttgttttttccacc

SEQ ID NO: 20054 - DNA, 1673 bp, Homo Sapiens
tcattctgtcattctggccgctgtttgaagaatgcgaataatgcaacagggagatcagatacaagactggtaaccgaggtgtcagagttgagactcagtttcgcagattgcattggcaagtgaccaagtgggtggtgccacggttgacaaccctatttcttacatcactgagtggatgtacaaggattaaaccacactggggaagaaaagtgctcaaccctgaggcaccctcacacacctcggctcttgtgaacactagtgttcctgccgaagcacgcctacttaccccgctgagcagagcctgagcctgcaacctccagagacctggggaaagccacatgctccgcttcccgcccccggcaagggcgtgtcagctacaaggggcgtgtcatctctaggccccgccccgcgctgcgtgcccacgttgcgccggcctcgcgccagtccgctgggctgcagggactgcggcgcctgagggagtcgctgacgggcacgctgactggaggctggcggacaggcgacagcgacctgcggcaggaccagaggagcgagagcagcaagaaccacacccagcagcaatgtcagcggaagtggaaacctcagagggggtagacgagtcagaaaaaaagaactctggggccctagaaaaggagaaccaaatgagaatggctgacctctcggagctcctgaaggaagggaccaaggaagcacacgaccgggcagaaaacacccagtttgtcaaggacttcttgaaaggcaacattaagaaggagctgtttaagctggccaccacggcactttacttcacatactcagccctcgaggaggaaatggagcgcaacaaggaccatccagcctttgcccctttgtacttccccatggagctgcaccggaaggaggcgctgaccaaggacatggagtatttctttggtgaaaactgggaggagcaggtgcagtgccccaaggctgcccagaagtacgtggagcggatccactacatagggcagaacgagccggagctactggtggcccatgcatacacccgctacatgggggatctctcggggggccaggtgctgaagaaggtggcccagcgagcactgaaactccccagcacaggggaagggacccagttctacctgtttgagaatgtggacaatgcccagcagttcaagcagctctaccgggccaggatgaacgccctggacctgaacatgaagaccaaagagaggatcgtggaggaggccaacaaggcttttgagtataacatgcagatattcaatgaactggaccaggccggctccacactggccagagagaccttggaggatgggttccctgtacacgatgggaaaggagacatgcgtaaatgccctttctacgctgctgaacaagacaaaggtgccctggagggcagcagctgtcccttccgaacagctatggctgtgctgaggaagcccagcctccagttcatcctggccgctggtgtggccctagctgctggactcttggcctggtactacatgtgaagcacccatcatgccacaccggtaccctcctcccgactgaccactggcctacccctttctccagccctgactaaactaccacctcaggtgactttttaaaaaatgctgggttaagaaaggcaaccaataaaagccagatgctag

SEQ ID NO: 20055 - DNA, 1792 bp, Homo Sapiens
  misc_feature (980)..(988): n is a, c, g, or t
gcacgagggtggtggcgactggcgccgacccaagcgatctggagagcggcgggctgctgcatgagattttcacgtcgccgctcaacctgctgctgcttggcctctgcatcttcctgctctacaagatcgtgcgcggggaccagccggcggccagcggcgacagcgacgacgacgagccgccccctctgccccgcctcaagcggcgcgacttcacccccgccgagctgcggcgcttcgacggcgtccaggacccgcgcatactcatggccatcaacggcaaggtgttcgatgtgaccaaaggccgcaaattctacgggcccgaggggccgtatggggtctttgctggaagagatgcatccaggggccttgccacattttgcctggataaggaagcactgaaggatgagtacgatgacctttctgacctcactgctgcccagcaggagactctgagtgactgggagtctcagttcactttcaagtatcatcacgtgggcaaactgctgaaggagggggaggagcccactgtgtactcagatgaggaagaaccaaaagatgagagtgcccggaaaaatgattaaagcattcagtggaagtatatctatttttgtattttgcaaaatcatttgtaacagtccactctgtctttaaaacatagtgattacaatatttagaaagttttgagcacttgctataagttttttaattaacatcactagtgacactaataaaattaacttcttagaatgcatgatgtgtttgtgtgtcacaaatccagaaagtgaactgcagtgctgtaatacacatgttaatactgtttttcttctatctgtagttagtacaggatgaatttaaatgtgtttttcctgagagacaaggaagacttgggtatttcccaaaacaggtaaaaatcttaaatgtgcaccaagagcaaaggatcaacttttagtcatgatgttctgtaaagacaacaaatcccnnnnnnnnnctcaattgacttaactgcatgatttctgttttatctacctctaaagcaaatctgcagtgttccaaagactttggtatggattaagcgctgtccagtaacaaaatgaaatctcaaaacagagctcagctgcaaaaaagcatattttctgtgtttctggactgcactgttgtccttgccctcacatagacactcagacaccctcacaaacacagtagtctatagttaggattaaaataggatctgaacattcaaaagaaagctttggaaaaaaagagctggctggcctaaaaacctaaatatatgatgaagattgtaggactgtcttcccaagccccatgttcatggtggggcaatggttatttggttattttactcaattggttactctcatttgaaatgagggagggacatacagaataggaacaggtgtttgctctcctaagagccttcatgcacacccctgaaccacgaggaaacagtacagtcgctagtcaagtggtttttaaagtaaagtatattcataaggtaacagttattctgttgttataaaactatacccactgcaaaagtagtagtcaagtgtctaggtctttgatattgctcttttggttaacactaagcttaagtagactatacagttgtatgaatttgtaaaagtatatgaacacctagtgagatttcaaacttgtaattgtggttaaatagtcattgtattttcttgtgaactgtgttttatgattttacctcaaatcagaaaacaaaatgatgtgctttggtcagttaataaaaatggttttacccact

SEQ ID NO: 20056 - DNA, 1356 bp, Homo Sapiens
  misc_feature (306)..(333): n is a, c, g, or t
gcacgaggattgatggaaaaagaaaaagaagaaaagcaatctcgcagtacatgttacttgtcgaaaaaattccggacaagactacccttgttttatgttttcagtattctgaaaataccagtgtgtggcagttctcgcagatgttacctaaaactgctgaacttgaccggcagaatgttctgccgttttctgctccctcgacacttgattggagggctgtcgacctctcctcccgtgggggcttccccagtgcctatcttctctgatagtcatggagaggttacactaattcattggagatgtaannnnnnnnnnnnnnnnnnnnnnnnnnnnagaaaaatatatataaatatataatagatatctatcgctatagaataatgcattaataaaatgaggcttttttagaggaagaccaaaaaattcaatgtcttaaaaatatatttaatggcaatgcaaaagtcttcctgcttccgtgctgaactttagaacagaggattgtattgcaagacaaagttgaatgtaaagtgatctccctgaacatttttaaggttttacttttctgaaattatacatcacagcagtgcataggccatataatgttagctggaaggtcaatttcagtgtatgatatactttattaagatgtataaaacatcctgaagtttttatttagttttgggaataggcatcaatgggtggtatttgctttgtaactccccccaggtacgatagggactgaatatggaccctgctgaaagcagtgtattgacgcatatttaactcgccctctatccgtagagtagtcatgacactatacagatggttcgtgttcatactgcagcttaaaacaagcaaaatacacagatgataatatgctaaattttcctctatcctgtacatttcacaaaaaggcatatgcaatatttacatttttaatttagtttacagaatggaaccaaaatgtataaatgttatgtttgctaaaacttcacaatgtatattgggtctttgtacattttgcctgacttaccttaaatttaaaatattttttgctatataaactttaacagttattaaacagtgttttctttttgggtacgtattgtttctggatatcaagatgttaaatatatttcttgctattgtgatatgacaagagacttaacttatcttgctctgtcttccactgtacacgctgtatataggggtcaatgtgatgctgctggagacgagaataaactggactagaatagtgcattgtatttagtctgtattgatcatggatgccctccttaatagccatatgcaataaaataaagtacattatttatgaaatgaaaaaaaacctcgtgc

SEQ ID NO: 20057 - DNA, 1002 bp, Homo Sapiens
gcacgaggagaaagcctggcgtcgggggaaggtgcgggggctggccttcccgctctggatctggccaaagctcaaagggagcacggggtgctgggaggtaaactgaggcaacgactggggctacagctgctacaactgccacctgaggagtcattgccgctgggaccgctgcttggcgacacggccgtgatccaaggggacacggccctaatcacgcggccctggagccccgctcgtacgccagaggtcgatggagtccgcaaagccctgcaagacctggggctccgaattgtggaaataggagacgagaacgcgacgctggatggcactgacgttctcttcaccggccgggagtttttcgtaggcctctccaaatggaccaatcaccgaggagctgagatcgtggcggacacgttccgggacttcgccgtctccactgtgccagtctcgggtccctcccacctgcgcggtctctgcggcatggggggacctcgcactgttgtggcaggcagcagcgacgctgcccaaaaggctgtccgggcaatggcagtgctgacagatcacccatatgcctccctgaccctcccagatgacgcagctgctgactgtctctttcttcgtcctgggttgcctggtgtgccccctttcctcctgcaccgtggaggtggggatctgcccaacagccaggaggcactgcagaagctctctgatgtcaccctggtacctgtgtcctgctcagaactggagaaggctggcgccgggctcagctccctctgcttggtgctcagcacacgcccccacagctgagggcctggccttggggtactgctggccaggggtaggatagtataggaagtagaaggggaaggagggttagatagagaatgctgaataggcagtagttgggagagagcctcaatattgggggaggggagagtgtagggaaaaggatccactgggtgaatcctccctctcagaaccaataaaatagaattgaccttt

SEQ ID NO: 20058 - DNA, 696 bp, Homo Sapiens
cttttaaccaatctgcaaaccttactaaacataaaaaaatacatactggagagaaactacagaactggaatgtgtgataatgattttgacaacacctcaaatttttctaaatataaaggaaatcatactggtgaaaaattctagaaatgtaaagaatgtgtcaaagactttaaatggttttcacacttcattgtatgtaagataattcatactggagaaaactacaagtgtgaagaatttggcaatactgttaattaaggctcaaaccttattgcacaggaaagcgtttatacttaagaaaaattgtacaaatataaagagtgtaaaatagccattaatatctgttgacatcttaatatcagaatgttggtacttaataaaagcattataaatgcaattactgtctaaagattttaagaaaatataagcctttaaagtgaagaagagtattcgttttgaagacaaagattacaaacataaagagggttgtagtacatttactgttatcataaagcttatcatatacattttgtactagagaaaaaccctgaagcagttgctcaaagttttttcaacatcagtgaatctgtatgggagaaaaactctgcaaatgtaatacatttagaaaaacacattttttcaaaatctatagctttagaaaacaccagagagttagtactaaaatatatttctgca

SEQ ID NO: 20059 - DNA, 689 bp, Homo Sapiens
acagtcaaaaagttgattcacaaaaggctgcaacaaagcaagtcaacaaggcacacaataggttaatcgaaaaaaaagtccacagtgagagaagcgctgagtcctgtgcaacatggaaagtgcagaaagaggagaaactgattggattgatgaacaatgaagcagctcaggaaagcacaaggagaagacagaaatatcaagagtctcaagaacctttgaatgaagtaaacagtttcccacaaaaaatcagctatacacaattcccaaactcattttatgagcctcatcaagattttaccagtccagatatattcaagaagtcaagatctccatcttggtataaatacacttccacagtcagcacggggatcacagacttagaaagttcaactggactttggcctacaatttcccagtttactcttagtgaagagacaaacgcagatgtttattattatcgcatcatcatacctgtccttttgatgttagtatttcttgctttattttttctctgaagatgataccaaaattccttttgataattttttaagtttccagctcttcaccgaaatgttgtattcttatttcagtgtttccttccagacatttttaaggtaattggctttaaaaagagaacatattttaacaaagtttgtggacactctaaaaaataaaattgctttgtacta

SEQ ID NO: 20060 - DNA, 598 bp, Homo Sapiens
ccagactgagggagaagaaaaacatgttcggggcaaaagggtaattctcaagtggggaatgccaaatgaaggggtgcttacatgggggcacaaaattccaaatcagccacagtggggtgaggtgagtatgagacgcaggtgggttgaatgaaggaaagttagtaccacttagggctacaggaccctggggttcttctgtcagaggattggggttcaggtttcaggctttagggtgtaacatgggggggcccagtaggggctatgctggttgcatggggaggccccaggcccctccccaagggcccctccttttgggggaatctcactgacgaggcagagtcgttcactgtagtctggctgcagactctcagccagtcccttagacacaccactccaggccgaaaagttcccgtggtattcagtaacaagatcctctaagttcttcagggtgggaattcggggcatcgtccgttccagccagaaatacacacagagaaggctgataatcaatcccatggagccaacagagataaccacggcttccaatgcaaacaggaaaggattctcttttgaagtattgctcccccagtggattggg

SEQ ID NO: 20061 - DNA, 1003 bp, Homo Sapiens
gcacgagggccttcacaaggaccgcccggtggagccgctggacctggccgtgttctgggtggagtttgtgatgaggcacaagggcgcgccacacctgcgccccgcagcccacgacctcacctggtaccagtaccattccttggacgtgattggtttcctcttggccgtcgtgctgacagtggccttcatcacctttaaatgttgtgcttatggctaccggaaatgcttggggaaaaaagggcgagttaagaaagcccacaaatccaagacccattgagaagtgggtgggaaataaggtaaaattttgaaccattccctagtcatttccaaacttgaaaacagaatcagtgttaaattcattttattcttattaaggaaatactttgcataaattaatcagccccagagtgctttaaaaaattctcttaaataaaaataatagactcgctagtcagtaaagatatttgaatatgtatcgtgccccctccggtgtctttgatcaggatgacatgtgccatttttcagaggacgtgcagacaggctggcattctagattacttttcttactctgaaacatggcctgtttgggagtgcgggattcaaaggtggtcccaccgctgcccctactgcaaatggcagttttaatcttatcttttggcttctgcagatggttgcaattgatccttaaccaataatggtcagtcctcatctctgtcctgcttcataggtgccaccttgtgtgtttaaagaagggaagctttgtacctttaaagtgtaggtgaaatgaatgatggcttggagtgcactgagaacagcatatgatttcttgctttggggaaaaagaatgatgctatgaaattggtgggtggtgtatttgagaagataatcattgcttatgtcaaatggagctgatttggataaaaaccaaaatacagctatgaagtgctggggcaagtttacttttttttctgatgttttcttacactaaaataattataaattt

SEQ ID NO: 20062 - DNA, 986 bp, Homo Sapiens
  misc_feature (52)..(91): n is a, c, g, or t
gcacgagggcccagccaggccagccagcctcggcctgggcccgcaagcctannnnnnnnnnnnnnnnnnnnnnnnnnnnnnnnnnnnnnnngacttctccagctactctcacgtggagccggcccccgcgcccccgacggcctggggggcgcccttccctgcgcccaaggacgactgggccgccgcctacggcccgggccccgcggcccctgccgccagcccagcttcgctggcattcgggccccctccagactttagcccggtgccggcgccccctgggcccggcccgggcctcctggcgcagcccctcgggggcccgggcacaccgtcctcgcccggagcgcagaggccgacgccctacgagtggatgcggcgcagcgtggcggccggaggcggcggtggcagcggtaagactcggaccaaggacaagtaccgcgtggtctacaccgaccaccaacgcctggagctggagaaggagtttcattacagccgttacatcacaatccggcggaaatcagagctggctgccaatctggggctcactgaacggcaggtgaagatctggttccaaaaccggcgggcaaaggagcgcaaagtgaacaagaagaaacagcagcagcaacagcccccacagccgccgatggcccacgacatcacggccaccccagccgggccatccctggggggcctgtgtcccagcaacaccagcctcctggccacctcctctccaatgcctgtgaaagaggagtttctgccatagccccatgcccagcctgtgcgccgggggacctggggactcgggtgctgggagtgtggctcctgtgggcccaggaggtctggtccgagtctcagccctgaccttctgggacatggtggacagtcacctatccaccctctgcatccccttgggccatctgtgcagtaagcctgttggataaagacctttcagctcctgtgttctagaactcttgggggataagggagtc

SEQ ID NO: 20063 - DNA, 2078 bp, Homo Sapiens
  misc_feature (2036)..(2048): n is a, c, g, or t
gcacgaggatttgctgcgactttttgagtacggtggtttcccaccagaaagcaactacctgtttcttggggactatgtggacaggggaaagcagtcattggagacgatctgcctcttactggcctacaaaataaaatatcctgagaatttttttcttctcagagggaaccatgaatgtgccagcatcaacagaatttatggattttatgatgaatgtaaaagaagatacaacattaaactatggaaaactttcacagactgttttaactgtttaccgatagcagccatcgtggatgagaagatattctgctgtcatggaggtttatcaccagatcttcaatctatggagcagattcggcgaattatgcgaccaactgatgtaccagatcaaggtcttctttgtgatcttttgtggtctgaccccgataaagatgtcttaggctggggtgaaaatgacagaggagtgtccttcacatttggtgcagaagtggttgcaaaatttctccataagcatgatttggatcttatatgtagagcccatcaggtggttgaagatggatatgaattttttgcaaagaggcagttggtcactctgttttctgcgcccaattattgcggagagtttgacaatgcaggtgccatgatgagtgtggatgaaacactaatgtgttcttttcagattttaaagcctgcagagaaaaagaagccaaatgccacgagacctgtaacgcctccaaggggtatgatcacaaagcaagcaaagaaatagatgtcgttttgacactgcctagtcgggacttgtaacatagagtatataaccttcatttttaagactgtaatgtgtactggtcagcttgctcagatagatctgtgtttgtgggggcccttccttccatttttgatttagtgaatggcatttgctggttataacagcaaatgaaagactcttcactccaaaaagaaaagtgttttgttttttaattctctgttccttttgcaaacaattttaatgatggtgttaaagctgtacaccccaggacagtttatcctgtctgaggagtaagtgtacaattgatcttttttaattcagtacaacccataatcatgtaaatgctcattttctttaggacataaagagagccctagggtgctctgaatctgtacatgttcttgtcataaaatgcatactgttgatacaaaccactgtgaacattttttatttgagaattttgtttcaaagggattgctttttcctctcattgtcttgttatgtacaaactagtttttatagctatcaacattaggagtaactttcaaccttgccagcatcactggtatgatgtatatttaattaaagcacacttttccccgaccgtatacttaaaatgacaaagccattcttttaaatatttgtgactctttcctaaagccaaagtttctgttgaattatgttttgacacacccctaagtacaaggtggtatggttgtatacacatgctgccttcttggggattcaaaaacaggtttttgattttgaatagcaattagtgatatagtgctgtttaagctactaacgataaaaggtaataacattttatacaatttccatatagtctattcattaagtaatctttttacagttgcatcaggcctgaacccgtccattcagaaagcttcaaattatagaaacaatactgttctatacgagtgaccgattatgctttctttggcctacattctttattctgcggtgaagttgaggcttataagttaaaacaaaggaactaacttactgtccaccagtttatacagaactcacagtacctatgacttttttaaactaagatctgttaaaaaagaaatctgtttcaacagatgaccgtgtacaataccgtgtggtgaaaatgaattcagacttattaaatgatgaacttgttaaatcttctcagtgtctatttatcagcacaatacacacaggagaactgttgatggcatattgaatagattttcctgaataaattgctctggaaaccacnnnnnnnnnnnnncctcgtgccgaattcctgcagcccggggga

SEQ ID NO: 20064 - DNA, 1260 bp, Homo Sapiens
  misc_feature (308)..(317): n is a, c, g, or t
  misc_feature (401)..(419): n is a, c, g, or t
  misc_feature (940)..(951): n is a, c, g, or t
gcacgaggtgacccttgtctttaccagaaaggtagacaaaaaagaagcagcagcagctcttaaagtgagggttattctcatactcggttccagccatcagcagacttcctgctcatcggcagatccccctttccaacctgtaactctgatgtgctctggatcagcttttaacttttaatcatatattactgtcttctaaatcccttctcctcagcactaacaaaatcactacaatagcctagtgcttttttggaagcctttttagggaagaatgttaggttcatggtaactagtatgctctttgagannnnnnnnnngttgaaacttaagaattttgagagggtgaggagggttgttcagaatctaaattacagatagatgattgtttcttgtgaatttgnnnnnnnnnnnnnnnnnnngtccctaccatttccttacatttcccttggggcccatctctggctccttgctttttgtttcttgctttgctttatcagttcattccagctccctgttagtgaaggacactgctgttagtgaaggaacaaagtctatgagtcctaaaattttaagtcaaagaaaactgctctgtttcccctttagtaacacttctgaagaggaaaaacttcaatggccaaagttaataatcctatataataattgctttggctttcacctaaaattctgggcatcacaatttccttgggatagaggttgtgttggggaatagattgcttattgctgttcactggagagaaaaggtagtgtttttgtacaagatcataccgccagaagccccaaatcctattttggctcatcttcaggtaaagagtaattcctatcctgtgtgcctcagaagctagaatcgaaggcttaccctattcattgtttattgtcagaaatgcatgatggctcttggaaagaatgacgttttgctggnnnnnnnnnnnngaacagtttgtgtttcacaaacatggcttatcaattttttcaaagaattcttttttcccaaaaagaggagtaacaaaatgtcatttctgaaagaggcttactttataccaactagtgtcagcatttgggatgccagggaacagagagtgagacacctacaatcaccagtctcaaatgcgctattgtttcttttcagagtgttgcagatttgccatttctccataatatggggatagaaaatgggaataaagatagaaagggatgtagaatatgctttcctgcccaacatggttttggagtcgactttgg

SEQ ID NO: 20065 - DNA, 770 bp, Homo Sapiens
aaaatctggccgacaatcagtgcgatcattcagggctgtcagcagcttattaaggttaagggggttcagatcaagataaggtgcagttgggtgagactcagtgatttcagataatgccgttacaggcattagccaccaccatgggatttgaatctgctatgagatcccgtagagaatccagaaatccctgatcttccaccatttgggcattgatatcatggagtttgccacgcagactgctgctgttttccgaacatagggatcctcatccttcaagcacttgcggagcggctcacagagatattctgtaattttgtctacccggatgcaccccatggttctgactgccaaggctcgaatcaaaagattaggatcttcacagtccttcacaaagctgtttacagccatgatggccatgtcaggctgactcttggcgtagttcatcaagtagagatacacaagcttctttagttccagattgtcagtctgcatacagttcactacgtctggaaagagagaactaacatccttccccacggtcatagcagcaatcactttcttcacagcctcctttctcttttctttcttttcattgttgagttcagcttttagttcaaatatttctccttttttattggttgtgaaatacttggagtcagtcatgactttggatctttaatgggcaccttttccctctcaatggtcacaccggacggttccctgcatcatcaacggtcaggctcttaggatttcccctcgtgccggaattc

SEQ ID NO: 20066 - DNA, 1210 bp, Homo Sapiens
  misc_feature (766)..(840): n is a, c, g, or t
ctcaggtgtttaaagagtttgtgctatagctaggtgtggatagcttctgatccctgggttctgggagactgcaggtgccgcacattgtcaagttagaaatactccaggtgggtgttagcactgtggtggtctctggtccacagccttaggtaaacaacttagattctgaggtcaaagaaaaaaggagagggaatgcagccttgtgggggagaagcggggcagagggttctctaatctaatcaggacaggacaggtttcacatacaattgtcccagttcgcatcccagccctggggcacttttctgcttccttccagaggcctgggcctctgataacactttggctttttctccattcacgctgatttggcaaaaggccagagatgggcctccttccctggggaggtgtgatgtagttatcacattcaggacccttgttgatttatcatctattatttgaattcaactggacactctgtaaaatgctgcactgcagcaaaaacaaaaccaccaccaccccagagaaaaccatgtactaattggagtggggtacccccattcacaggttcccaggtcccctggctttggctgatttcaaaatatagagccctttcttgccagtacatccaagtttaaaattatcagcgaaatggtccatgtttttccaattacctgctgacacggttctaagctaagtgaaggggaagatctgagagcgtgctgtttgtggctgttgatgcatattcgtgatgtaacaggtcctgggnnnnnnnnnnnnnnnnnnnnnnnnnnnnnnnnnnnnnnnnnnnnnnnnnnnnnnnnnnnnnnnnnnnnnnnnnnncaaactgttaatcttcgaaaacgaccatttcacttcttggatatcaagtgctaacccagtatgttcttcttttttatgtaagggacagctttctccacagagtcctttctgctggtgaggacagcatttctgagcagggctttgttctctatgtgcattaggacttttatcatgcccttgttctgtgtgtagttacttgacagcatcaaatgccgcctcttcctaatgtcctttcaagttttcatgaactagcaaccccaccttccaccatggttctgggcgccctgattttgctgtgactcccagacccagccactgtttctgccaccctgtaacaggccattaaaactccccgtgttcatcctccttc

SEQ ID NO: 20067 - DNA, 941 bp, Homo Sapiens
ggccccgggctgcaggaattcggcacgaggttttccttttttcttgtttacattttattatcattattagtaataaaccaataaaaactgaataacaaaggaaaaagctcaagataaataatttcttccttgtgaattcaaacacatgcacacacacacatcctcctctgtgtgtgttacttcctcctcacattctgtcctacggtacaaatagttacacaaaagtctacaaaacgcgagtagcagaccccagctgtgttaagctcaggctgattctcagtctagatcaccagcttctccacgctaagtgtacttgtggtttcatcctcttcatttgacccaaaatatcctgggaggtccagcatcctctgctcagcctcagtgaggccaaacgacgtattgtcatagaaggcaaactcagggtgagtggggaagctttgacacttgtcttttctacactgagaagggctcagagaactgaccctctggtagttatctttgggggatgtgggagaagactacttccttgagatactcttgtgactgggggacggtccccgaggagctctgtggggctctgttctctcaattcctgccactaatcctgcctggcgatccccaaggtctggtttcctcaaaggctgccccatgggccttaataaaaattttaaatatactctcacacacacactatattctagagaagaactattgtatcaaaatcctagatttgaataacttattattttaaataatcagtaactaaaaccaagcaatccatcacacaaagaggggaaagggaatattctgagttataaattttttaccctgtctgataaaataaaagcctgaaagtttaaattttcccggaattaaatttaaagataaatttgtttttcagggaaatatcctcaataacaattttaccaaagaggccttct

SEQ ID NO: 20068 - DNA, 1177 bp, Homo Sapiens
gcacgaggagagtatgtgccacgtgacaacctaaatcagcttgcgttgtctttgtccacctttggtatgcagtctgaatctttaaatccgaaaaccttacaaattggaccggaaaacccttaagcagtagggtaacttggagctgtatcttaatttgctaatcaactgacttggaaataggataattcattttatgagctctttaaatgagtttatttgggaatatgcctatcattggaattgaaagcagcatagcttgcttcagtaactccaataatttgggaagcagaaatggaaaaagtaatttgagtcatgtttgcttatgtagtgccgtttaaaattcccctagtaattacctttcatattttattaactaggttaacatcaactgtggttgtaagagtaaatgtttcaccttaagataaacatgggcaatatattaaactctagtctgttttcttgcctgtgaagtgaggctgcacttgattatatttgattctttgttcgtaatacatgggaacgacagctaagtgtggtgaaaaacgcggggatccaaagagctggatttttatctcagatctgccgctaacttttgtatcctataggctacttttatttctatggtctcaatctataacatgaatgggttgggttaaatgactgaagttccttcaagtgctaaaattctttttctacagtcttcattggatttatgtatttcttattcctaatatgtttaactgggatgtctgtcactctagggcggcaagacagacatttaaaagtaacagtcacactgctgaactggcatttctgttaacacaaaagtttagaaaactcacggtaactgttacttgatttaagtgtatataaaattttcagtaaggctgcttttaaaaggaaccactgtccatttaaaggtttcatagttatcttcaatgggttagtattgtttggggcaggacattaaactagaagggattctatacgatgaggtgataccctagatgtaatatattgtaaggcaaaagagattagaagaaatggggaaaggatagtaaaaggcaagtcagattaacgttgaaacatgaagatattctcaattgtatttctgcctatgtttgcttttttggctcaagcatctgttggaagagacaaatggtgactggttcataat

SEQ ID NO: 20069 - DNA, 1361 bp, Homo Sapiens
  misc_feature (329)..(348): n is a, c, g, or t
  misc_feature (535)..(565): n is a, c, g, or t
tacttgacttgccttgatttataggactggggcttggagaaaatgagcagatgttcctctaagacatcgattacagaagccttatatacatggatttgattttgtatttgtagctgaaagtcactgttgtctaaaactaacttttctaagttatcaaaacaacctaatttcttttccaacaaggagaacttaatggcatgaaggattgtgtgacacattggaaaagccagcttactgccactctcttcctttggccattagagggaggtgttgcctttcattgacgcttagaagcaaattgttcacttgttaagaaaagtaaatccttnnnnnnnnnnnnnnnnnnnntttaaccaatttttcttaatacccagaaggaattatactcaatatttccctagttaagaaaagaggagataatgttcgtctaaaaaactccaacgttgtaattacaactctacattcatttacttacttgacatactgccacaaagtagtttttgagttcattaaaaattccaaaggcattagttgnnnnnnnnnnnnnnnnnnnnnnnnnnnnnnnagttaacttttatagacattttagtaacttgctaaagattcaggggattctatgaaaccccgaatttagaaacatctggtctacctcagttaaatgttgactgcttagaaatatagctgaagtgatcaccacagccataaaattgtttaagaaagatttatataatgtttacaaatctggaatcaaggattttagctgaaatcctttaagagatattagagcaagtatttaattcaggtattttcaagttttaaaacttaacctgtttacctactaaaaataaaatagctagtttttttctgcatataaaagttcattgaaatgatatgcccttatttgcaatacttttcccataaagttttaagtgtgaaagaattgtaatttactagatatgtttggtatgggatattttgttaggcaagttttcttttttcttcttaaattgcaataggcttccaaaaagagtataattgtttcagaacaaattaactcttggcattatacgtctccctttttctttacagtattagtaaaaagaaaaattgtacactttctgattttaacttcactaatgtaattactctctcaagaagcttttaaaatttaaattaccatcacacaaccttttttatagtaaagccaacatttgttctctcaccaaactccatgccaaattcatcatgaagaaagctcagcataaataattcaaatactgcttataattttagaggggggtagaatttaagtaaatattccagccggtcgttttatggccaaggcttcagtccaaacatag

SEQ ID NO: 20070 - DNA, 917 bp, Homo Sapiens
  misc_feature (110)..(179): n is a, c, g, or t
gcacgagggaaacattggaagcaggttaaatgttttgtaaactttgaaatatatggtctaatgtttaagcagaattggaaaagactaagatcggttaacaaataacaacnnnnnnnnnnnnnnnnnnnnnnnnnnnnnnnnnnnnnnnnnnnnnnnnnnnnnnnnnnnnnnnnnnnnnnaagtgaaatttattgaggaaaaatatgtgaaggaccttcactctaagatgttatatttttcttaaaaagtaactcctagtaggggtaccactgaatctgtacagagccgtaaaaactgaagttctgcctctgatgtattttgtgagtttgtttctttgaattttcattttacagttacttttccttgcatacaaacaagcatataaaatggcaacaaactgcacatgatttcacaaatattaaaaagtcttttaaaaagtattgccaaacattaatgttgatttctagttatttattctgggaatgtatagtatttgaaaacagaaattggtaccttgcacacatcatctgtaagctgtttggttttaaaatactgtagataattaaccaaggtagaatgaccttgtaatgtaactgctcttgggcaatattctctgtacatattagcgacaacagattggattttatgttgacatttgtttggttatagtgcaatatattttgtatgcaagcagtttcaataaagtttgatcttcctctgctaattgatgttgatgcaatccttacaaatgattgcttttaaaattttaagctaggaaaaaaaatctatagaaagtgttctgttacaaaatgtaaactgttaccattggaaattcacgtcataggaagttagcctttatctaccaactttccagaacttgtttattaagccgaaacctcacccaaatggtacaaaac

SEQ ID NO: 20071 - DNA, 1403 bp, Homo Sapiens
  misc_feature (1060)..(1068): n is a, c, g, or t
gcacgaggcttaaaaggagaaattgtgtagttttaaaatatattttgtgcaaaataccttactatgctataaaccaccattaaaaaccagtgttttgatttggtacttaaatatttttggagtgaaaattatcactaaagtaacatgactccaacaaaagtatggtttcattataaaagagtactgtattgatttgcccaagttttgtaacttagtaaaggtattaacttccttggatttgtactttgtgatttagtatgctgtatcgtgggctggttatgttaactgaaaaaaataaagtcattacctgagttttgcagtgctctaacttaaacagaagaacagctgttcacatcttttagcattttacatttgcctaacttaaaaattgccatgtgtcaaaatcatggttttgtaattgctaaggcatgatatgtcaggttatttgaatataattactttttgaagtaattgtgaccacaaaacatcttttttacatgaaggagctgtgtatcatttgaaattactcaaatgatgtcttgctctgaggcataaatcccaggtacttagtgtttttaataatatggtgccactgcaggatttgggggcggtggggaagaacaagcataatggtagggggaggcttggcctgaaactaaccactgagtgaattgcactgcaggttttacttaacgggaattccttatttgggatgtcaagagggcagctgcaaactgaaaaacaatccagtaaatgtactttgttttatgtattgtagcaggcaattaactactaaataatagctttgacatttgcaattgttgcatagagactatttttgctagaagatgattagctcttgcctttattttacagtgcttagtgtgataaacttctagtcatgtttcctatccaagagaccagttaatatatgtacataaaccacagaaatagtataacacactatttttaaattatcgttttcctacttaaattttgtttagcttaagacttcttaggacatttgtaaaagcaggttaaatttaataaggtttctgannnnnnnnngtaaccggagatagtttttacaagtgaaataacatttcagctaaataaaacatcgctaaataattgatatttgatgaaaatctgctttgtataatttctgtaaattatccttgttctgaaaaaggtgtaatgccctaatatttttaaatccttatcctttgattttttaaaaactgacctattgataaaactataaattttcattttccagtgcagttagttacctttttaaacataaatgcacaacaagcaaatgaatttaagagaactaaactggaataagtgttcataaatgaaacccttggactatttaataaagttgaaatgtgaattaa

SEQ ID NO: 20072 - DNA, 1367 bp, Homo Sapiens
  misc_feature (132)..(181): n is a, c, g, or t
  misc_feature (223)..(273): n is a, c, g, or t
gcacgagggtaagatgaaacagtagtgtgtttataattgtctgtgactattttctataataattagtactatttaatggtgagcttttaaaaatgtaggatagagggtacagtggcactgtatatactattnnnnnnnnnnnnnnnnnnnnnnnnnnnnnnnnnnnnnnnnnnnnnnnnnnctcgaggctgtaatgtgccatgatgattgcacctgcgaatannnnnnnnnnnnnnnnnnnnnnnnnnnnnnnnnnnnnnnnnnnnnnnnnnnttttagaacttttttaaaatcaaagtgcagattgcttgtatgtaaaacccaaataaaggtagagtaagtgtgatatatgggagtattaaaatagcttaaaatttctcgtgaaggacatgtggctaaagggtcaaaaaggatgtaagacttggagccagagcatagtatttcctgaaataacaagtttagtgctttaactatggctacatgtgcttaaggaattttgagccacttatttttgaagatgctgaggacatgtagagtgctttttgtagtgagctaaccttgatctctaaggactaactacccaggtccaggtcttcactaggggtactgacagtgtttaagctttactccacctccttacttagaaatcactttacgatttatttccattttccacttttatagaccatccttttgcttatatgctagatttttctggtgagggaagggttgtgttcttcaggggtcttttgttttgaaatactcaggatggggagaggtttatttaagaacgaattataattatggtttacactgttgggagtaaaggagcatttttacaccccttaagggtgcttaattctgttgaaaccaaaaagatttgtctacaaatgctatcttttttagaaactattagaaatgactccctttcaaagtcaatctttggaaaatattgaggaggtcactaattagttggtgcagttaatataattcaagatgatttggatgatgggaagtttgagaccgctgcattttgtttttaaattatgcaccttctgataacccccaaatacagaaatgttctacatctctgaatgacctctgactttaaaaaagtttttatttgcatggctgtatttacattaacactgacattttcttctactcttctcccttctttcatcttggggttgggtagagaaacacaaaggaaactgaagcatgtgccattctatactgtcattccaaattctcatggactattgcctgttgtgaaaatgtttgaaactgcactgaaagctgcatctgtctgtatctttcttttgtaaatgacctcacatgtaaattcaccaaataaatcctcgtgc

SEQ ID NO: 20073 - DNA, 1404 bp, Homo Sapiens
gcacgaggcagcctttgtagaatttgacgtacacctttcaaaggactttgtgcccgtggtatatcatgatcttacctgttgtttgactatgaaaaagaaatttgatgctgatccagttgaattatttgaaattccagtaaaagaattaacatttgaccaactccagttgttaaagctcactcatgtgactgcactgaaatctaaggatcggaaagaatctgtggttcaggaggaaaattccttttcagaaaatcagccatttccttctcttaagatggttttagagtctttgccagaagatgtagggtttaacattgaaataaaatggatctgccagcaaagggatggaatgtgggatggtaacttatcaacatattttgacatgaatctgtttttggatataattttaaaaactgttttagaaaattctgggaagaggagaatagtgttttcttcatttgatgcagatatttgcacaatggttcggcaaaagcagaacaaatatccgatactatttttaactcaaggaaaatctgagatttatcctgaactcatggacctcagatctcggacaacccccattgcaatgagctttgcacagtttgaaaatctactggggataaatgtacatactgaagacttgctcagaaacccatcctatattcaagaggcaaaagctaagggactagtcatattctgctggggtgatgataccaatgatcctgaaaacagaaggaaattgaaggaacttggagttaatggtctaatttatgataggatatatgattggatgcctgaacaaccaaatatattccaagtggagcaattggaacgcctgaagcaggaattgccagagcttaagagttttgtgtcccactgttagccgctttgttccctcatctttgtgtggggagtctgatatccatgtggatgccaacggcattgataacgtggagaatgcttagtttttattgcacagaggtcattttgggggcgtgcaccgctgttctgggtattcatttttcatcactgagcattgttgatctatgccttttgggcttctcagttcaatgaagcaataatgaagtatttaactctttcactacagttcttgcaagtatgctatttaaattacttggccaggtataattgccagtcagtctctttatagtgagaaaatttattggttagtaatataaatattttaaactaaatatataaatctataatgttaaacatatgttcattaaaagcatagcactttgaaattaaactatataaatagctcatattttacacttaacagcttttcatttgatcaggtctgaaatctttagcacttaggaaaatgactatgcataattatacctgaccatgaaaaaaataagtacctcaaatgcatgc

SEQ ID NO: 20074 - DNA, 1494 bp, Homo Sapiens
gcacgaggagatgatttgcggattaatctttggcatctggaaattacagacaggagttttaacattgtggatatcaagcctgccaatatggaagagctaacagaggtgattacagcagcagaatttcatccaaacagctgtaacacatttgtatacagcagcagtaaaggaactattcggctatgtgacatgagggcatctgccctctgtgatagacattctaaattgtttgaagaacctgaagatcccagtaacaggtcatttttttccgaaatcatctcctctatttcggatgtaaaattcagccatagtggtcgatatatgatgactagagactatttgtcagtcaaaatttgggacttaaatatggaaaacaggcctgtggaaacataccaggtgcatgaatacctcagaagtaaactctgttcactgtatgaaaatgactgcatatttgacaaatttgaatgttgttggaatggatctgacagtgttgtcatgactggatcttacaataatttcttcagaatgtttgacagaaacacaaagcgagacataaccctagaagcatcgcgggaaaacaataagcctcgcacagttctgaagcctcgcaaagtctgtgcaagtggcaagcgaaagaaagatgaaataagtgttgacagcctagacttcaataagaaaatccttcacacagcctggcaccccaaggaaaatatcattgccgtagctactacaaacaatctgtatatatttcaagacaaagtgaattagggttggcattcctagcagaagaacccacttcctgcttagttgagatagttgaatctagcattcgttcctataaaagagagaggtccattgtggcgcccctttccagtgtttgacagtgtgccattcgacaacacattgttatagctacatggagaaagctctgtggattcatcactgtggtgttctccatgtctgctagccatttaggtaagggtagggcacttttaatttaaatgacttcttgcaccatcttgcctaatggactagattggactgtatcaacattgatttactccactttttatgccttccattgtgatgacgtcaaacacagtgaaagccttcagtcatgctatgggatttaattgtgtatcctcattactgtatcatttgtggggtacaccccttccccctttttttaaattaaatacagctcattcttactgtggcttgtagcattcctcctcttctggcctcctggactgctccccttcatctcttacccttgccccctccacccggtcttggtggtggtatattaaaaaaagaaagaatgaaagcacacaaaatgagtcagtttggggtcagtggtataaagggggtatatgttgcaaacaaatgttttagtaacagttggctgtaatcactcctcgccgtgtctggcactgaaaataaggaaaaaaaacctactactgaataaaagtgacaaagaatggaacctcgtgc

SEQ ID NO: 20075 - DNA, 840 bp, Homo Sapiens
aacaaaatggttttattcctaatttttagttcccatacagtttacaaatacacttttactctgataatacagctttgcaactagcaaagcagttgcgctaacacccataaatatagggggggagacaattaacatccactaatgtttctctacataaactattcttttaatgtcatttttttaagaacagttgcaaatagactacataatatacgtgggcaaaaaggcaattaagtgaatctcttgaaacactaaatgtataataaacagcatattatcaacatttacatgattcacatcaaaatgatgacatcctaaaacgtattccttttaaaggatagatttatcaataaaatattacatatcttttaatactctggtacaatacttcatatactgcaggaaaattaattgtaggtctagtcatcagcttaatcagggatccttttcccattagcttttattaataaaagaatcacaattaggtcataaataaacaggcaaattattaattacatgatttgaggcttaggatgaaaacttgtcaaaattagtttgatatacagcaaagttatacaacacactaaaaccaactgttcaatattttttgccttgtgtgaactgcccatagtgaaaaggaacaaatttttagtgatgaaagatacaataaactatattttggaacttttcagaggaagaaggaaaaaagatttcaacaaaattatgggcaaatacagatctctaaccaagggcatcctgacatcaggggagggcatgtgcttgctatgtgtgaaaagttgatcccccacaacatacagaaaacaaagctgccctggcttt

SEQ ID NO: 20076 - DNA, 856 bp, Homo Sapiens
gcacgaggccggcctccccgagccaggagctcggatcccagccggtgcctggaggggatggtgcgcctgccctcgggaagagccccctggaggtcgaggcacagtgggcagtcgaggagggggcctgtcccaggacagccaccgccctcgctgaccgggctattaggtggcagaggccgtcctcaccgccccccttcctgccggctgcttcggaagaagctgagcctgctgagggcctcagggttcctggcttggccaagaatagccgggaatatgtgaggccggggctgcctgtcaccttcatcgatgaggtagactcggaggaggccccccaagcagccaaactaccctacctcccgcaccctgccaggcctctgcaccctgccaggcccgggtgcgtggcagagcttcagccccggggcagcaacaccttcacagtggtgcccaagaggaagccagggactctgcaggaccaaggctgagcccagctgtgggagtcccggaagctgggcagtagccagggactactgcacccgcttctgccttgtttggcctcactgtatcccacccacccctcctggccctggaagcagctagggtgcctcctgccatcggggccaggtctgggtctcactccccggccctgatttgggagggtccaagggggaagtggggtggggaactgcctgtgggtgagtgccaggggcctgctgggtggtggccatctgcgacccggcagggggctgtgcagattctgcacctggccattccctgtcctgtctcctcagcctgcctcacagtggccatggggtgtcggggtgaagggctgtcccagctacttgtcctctgcaggacc

SEQ ID NO: 20077 - DNA, 889 bp, Homo Sapiens
ctggaggacctgtccgagagccgcgagtgcgtgaactgcggctccatccagacgccgctgtggcggcgggacggcaccggccactacctgtgcaacgcctgcgggctctacagcaagatgaacggcctcagccggcccctcatcaagccgcagaagcgcgtgccttcatcacggcggcttggattgtcctgtgccaactgtcacaccacaactaccaccttatggcgcagaaacgccgagggtgaacccgtgtgcaatgcttgtggactctacatgaaactccatggggtgcccagaccacttgctatgaaaaaagagggaattcaaaccaggaaacgaaaacctaagaacataaataaatcaaagacttgctctggtaatagcaataattccattcccatgactccaacttccacctcttctaactcagatgattgcagcaaaaatacttcccccacaacacaacctacagcctcaggggcgggtgccccggtgatgactggtgcgggagagagcaccaatcccgagaacagcgagctcaagtattcgggtcaagatgggctctacataggcgtcagtctcgcctcgccggccgaagtcacgtcctccgtgcgaccggattcctggtgcgccctggccctggcctgagcccacgccgccaggaggcagggagggctccgccgcgggcctcactccactcgtgtctgcttttgtgcagcagtccagacagtggcgactgcgctgacagaacgtgattctcgtgcctttattttgaaagagatgtttttcccaagaggcttgctgaaagagtgagagaagatggaagggaagggccagtgcaactgggcgcttgggccactccagccagcccgcttcggggcggacctgc

SEQ ID NO: 20078 - DNA, 1734 bp, Homo Sapiens
gcacgagggccagacacctgcatccctggctcctctattactcaggggcattcatgcctggacttaaacaatactatgttatcttttcttttatttttctaatgaggtcctgggcagagagtgaaaaggcctctcctgattcctactgtcctaagctgcttttcttgaaatcatgacttgtttctaattctaccctcaggggcctgtagatgttgctttccagccaggaatctaaagctttgggttttctgaggcggggaggagggaactggaggttattggggttaggatggaagggaactctgcacaaaacctttgctttgctagtgctgctttgtgtgtatgtgtggcaaataatttgggggtgatttgcaatgaaattttgggacccaaagagtatccactggggatgttttttggccaaaactcttccttttggaaccacatgaaagtcttgatgctgctgccatgatccctttgagaggtggctcaaaagctacagggaactccaggtcctttattactgccttcttttcaaaagcacaactctcctctaaccctcccctcccccttcccttctggtcgggtcatagagctaccgtattttctaggacaagagttctcagtcactgtgcaatatgccccctgggtcccaggagggtctggaggaaaactggctatcagaacctcctgatgccctggtgggcttagggaaccatctctcctgctctccttgggatgatggctggctagtcagccttgcatgtattccttggctgaatgggagagtgccccatgttctgcaagactacttggtattcttgtagggccgacactaaataaaagccaaaccttgggcactgttttttctccctggtgctcagagcacctgtgggaaaggttgctgtctgtctcagtacaatccaaatttgtcgtagacttgtgcaatatatactgttgtgggttggagaaaagtggaaagctacactgggaagaaactcccttccttcaatttctcagtgacattgatgaggggtcctcaaaagacctcgagtttcccaaaccgaatcaccttaagaaggacagggctagggcatttggccaggatggccaccctcctgctgttgccccttagtgaggaatcttcaccccacttcctctacccccaggttctcctccccacagccagtcccctttcctggatttctaaactgctcaattttgactcaaaggtgctatttaccaaacactctccctacccattcctgccagctctgcctccttttcaactctccacattttgtattgccttcccagacctgcttccagtctttattgctttaaagttcactttgggcccacagacccaagagctaattttctggtttgtgggttgaaacaaagctgtgaatcactgcaggctgtgttcttgcatcttgtctgcaaacaggtccctgcctttttagaagcagcctcatggtctcatgcttaatcttgtctctcttctcttctttatgatgttcactttaaaaacaacaaaacccctgagctggactgttgagcaggcctgtctctcctattaagtaaaaataaatagtagtagtatgtttgtaagctattctgacagaaaagacaaaggttactaattgtatgatagtgtttttatatggaagaatgtacagcttatggacaaatgtacacctttttgttactttaataaaaatgtagtaggat

SEQ ID NO: 20079 - DNA, 1136 bp, Homo Sapiens
cccattaaaaaggatcccccgggctgcaggaattcggcacgaggttttgttataattataaaaactttatttcattcttactttaattaaatctttataagcaccatgtcatgagctggcaatctagaaagaggacactggaatgctttagtcaattacaaactgcaagctgatgatgtgaagttacagctacgtggagcatgtgaacaagaccacatttagaaaggttcacttaagaatcccatgacaatgcgcaaaacaggaatctggcattgatttgttcacactttttatagtcagaacgcaaagcttgtgcatgtaaacatcaagagaaacattttatcaccctgacagtttacagtttgctcaaatttgaccctgaaagcatatatgttgccatcttgttttcttgaccagtgctgggccacaggctgaaaaactccattcctttaaaatttaaatgatgcttaaaggctatgttcaacattgtgcaagttgtcagcaaggccttttaatgtgtacatttctcatgtatgatcaccaaaccattatttacctaatgaaattgtgaaaaactatacatattcagcaaaatgttttaatttggtcctatattaaaagacccaattgccaagggattttacacaaatttaattcacaagcatgtacacaagagaatcactataaagaacattgcttcctggtttatgaataaaaagtttatcttctacttacactaaaacatacaaaaaataatctacaaaaatcgtttacaattgattttagctaaagaaaaagctttcttcaggaaaaaaaagatgattgtgtggtggtagtattttagccatcaaaaaaggaatgtaagtaaccaataaatataatgtgctttctccatatagacatatttacacttgagtctttggcttatgttattttctaaaaagaactttaaatgatccagccatcattgcacattaaaagaaaataagccagttatatatatttatatattcccatagagatctgctacactggaaacatataaaaaacgaactttactatgaatttgcacagcttttcttttcttcttccttttaagattcatcagctttcattttagaaagggagcctcgtgc
